United States Patent Application Publication US 2024/0093182 A1 - sequence listing, part 17

SEQ ID NO: 35864 - DNA, 880 bp, Artificial sequence
  DNA replication origin
ggagggaggtggggggggtcagcccccccgcccggccagccgacccgtccgggaggtgaggggcgcctctgcccggctgcccctactgggaagtgaggtgcccctctgcccggccagctgccccgtccgggagggaggcgggggtgtcagccccccgcccggccagccgccctgtccgggagggaggtggggggcggtcagcccccctgcccggccagccaccccgtctgggaggtgaggggcgcctctgcccggccgcccctactgggaagtgaggagcccctctgcccggccagccgccccatccgggagggaggtgggggggtcagccccccgcccggccagccgccccgtccgggagggaggtggggggggtcagcccccctgcccggccagccaccccgtccgggaggtgaggggcgcctctgcccggccgcccctactgggaagtgaggagcccctctgcccggccaccaccccgtctgggaggtgtgcccaacagctcattgagaacgggccaggatgacaatggcggctttgtggaatagaaaggcgggaaaggtggggaaaagattgagaaatcggatggttgccgtgtctgtgtggaaagaagtagacatgggagacttttcattttgttctgcactaagaaaaattcctctgccttgggatcctgttgatctgtgaccttgcccccaaccctgtgctctctgaaacatgtgctgtgtccactcagggttaaatggattaagggcggtgcaagatgtgctttgttaaacagatgcttgaaggcagcatgctcgttaagagtcatcaccactccctaatctcaagtaatcagggacacaaacactgcggaaggccgcagggtcctctgcct

SEQ ID NO: 35865 - DNA, 1313 bp, Artificial sequence
  DNA replication origin
tcccagtaggggcggccgggcagaggcgcccctcacctcccagacggggcggctggccgggcggagggctgacccccccacctccctccccgacggggcggctggccaggcggggggctgacccccccacctccctcccggacggggcggctggccgggtgggggggctgaccccccatctccctcccggacggggtggctggccgggctgaggggctcctcacttcccagtaggggcggccgggcagaggtgcccctcacctcccggacggggcggctggccgggcgggggggctgacccccccacctccctcccggacggcacggctggccaggcggggggctgacccccccacctccctcccggatggcacggctggccgggcgggggggctgaccccccacctcccttccggatggggcggctggccaggcggggggctgaccccccccacctccctcccggacggggtggctgccggtcggagacgctcctcacttcccagatggggtggctgccgggcggagaggctcctcacttctcagatggggcagctgccgggcggaggggctcctcacttctcagacggggtggttgccaggcagagggtctcctcacttctcagacggggcggccgggcagagacgctcctcacctcccagatggggtctcggccgggcagaggcgctcctcacatcccagatggggcggcagggcagaggcgctccccacatctcagacgatgggcggccgggcagagacgctcctcacttcctagatgtgatggcggctgggaagaggcgctcctcacttcctagatgggatggcggccgggcggagacgctcctcactttccagactgggcagccaggcagaggggctcctcacatcccagacgatgggcggccaggcagagacactcctcacttcccagacggggtggcggccgggcagaggctgcaatctcggcactttgggaggccaaggcaggcggctgggaggtggaggttgtagtgagccgagatcacgccactgcactccagcctgggcaccattgagcactgagtgaacgagactccgtctgcaatcccggcacgggaggccgaggttggcggatcactcgcggttaggggctggagaccggcccggccaacacagcgaaaccccgtctccaccaaaaccagtcagggtggcggcgcgcgcctgcaatcacaggcactcggcaggctgaggcaggagaatcaggcagggaggttgcagtgagccgagatggcagcagtacagtccagcttcagctccgcatgagagggag

SEQ ID NO: 35866 - DNA, 1519 bp, Artificial sequence
  DNA replication origin
aggtagaatttaaaattcttaaaatagaaacaaacataaggactaaactgagaaaaactttaaaaagtatactcaaattcactgacacaatcatgggtatatctaaataatgagattccgttttaagtaagaagaaaatacgtaattacgaaggaggctttacctttgggaaaacaaaaagccacttttgaccaattattcccacagatacacacccgggtccccaaccacccgccaggagggcccatcctggtgcctggaaggcgggggttcctgcgatctggggttgggatttcggctcaggccgtgcgcggtggccttgggtcgcgcccgccctgcctgggcccccagcccaagggaccgagcgggtgcgggcggggcgggcggggcgggcggggcgggggtgtcgggggctcggactcggagccgtccctgccagtggctttcgtgggcggccccgccttggagcccaggccaacgagccgcgcgggacggaagagctgcgggtggggagggacaagcgggcggagaaggggcggccctgctggaggcccagcgagtctgagtgattgacaagtgaatgagctgggaatgaagactcctggggccgggagggagagagggggttggagggtggtgaatgcctgggcctctggggctccaggctgccagtggcccgaccaggctctcggtgtcctcctccaacctcagtttcctcacctgtcccagaggacgaatatgactgttgtgatgattaggccagataatcctggtaagcatttattagcctgcctggtctctggatattttttttttcttggtaaagacattttgccgcccaatatctactattggagagagagtttgggaggcagaaggtaggactcacccttggcttcagagtcccttatgggtgccccatccccttaggttcaattaaagcacatagttggaaacaagtcccctacccaggacagctacagagtccagaaccagaagatcttgttttctgaaccaaggactttgtcttatccccaaatcctaattcctcagggtggtcagcttcagacaggagtctgaaattgattctcgctctccggggtggatccaaggctcttgtgatgcggtgttgttctaccccatcccacccctgtgcctcccccaatgcattgggagtccttaaccgtagtgacttcaatttggaaacaatgctcccaaagcaggagatgtggccctccccaggcagctggcctgataaacatctgtcctggggcaaaagacccagagcagggagggactctcacttcccactttcacatgctatagtcatttaatgggctgtggtgacatctctgggtcacctagcctgcagaatgggatgttgactttgtgccacaatgagggaaacggaggcacagggctagtgagtgaaaaaaatcagaaagactctgtgactaggaaacactattcaggcccacggcccctacaggactcagcatcctttggggtgcaccagtgg

SEQ ID NO: 35867 - DNA, 1781 bp, Artificial sequence
  DNA replication origin
tcgctcccgccctgccggggcccccagctcgagggaccgagcaggtacccgacgggctggcagccagccacgcagggtgctgtaggggtgggttgggccgggtgtcgggggctcggattcagagccatctttgccgtagggccggctggggcaggcttcccgctctgggaaatttgcccccgctatccctgccagtggctgtcgtgggcggccccgccttggagccctggccaccgagccgcgcgggactggagagctgcgggtggggagggaccagcgggcggaggaggggcggccctgcaggcgacgcggggactggcaagggcgactaggtgggaaaaggtgatcgtccccaccaggccagcccgcgggctctgctgccgcccctccctgaaattcacggccagagagggcgcactggtgtgtgtggcgcctggagccttaaggtccccatccaagtgcgaggccccagctggtagcccggcccaggggcgtccactgtcccggccccagaccccaggtcctggccagattggccagagtcagaggctggaatctggagggcggaggtgagggtgtcagctaagaccagcccctgcccggcagtggccagcataacgcggtgacagtctctggaggccccactgcctgtcaagcccgctgggctccttagatccgtctgcccctagaagtgcgcacccaacgccaggcagagggagcgggtgtggggctgctggcggtcaaggtcctcggagatgaggacggtcttctaggaggggcccgggggccacagaaggataggggagtgtacgccgagcccaccttgcaaaggcgctctggttccccaggggcggcaccttcggcctccagccaagtcgccgagcgctcccagtgctgcctgcccggcacctgcgctccagactcctggctgccaaacaaagaggaagcccgccccctggaacaggccactctcagattgggcgagggaagcacagacacccccacccccagcctggcagccacacacagggaggtcgtcacctgatgagtgtgggggggcttgagggagggctggtggccccgcgggcctgaattattgacaagtgaatgagctgggaatgaagtcacctgaggccgggaagaaggggcgggggttgggggcggggggcggggtgttggagggcggtgaatgcccggacctctggggctccaggctgccagtggcccggccaggctcccggtgtcctcctccaacctcagtttcctcacctgtcccagaggacgaatatggcagggctgtttcggtgattaggccggataatcctggtaaactttattagcctgcctggtctggatattattttttctgactttgttaagaaactttgctgcccaacctctgcttttggaaagtgggctgcggaggcaggaaggcaggactctcacccttggcttcggagtctcttccgcgtgccccccccccgccacccccttagcctcaatgaaagcacaaagctggcaaaactcccctacccaagacagctgcagagtccagaaccagaatatcttgttttctgacccaagggccttttcttatccgaaaatcgaaatctctttgagtggtcagcttcagacaggagtctgaattgtttttctcaattgagaaaacaattggttgacccaagccccttatgatgaagcgttgctctacccccattccacccttttcctgccctaatgcattggaggtccttaaatgtagtgacctgtaattgggagca

SEQ ID NO: 35868 - DNA, 995 bp, Artificial sequence
  DNA replication origin
ctaacgtaagcctggagtttcaggcaagctcccagcccgtcttccttttctcttttctttttctttttatttttttgagatggagtctcactttgtcccccaggctggagtgcagcggcgagatctcggctcactgcagcctccgccttctgggggttcaagcgattctcctgcctcagcctcccgagtagctgggattacaggcgcgcgccagcacacccggctaatttttgtatttttagtaaagaccgggtttcaccatgttggccaagctggttttgaactcccaacctctggtgatctgcccgccttggcctcccaaagtgctgggattacagtcctgagccaccatgcccggccccttttctcttgaatacaggggaaatttacattacccctccccgtgctgaccaaagccctggggcctgcaggtgcatttttcccctttctgaacagtttgggaggtgagaagaagagaaaggtggatactaagttcccttcaggggacaggaagtgctcagctgagatggcagatcagagtgagggcttgtcattcccatggcaagtggggggcctagatgctaagagttttgcagctttgggctcagagatgtccaacaaagattaaattcttgagtctttctggaagccagtcaccagagaggagagaggaagtggaaatgggggcctggagtctgagtgtttgggttcatgttgcctgcattttggtccacgtggctctgtttaatacctgtgtgaccttgtgcaagtctcttaacctctaacctcttgcgcccttagccatacctgtcttgtcggattgctttgaggatgaatgaagcagctgtgtttcgacacttagtgcctggcgtatagtaagtgctcggtggaagatttcttatcattatcatcaaagacaacaggaatgaaactaactggagacaagatgagtaggacaggcagaaaagagagagagatactgatgggtaggagca

SEQ ID NO: 35869 - DNA, 875 bp, Artificial sequence
  DNA replication origin
ggtccgagggcctggatgcgaccttggggcagcacccacccttccgggcccactgccaaggccgcaggctcagggcacgcccggggcagtggagctggggagggaggcccgagtcgcgttttaactctgccctgtcccccagggccgcgcctctcacgcgggctgcaaacttcagcgtcgctgaagttacagatgtgcgggactcggcaaggaggtgggagacaagaaaagctgtaagttaacaggcgaggacagggtgagcaggggctggaatccgaccgcgcgaggcggtggcccctgcacctccagcactgaagtttagcctgcggcggggaccctaaaggacccggcctccgggccccgcgcacggggtcggcagcaggaagcccgcggggacagccttccctgacgctcgcccgcgccgacctctgagcggaggggacacccaggcttgagagagggcgcagcccggtcggcggcagttcctgggcgccaggtgtgcctgaagccctccaggaagaggggcgtgacccagactctagggaagatccctgacactgtgaatctaggtttggcttctgatttcccccaagggggttgagagtggggcgagggtgcttcagaggccccggggggctttccctgaagaagggagtcagggcgtggtgctcggctcagaggttatttcctgttccggagtgactgttccttttcagctcccggcattgaagcactcgtaccggccacactggaggccatgagttaactaacgtaagcctggagtttcaggcaagctcccagcccgtcttccttttctcttttctttttctttttatttttttgagatggagtctcactttgtcccccaggctgga

SEQ ID NO: 35870 - DNA, 1692 bp, Artificial sequence
  DNA replication origin
gccctgagcctgcggccttggcagtgggcccggaagggtgggtgctgccccaaggtcgcatccaggccctcggaccctgccggggccagtagtgggcaagacgagactccaagagcggccgggccgctggggtcactggggatagtcctgaggtcttgccgggtaggatgggggtcccagacccacgctccagcggggacgccccgactccagcccggccccggctccggaccggccgggtctccgacaccgtccgccacgcacgccgatccgccccctctctggcagaactgggccctgggcgtggccgtggccgtgggcgtggctctacccatggcctgagcgcgcgggacccggagggctgatgcctccccgccccgtctccacagcaacgggcgtgtgcggggacccagagctggctggggtggaaaccgcggcctactttcccgcctccagcaaactctgcaattgctgaggttgatttagcagcacccaagggatctgggtcggcaagagcacctcagtgacagcctggcaccggggtccgcaggagaaggccaggctggggccagggagctgaggctgaggaggagcgtttgcacaggctagggagacacggcacagcagtatccgcctcagacatttgtagcaccgttagtcctgccactttctctcactgtagcttcgcaacagacttgggaaccaagcaaggcatggctgaggaagcttaagcccagtctgggctcgcggaagaagctggtggatccaaatatctgcttcctgcctccacccacccctccccgctccgtgagcacattcatccatccaacatttatgatcactccctgccagggcaattctaggggctggggatacagtgaacaagaccaaggctccgccctcctggagtccacatcccagggacatgcccttcttccaggctcctccctcagtgccctggtggtggctgggggaggctggtctgcctttctggttagcgatagcttaggtgactcccaggtcaagtgtaagctccttgatgatggcaggaaactggtggtggaaacagtcagtaatcatggggtggttcaccttgtggatcccactactgcattagcaaagagcaggctgggcacacaggggcagtcatcatcccgcttcctttctctctgcttcacgttcttccttccgcaggcaggggagatggaacctggtccacagggccaagcctgtcccagccctccaggcagaccggcggaataggtagctggcccctcacaggcactgcgatccgggtcagtgcagatcgcggcagttattttacctatgaacgcccagcacaccgtcaaacgctcagctcaggtgccccaggcgggcaggcttttcacttgggagcatttcctttgacacaaaggggaccatggcactggctcagagactaacagcctctgcctgcagggtctgctggtcagttctcctgcttctcaggaggtggtcaacttttcccaggaagccattgtaaggaggcgcccattcttcatcttgtcctctctgctcacttcctttagcgtggttggggaactccagagccccacatcacagttcagcacgtgcctcaggagcttcagcacctccttcgtgaaaggagagtctgccggtaacgggggaagcaggccatcagcctgcccagct

SEQ ID NO: 35871 - DNA, 1133 bp, Artificial sequence
  DNA replication origin
cctctcctgtggacccccgggctgggctgtcactgaggtgctccggctgacccagatcccctgggtgttgctaaatcaacctcggcaactgtagagtttgctgaaggcgggaaggtagtccgagggttccgccccagccggctccagggtcaggcgcacgcccgtggccatggagacggggagaggaggcctcggccctcccggtccagcgcattcagccaaggctacggccacagccacgtctagccagagagggggcggcggatccgtgtgcgctgcgggcagtggtggaggcggggccgggccggaggcggggccgggccggaggcagggcgtccccactgcagcgtgggtctgggacaccagtccacccctgcgcgacctcagggcccccacatcctgaggggaccggctgctcttggcctctcgcctcgcccatcgctggccccggccgcgtcccagggcctggatgcgaacttggggcagccctcacccttctgggcagtttggaaggtgagaggaagagagaggtggttactaaattcccttcaggggacaggaagtgctcagctgagatggcagatcagagtgagggctggtcattcccaaggcaagtggggggcctagatgctaagagttttgcagctttgggctcagagacgtccaacaaagattaaattcttgagtctttctggaagccagtcaccagagaggagagagaaagcggaaatggggtcctggagtccgagtgtctgggttcatgttgcctgcattttggtccacatggctctgtttaatacctgtgtgaccttgtgcaagtctcttaacctctaaccacttgcacccttagccatacctatcttgtcggattgctttgaggatgaatgaagcagctgtgtttcaacacttagtgcctggtgtatagtaagtgctcggtagaagatttctcatcattatcatcaaagacaacaggaatgaaactaactggagacaagatgagtaggacaggcagaaaagagagagagatactgatgggtaggagcatagatggctgagaccagtgggcagcacctccatgtcctgacactaaaagtttagaaatttactttgcctctgccgggtgcgatggctca

SEQ ID NO: 35872 - DNA, 1744 bp, Artificial sequence
  DNA replication origin
gtctggaccgcgcccgccctgcctgggctcccagccggaaggacggagcggttgcggggcgggcgggctgcgagccacacagggtgcgggcggggcgggcggggctggggtgtcgggggctcggattcggagccagctctgccgtggggcgggctggggcaggcttcccgctctgggaaatttgcccctgctctccctgccagttgcggtcgtgggcggcctcgccttggagccctggccacggagccgcacggggcggtagagaggctggtggggagggaccagcgggcggtggaggggcggccctgcaggcgacgcggggactggaaagggcgcctgggtgggaagaggcgctggcgggtgatcgtccccaccgggccagtccccgggatctgctgccgcccctctccgaaattcacagccagagcgggcgcactggtgtgtgtggcgcctggagcgctagggtccccacccaagtgcgaggcccccgcggggagcccagcccaggggcgtccacagtccaggccccagaccccaggtcctggctagattcgccaaagtcagaggctggaatctggagggcggatgtgagggtgccagctaagcccagcccctgcccggcggtggccagcataacgcggtgacactctctggagcccccactgccaccactctgctgtcaagcccgctgggctaagggatccgtctgcccctagaggtgcgcacccaacgccaggcagagggagctggcgtggggctgctggcggtcaatgtcacccgagatgaggaggatcttctaggaggggccccggggccacagaacgagaggggagtgtgcgctgagcccaccttgcaaagacgctctggtccccgaggggcggcaccttcggcctccagccaagtcgccgagcgctcccagtgctgcctgcccggcacctgcactccagactccaggctgccaaccaaagaggaagcccgccccctgggaacaggccactctcagcttgggcgagggaagcacagacacccccatccctagcctggcagccacacacagggaggccatcacctgacgattgcggggggcctgagttattgacaggtgaatatgctgggaatgaagactcctgggcctgggagggaggggcggtggtgtggagggcggtgaatgcctggacctctgggtctccaggctgccagcggcctgaccaggctcccggtgtcctcctccaacctcagtttccttacctgtcccagaggagaaatatggcagggctgtttcggtgattaggccggataatcctggtaaaatttattagcctgcctggtctggatattattttttctgactttgttaagaaactttgctgcccaatgtctactcttggaaagtgagttggggaggcaggaagtcaggactctcacccttggcttcagagtcccttccaggtgccccctccctttaggctcaatgaaagcacagagctggcaaaattcccttacccaagacagctgtagagtccagaatcagaagatcttgttttctgacccaaggaccgtttcttaccccaaaatcgaaatctctttgagtggtcagcttcagacaggagtctgaatttgattgtttttctctagggttaacccaaggcccttatgataagcgttgcttcatccccattccaccccttttcctgccctaatgcattgggggtccttaaccgtagtgacctggaattgggagcaa

SEQ ID NO: 35873 - DNA, 943 bp, Artificial sequence
  DNA replication origin
tcccatctaggaagttaggagcgtccctgcccggccgctcatcgtctgagatgtggggagcgcctctgccccgccgccccatctgggatgtatggagtgcctcggcccagccgcgaccccgtctgggaggcgaggagcatctctgcccggccgccccatctgagaagtgaggagcccctccgcccagcagccaccccgtctgggaagtgaggagcgtctccgcccggcagccgccccgtccgggaggtggggggcagcccccgcctggccagctgccccgtccgggagggaggtgggggccagtccccacccggccagccgccccatccaggagggaggtggggggcgcctccgcccggccagctgccccatccgggaggtgggggcgcctctgcctggccacccctgctgggaagtgaggagcccctctgcctggctgccaccccgtctgggaggtgtacccaacagctcattgagaacgggccatgatgacgatggcggttttgtcgaatagaaaagggggaaaggtggggaaaagatagagaaatcagattgttgctgtgtctgtgtagaaagaagtagacataggagactccattttgttctgtactaagagaagttattctgccttgggatgctgttaatctataaccttacccccaaccccgtgctctctgaaacatgtgctgtgtccactcagggttaaatggattaagggcggtgcacaatgtgctttgttaaacagatgcttgaaggcagcatgctcgttaagagtcatcaccactccctaatctcaagtacccagggacacaaacactgcggaaggtggcagggccctctgcctaggaaaaccagagacccttgttcacttgtttatctgctgatcttccctccactattgtcctatgaccctgccaaatccccctctgtgagaaacacccaa

SEQ ID NO: 35874 - DNA, 1213 bp, Artificial sequence
  DNA replication origin
atcttttccccacctttcccccttttctattcgacaaaaccgccatcgtcatcatggcccgttctcaatgagctgttgggtacacctcccagacggggtggcagccaggcagaggggctcctcacttcccagcaggggtggccaggcagaggcgcccccacctcccggatggggcagctggccgggcggaggcgccccccacctccctcctggatggggcggctggccgggtggggactggcccccacctccctcccggacggggcagctggccaggcgggggctgccccccacctcccggacggggcggctgccgggcggagacgctcctcacttcccagacggggtggctgctgggcggaggggctcctcacttctcagatggggcggccgggcagagatgctcctcgcctcccagacggggtcgcggctgggccgaggcactccatacatcccagatggggcggcggggcagaggcgctccccacatctcagacgatgagcggccgggcagggacgctcctaacttcctagatgggatggtggctgggaagaggcgctcctcacttcccagactgggcagccaggcagaggggctcctcacatcccagacgatgggcggccaggtagagacgctcctcacttcccagacggcgtggcggccgggcagaggctgcaatctcagcactttgggagtccaaggcgggcggctggaaggtggaggttgtagcgagccgagatcatgccactgcactccagcctgggcaacactgagcactgagtgagcgagactccgtctgcaatccccgcacctcgggaggccgaagctggcagattactcgcggttaggtgctggagaccagcccggccaacacagtgaacccccgtctccaccaaaaaaatacgaaaaccagtcaggcgtggcggcgtgcgcctgcaatcccaggcagtctgcaggctgaggcaggagaatcaggcagggaggttgcagtgagccgagatggcggcagtacagtccagcttccactcggcatcagaggaagaccgtggagagggaggaagagggagaccgtggggagacggagatgagggagagggagatggagagctgtgttggctctttttacttaggctaatgtcctacaggttcatcagtatcgttgcagataacaagatttctttatttttaagggctgaatagcattccattgtg

SEQ ID NO: 35875 - DNA, 1321 bp, Artificial sequence
  DNA replication origin
caaaatggaatctcccatgtctacttctttctacacagacacagtaacaatctgatctctctttcttttccccacatttcccccttttctatttgacaaaaccaccatcgtcatcatggcccattcccaatgagctgtcgggtacacctcccagacggggtggcggccgggcagaggggctcctcacttcccagatgaggtggctgggcagaggcgccccccacctcccagacggggcagctggccgggtggaggcaccccccacctccctccgggacggggtggctggctgggcgggggctgccccccacctccctcccggacggggcggctggccgggcgggggctgcccccacctcctggatggggcggctggccggacgggggctgccccccacctcccggacagggcagctgccgggcggaggggctcctcactttccagacagggcggctgctgggcggaggggctcctcactttccagacagggcggctgctgggcggaggggctccttacttcccagatcgggcggctgccaggcggaggggctcctcacttctcagacggggcggccgggcagagacgctcctcacctcccagactgggtggcggtcaggcagagacattcctcagttcccagacggggtcgcggccgggcagaggcgctcctcacatcccagacgaggcgacgggtcagaggcgctccccacatctcagatgatgggcggccgggcagagaggctcctcacttcccagatgggatggcggccaggaagaggcgctcctcacttcccagactgggcagccgggcagagacgctcctcacttcccagacggggtggcggccgggcagaggctacaatctcagcactttgggaggccaaggcaggcggctgggaggtggaggttgtagccagctgagatcacgccactgcactccagcctgggcaccattgagcactgagtgagcaagactccgtctgcaatcccggcacctcaggaggccgaggcaggcggatcactcgcggtcaggagctggagaccagcccggccaacacggcaaaacccagtctccaccaaaaaatgcaaaaaccagtcaggcgtggcggcgcgcgcctgcaatcccaggcagtctgcaggctgaggcaggagaaatcaggcagggaggttgcagtgagcggagatggcggcagcacagtccagcctcggctttcacaactttggtggcatcagagggagaccgtggagagggagagggagaggacattttacattttaaaagttgtaattcatgcaatgtaattttcaaacagttgacc

SEQ ID NO: 35876 - DNA, 1863 bp, Artificial sequence
  DNA replication origin
ccaattgtttccacagatacacacccaggtccccaaatacccgctaggagggcccgtcctggttcctagagggcggggatcctgcggtccgggtttggggtttgggttcaggctccgtgcggcggcgctgggtcgcgcccaccctgcagggggccccagcccgagtgaccgagcgggtgcgggacgggcgggcagcgagccacgcagggtgcgggctgggcggacggggccggggtgtcgggggctcggattcgaagccatccctgccgtggggctggctggggccggcttaccgctctgggaaatttgcccccgctgtccctgccggtggccgtcgtgggcggcccccgccttggagcccgggccacagagccgcgcggggctggagagcggcgagtggggaggaaccagcgggcggaggaggggcggccctgcaggcgacgcggggactggaaagggcgcccgggtgggaaaaggcgctggcgggtgatcgtccccacccagccagcccacgtgctctgctgccgcccctccccgaaattcacagccagagcgggcgcactgatgtgtgtggcgcctggagccgcagggtccccacccaagtgcgaggtccccgcggggagcccggcccatgggcgtccacagtccaggccccagaccacgcgtccggtccagattcgccgaagtcagacactggaatctggagggcggatgtagggtgtcagctgagcccagcccctgcccggcggtggccagcataaggcggtgacactctctggagcccccactgcccccaccctgctgtcaagcccgctgggctaagggatccatctgtccctagaggtgcgcacccaacgccaggcagaggtagcaggtgtggggctgctggcggtcaaggtcccccgagatgaggagggtgttctaggaggggccccggggccacagaagaggagcagagtgtgcggcgagcccaccttgcaaaggcgctctggtccgtgaggggtggctccttaggcctccagctaagtcgccgagcgctcccagtgctgcctgcccggcacctgcgctccagactcctggctgccaaccaaggaggaagcctgccccctgggaacaggccactctcggcttgggcaagggaagcacagacacccccatccccagcctggcagccacacagagggaggccgtcacctgatgagtgcgagggcttcagggagggctggaggcccagcgagtctgagtgattgacaagtgaatgagctgggaatgaagcttcccggggccgggagggagagagggggttggagggcggtgaatgccgggaactctggggctccaggcttccagtggcccgaccaggctcccggtgtcctcctccaacctcagtttcctcacctgtcccagaggacgaatatggcaggactgttgtgatgattaggctggataatcctggtaagcatttattagccttcctggtctctggatattttttttttctttgtaaagaaattttgccgcccaatgtccaccactggggagggagtttgggaggcagaaggcaggcctctcacccttggcttaagagttccttccgagtgccccatccccttaggttcaattaaagcacatagttggaaacaagtccccaggacagctacagagtccagaaccagaagatcttgtttcctgaaccaagagccttgtcgtatccccaaatcctaattattcagggtggtcagcttcagacaggagtctaaatttgattctcgctctccagggtcgatccaaggctcttgtaatgcgatgttgctttaccccatcccacccctgtgcctaccccaatgcattgggagtccttaa

SEQ ID NO: 35877 - DNA, 883 bp, Artificial sequence
  DNA replication origin
tctgagatgtggggagcgcctctgccccgccgccccgtctgggatgtgaggagcgcctcggcccggccgtgaccccatctgggaggtgaggatcgtctctgcccggccgccccgtctgagaagtgaggagcccctccgcccggcaactgccccatctgagaagtgaggatcccctctgcctggctgccaccccatctgggaagtgaggagcgtctccgcccggcagccaccccgcctgggagggaggtgggggggtcagcccctgccaggccagctgcccccgggagggaggtggggggtcagccccccgcccggccagccgccccatccgggagggaggtggggaggtcagccccccgcccggccagccgccccgtccgggaggtgaggggcggcgcctctgcccggctgcccctactgggcagtgaggagcccctctgcccggccaccaccccgtctgggaggtgtacccaacagctcattgagaacgggccatgatgacaatggcggttttgtggaatagaaaagggggcaaggtggggaaaagattgagaaatcggatggttgctgtgtctgtgtagaaagtagtagacgtgggagacttttcattttgttctgtactaagaaaaattcttctgccttgagatcctgttgatctatgaccttacccccaaccctgtgctctctgaaacatgtgctgtgtccactcagggttaaatggattaagggcggtgcaagatgtgctttgttaaacagatgcttgaaggcagcatgcttcttgagagtcatcaccactccctaatctcaagtacccagggacacaaacactctgcctaggaaaaccagagacctttgttcacttgtttgtctgctgaccttccct

SEQ ID NO: 35878 - DNA, 1220 bp, Artificial sequence
  DNA replication origin
gtcatagatcaacaggatctcaaggcagaagaatttttcttagtacagaacaaaatgaaaagtctcccacgtctactactttctacacagacacagcaaccatccgatttctcaatcttttccccaccttgcccccttttctattccacaaaaccgccattgtcatcatggcccgttctcaatgagctgttgggtacacctcccagacggggtggtggccgggcagaggggctcctcactgcccagtaggggcagccgggcagaggcgccgcccctcacctcccggacggggcggctggccgggcggggggctgacctccccacctccctcccggatggggcggctggccgggcggggggctgaccccccacctccctcccgggggcagctggcctggcaggggctgacccccccacctccctcccaggcggggtggctgccgggcggagacgctcctcacttcccagatggggtggcagccaggcagaggggatcctcacttctcagatggggcagttgccgggcggaggggctcctcacttctcagacggggcggccgggcagagacgatcctcacctcccagatggggtcacggccgggccgaggcgctcctcacatcccagacggggcggcggggcagaggcgctccccacatctcagacgatgggcggccgggcagagacgctcctcactttccagatgggatggcggccgggcagagacgctcctcactttccagactgggcagccaggcagaggggctcctcacatcccagacgatgggcggccaggcagagacgctcctcacttcccagacggggtggcggccgggcagaggctgcaatctccgcactttggggggccaaggcaggcagctgggaggtggaggttgtagccagccgagatcacgccactgcactccagcctgggcaccattgagcactgagttaacgagactccatctgcaatcccggcacctcgggaggccgaggctggcggatcactcgcggttaggagctggagaccagcccggccaacacagcgaaaccccgtctccaccaaaaaaatacgaaaaccagtcaggcgtggcagcgcgcgcctgcaatcgcaggcactgggcaggctgaggcaggagaatcaggcagggaggttgcagtgagccgagatggcagcagcacagtccagctttggctcggcatgagagggagaccgtggaaa

SEQ ID NO: 35879 - DNA, 813 bp, Artificial sequence
  DNA replication origin
cacttcctagatgtgatggcggctgggaagaggcgctcctcacttcctagatgggatggcggccgggcggagacgctcctcactttccagactgggcagccaggcagaggggctcctcacatcccagacgatgggcggccaggcagagacactcctcacttcccagacggggtggcggccggacagaggctgcaatctcggcactttgggaggccaaggcaggcggctgctccttgccctcgggccccgtgggcccgtccgctcctccagccgctgcctcccgggcggcgctcgccggcgcggcggcaaagactgagacagctccgctgcccactgaactccatcctcccggcggtcgggcggcagctgctgcggtcggtcgcggcagcagctccgcttcatatctgcagctggggcccgcgggcgtcagcgccgcgactgtcccggctccgcactgccctgggccgcagcgcagccgcgccaaccaccacccgcggccaccatggccggacagtataatttcaatggtggaataggttcatgtgtgagattcaggacctcaccaatgggctcggtctatgtgtgagggtggcaattcaaactgttggctaggtgtgtataggagagttacaatctcacctgtggactgggccctgtaatggcactctgtattgcccaaaagctttataccgtatgtgtaagtgtcataatcttctgttaccttcttacaagtaaaagacccagacccctaagcatagctaccagagtcaacatctctcttactggcttcgtccaggtatgagagttatcacc

SEQ ID NO: 35880 - DNA, 1084 bp, Artificial sequence
  DNA replication origin
ggggggctgaccccccaacctccctcccggacggggcagctggccgggcagaggggctcctcacttcccagtaggggcggctgggcagaggcgcccctcacctcccagacggggcggctggccgggcggagggctgacccccccacctccctcccggacggggcggctggccaggcggggggctgacccccccacctccctcccagacggggcggctggccgggtgggggggctgacccccccatctccctcccggacggggtggctggccgggctgtggggctcctcacttcccagtaggggcggccgggcagaggcgcccctcacctcccggagggggcgtctggccgggggggggctgacccccccacctccctcccggacggcacggctggccaggcagggggctgacccccccacctccctcccggatggggcggctggccgggccgggggctgacccccccccccacctccctcccggacggggtggctgccgggcggagacgctcctcacttcccagatggggtggctgccgggcggagaggctcctcacttctcagacggggcagctgccaggcggaggggctcctcacttctcagacggggtggttgccaggcagagggtctcctcacttctcagacggggcggccgggcagagacgctcctcacctcccagacggggtctcggccgggcagaggcgctcctcacatcccagatggggcggcggggcagaggcgctccccacatctcagacgatgggcggccgggcagagacgctcctcacttcctagatgtgatggcggctgggaagaggcgctcctcacttcctagatgggatggcggccgggcggagacgctcctcactttccagactgggcagccaggcagaggggctcctcacatcccagacgatgggcggccaggcagagacactcctcacttcccagacggggtggcggccggacagaggctgcaatctcggcactttgggaggccaaggcaggcggctgctccttgccctcgggccccgtgggcccgtccgctcctccagccgctgcctcccgggcggcgctcgccg

SEQ ID NO: 35881 - DNA, 991 bp, Artificial sequence
  DNA replication origin
gggagggaggtgggggtgtcagccccccgcccggccagccgccccgtccgggagggaggtgggggggggtcagcccccccgcccggccagccgccccgtccgggaggtgaggggcgcctctgcccggccgcccctactgggaagtgaggagccccacagcccggccagccaccccgtccaggagggaggtgggggtgtcagcccccgcccggccagccgccccgtccgggagggaggtggggggggtcagcccccctgcccggccagccgccccgtccgggagggaggtgggggggtcagccccccgcccggccagccgccccgtccgggagggaggtggaggggtgtcagcccccgcccggccagccgccccgtccgggagggaggtgggggggtgtcagcccccgcccggccagccgccccgtccgggaggtgaggggcgcctctgcccggccgcccctactgggaagtgaggagcccctctgcccggccacgaccccgtctgggaggtgtgcccaacagctcattgagaacgggccaggatgacaatggcggctttgtggaatagaaaggcgggaaaggtggggaaaagattgagaaatcggatggttgctgtgtctgtgtagaaagaagtagacatgggagacttttcattttgttctgcactaagaaaaattcctctgccttgggatcctgttgatctgtgaccttacccccaaccctgtgctctctgaaacatgtgctgtgtccactcagggttaaatggattaagggcggtgcaagatgtgctttgttaaacagatgcttgaaggcagcatgctcgttaagagtcatcaccaatccctaatctcaagtaatcagggacacaaacactgtggaaggccgcagggtcctctgcctaggaaaaccagagacctttgttcacttgtttatctactgaccttccctccactattgtcccatgaccctgccaaatccccctctgtgagat

SEQ ID NO: 35882 - DNA, 951 bp, Artificial sequence
  DNA replication origin
ggataactttaatatacaattcctaatataccctatagatttcatttatttttgtaaaaattctgtgctttcagatcccgggtttttttctttttctttttctttttttttttaagtcctcaggatttgtcccctgcccctctgcccggccagccgccccgtccgggagggaggtgggggggtcagccccccgcccggccagccgcccagtccgggagggaggcggaggggggtcggccagccgccctgtccgggagggaggtgggggggccagccccccgcccggccggccgccccgtccgggaggtgaggggcgcctctgcccggccgcccctactgggaagtgaggacccctctgcctggccagccgccccgtcctggagggtgggggggggggtcagccccccgcccggccagccgccccatccaggaggtgaggggcgcttctgcccggccgcccctactgggaagtgaggagcccctctgcccggccacgaccccgtctgggaggtgtgcccagcggctcattggggatgggccatgatgacaatggcggttttgtggaatagaaaggcgggaagagtggggaaaaaattgagaaatcggatggttgccgggtctgtgtggatagaagtagacatgggagacttttcattttgttctgtactaagaaaaattcttctgccttgggatcctgttgatctgtgaccttatccccaaccctgtgctctctgaaacatgtgctgtgtccactcagggttaaatggattaagggcggtgcaagatgtgctttgttaaacagatgcttgaaggcagcatgctcgttaagagtcatcaccactccctaatcttaagtacccagggacacaaacactgtggaaggccgcagggtcctctgcctaggaaaaccagagacctttgttcacttgtttatctactgaccttccctcc

SEQ ID NO: 35883 - DNA, 1073 bp, Artificial sequence
  DNA replication origin
ggctgggaggtggaggttgtagccagccgagatcacgccactgcactctagcctgggcaccattgagcactgagtgaacaagactccgtctgcaatcccggcacctcaggaggccgaggctggcagatcactcgtggttaggagcaggaaaccagcccggccaacacacgaaaccccgtctccaccaaaaaatacgaaaaccagtcaggcgtggcggcacgcgcctgcaatcgcaggcactcggcaggctgaggcaggagaatcaggcagggaggttgcagtgagccgagatggcagcagtacagtccagcttcagcttggcatcagagggagaccgtggaaagagagggagagggagaccgtcgggagaaggagagggagagggagagggagagccaaaaaaatgttcctaacctattttaataatttatattagtcactgtaagagttaaagaaagaggaaagaaacatgaaaagcagctcaacagtcaaagacaggtctgagaggggcttctggctggttttgttcaggagcactttctcttacagactaagattatttaagcgttcaaggtgagacagcttatcacaggtttgaaatgtttctgtgtgggggagaagtttatggcggggttagaatgtctctggtcagaggggaggttattttggggctgacatctctccagccaggggggaggttatctcagggctggcttgtttctggttatagaggggtttggagagtatctggtcagagatgttatttgtggtttatggtcatgctgaccttagtcattagactgatgccctttggatttaggcagttattgattgaggtgaaaaatggcagtacttgtccaagatggtgaagctcctgctctattaatccagaccctgtagttataaaaaggatgaggggtggcatgttctttctggctacttcttgctgacaaggggaccaagagttttcaggtctcagatagactgcaggagtaatgccatctgtagatgttttggggtaattgtctgtgaaatggccatgatcctgtcagttacaaatctttgaaaaattt

SEQ ID NO: 35884 - DNA, 1268 bp, Artificial sequence
  DNA replication origin
cgagcatgctgccttcaagcatctgtttaacaaagcacatcttgcaccgcccttaatccatttaaccctgagtggacacagcacatgtttcagagagcacagggttgggggtaaggtcatagatcaacagcatcccaaggcagaagaatttttcttagtacagaacaaaatgaaaagtctcccatgtctacctctttctacacagacacggcaaccatccgatttctcaatcttttccccacctttcccgcctttctattccacaaaaccgccattgtcatcatggcccgttctcaatgagctgttgggtacacctcccagatggggtggtggccgggcagaggggctccccacttcccagtaggggcggccgggcagaggcgcccctcacctcccagatggggcggctggccgggcggggggctgacccccccacctccctcccggacggggtggctgccgggtggagacgctcctcacttcccagacggggtggctgccgggtggaggggctcctcacttctcagacggggcagctgctgggcggaggggctcctcacttctcagacagggcggttgccaggcagagggtctcctcacttctcacacagggcagccgggcagagatgctcctcacatcccagacggggcggcagggcagaggcgctccccacatctcagacgatgggcagccgggcagagacgctcctcacttcctagatgggatggcagccgggaagaggtgctcctcactttccagactgggcagccaggcagaggggctcctcacatcccagaccatgggcggccaggcagagacgctcctcacttcccagacggggtggcggccaggcagaggctgcaatctcggcactttgggaggccaaggcaggcggctgggaggtggaggttgtagccagccgagatcacgccactgcactctagcctgggcaccattgagcactgagtgaacaagactccgtctgcaatcccggcacctcaggaggccgaggctggcagatcactcgtggttaggagcaggaaaccagcccggccaacacacgaaaccccgtctccaccaaaaaatacgaaaaccagtcaggcgtggcggcacgcgcctgcaatcgcaggcactcggcaggctgaggcaggagaatcaggcagggaggttgcagtgagccgagatggcagcagtacagtccagcttcagcttggcatcagagggagaccgtggaaagagagggagagggagaccgtcgggagaagga

SEQ ID NO: 35885 - DNA, 890 bp, Artificial sequence
  DNA replication origin
cccatggtctgggatgtgaggagcccctctgcctggctgcccagtctggaaagtgaggagcacctcttcccggctgccatcccatctaggaagtgaggagcgtctctgcccggctgcccatcgtctgagatgtggggagcgcctctgccctgccgccccgtctgggatgtgaggagcatctctgcccggctgccctgtgtgagaagtgaggagaccctctgcctggcaaccgccctgtctgagaagtgaggagcccctccgcccagcagctgccccgtctgagaagtgaggagcccctccacccggcagccaccccgtctgggaagtgaggagcgtctccacccggcagccaccccgtccgggagggaggtgggggggtcagccccccgcccggccagccgccccatctgggaggtgaggggcgcctctgcccggccgcccctactgggaagtggggagcccctctgcccggccaccaccccatctgggaggtgtacccaacagctcattgagaacgggccatgatgacaatggcggttttgtggaatagaaaggcgggaaaggtggggaaaagattgagaaatcggatggttgccgtgtctgtgtagaaagaggtagacatgggagacttttcattttgttctgtactaagaaaaattcttctgccttgggatgctgttgatctatgaccttacccccaaccctgtgctctctgaaacatgtgctgtgtccactcagggttaaatggattaagggcggtgcaagatgtgctttgttaaacagatgcttgaaggcagcatgctcgttaagagtcatcaccactccctaatctcaagtacccagggacacaaacactgcggaaggccgcagggtcctctgcctaggaaaac

SEQ ID NO: 35886 - DNA, 1059 bp, Artificial sequence
  DNA replication origin
ctttctatacaggcacagtaacaatctgatctctttcttttccccacatttcccccttttctattagacaaaaccgccatcgtcatcatggccctttctcaatgagctgttgggtacacctcccagacggggtggcggccgggcagaggggctcctcacctcccagacggggcggctgggcagaggcgccccccatctccgggacagggtggcagccaggcgggggctgcccccacctccctcccggactgggcagctgctgggcggagacgctcctcacttcccagatggggcggctgccggatggaggggctcctcacttccccgacggggcggctgccgggtggaggggctcctcacttctcagacggggtggccgggcagagacgctcctcacctcccagacggggtggcggtcgggcagggacactcctcacctcccagatggggtggcggtcgggcagaggtgctcctcacatcccagacggggcggccgggcagagacgctcctcacttcctagacaggatggcagccgggaagaggcgctcctcacttcccagactgggcagccgggcagaggggctcctcacattccagacgatgggtggccaggcagagacggtcctcacttcccagacggggtggcgaccgggcagaggctgcaatctcagcactttgggaggccaaggcaggcggctgggaggtggaggttgtagcgagcggagatcacgccactgcactccagcctggtcaagattgagcactgagtgagcgagactccgtctgcaatcccggcacccggggaggcccaggcgggcagatcactcgcggtcaggagctggagaccagcccggccaacatggtgaaaccccatctccaccaaaaaatacaaaaaccagtcaggcgtggcggtgcgcgcctgcaatcccaggcactggcaggctgaggcaggagaatgaggcagggaggttgcagtgagccgagatggcggcagtacagtccagcctccactcggcatcagagggagaccatggaaagtgggagacgggagaggggga

SEQ ID NO: 35887 - DNA, 2356 bp, Artificial sequence
  DNA replication origin
ttgcaaaaacttgagaaattaaaataagggagactatgaatgcaaaaacattagagagcttgcgcccagaagtttcagaccagactaggcaacgtgttgagaccccgtcactaaaaaagaatttagtcaggtgtgatgggccacgcctgtagtcccagctactcgggagggtgaggtgagaggatctcttgaggctacagtgagtcataatcttgtgccactgcactgcagcctaggtgacagagcaagattatttctcatagaatatatctataaatatatatgtgtatatatatatgtatacatacgtatatacatacatatgtatatacgtatatatatatatatacttggccgcctgagttaggccggattagtactatcctccaaaagctaatataaatgcacatcagttctttctagcgcagcgctgaagagggtgccactacttgtgctgggtgctgtttggcatggccagtggcacagtaagagaaggagtaggagtggaggagtgaagaaagaggaggaggagaagagaagaaaaggaggaggaaagagaagaactagaagagaaaatgagaagaagatagtaagaagagaggaagtggagaaaaaaaggagagggggacaacaggaccaggagaggagaggagaaaagggaagctaggaggaagtagggagaaaaaaggaggagaagaagaaaagaatgaggaaaagagaagaggacgagaggaggaggagaggatgagaaaaagaggaaaggaggaaaggaagagaaggaggaggaggagaaggaggagtagaggagatggacaaggaggaggaggggacaaggaagaggagaagacgaagagaaaggagaggaggagaatcgggagcagaagaaggaggaggagatgaagaggtgaaggagaggaggaggaaaggagaagagaaggaggaggagaaaagaaaggagtggagaaagaggagaggaggagaaaaaataggaaacgaagaggagaagaataggaggaggaaaaggatgggagaaaagaaaaaggaaaagtaggaggagtagaaaaagaggagaaggaggaagaagaaagagaaggaggagacgaaaagaatgagaaaaagaggagaggagaatgaggagaaggcgtagaagaaaagaaggaggagaggataaagaaggagaagtagaggaggaggagagaagaggaaaggaggaggagaggagaagagaaggaggaggagaaaggagaagagaaaaggaggaggaaaagaaggaaaaggaggatgggaggaagagaagaggaaaaggaaaaaggaagaggagagaaaaaggaaaaggaggagaagagtagaggagaagaaaggaaaaggaggatgataggaagaagacggaggagaagaggacagagaagtagaggagaaaaaaggaaaagaatggggagaaggaggaaagtaggaacaaagaaaaggagggggaagagagtaggaggaagaggaagggaagaggaggaaaggagggggagaggaggaggaggacgaggagaagatggagaaaaggaagatgaggaagagaaggaggggaggaggagagaagaaagaagaaaaggaacaggaggagaggagaaaggagaggagaagaaggagagaaaggaaaagtaagaggaagaggagaatgtggataggagaaggaggaagagaaaaaggtggagaggaggagaggcgaaggaaaaggaggaagaactgaaaaggaggagaggaaaaggagacaaggggaggggaggaggaagaaaagaaaaaaacgggaggatgaggaaaggaggaggaaacaaaaaggagaaaggacgaggagaaaaagaggaaaaggaggaggagagatggaagaggagaggtggtggaggggagtaaaaaggagaggaggaggaagggaagaaagatgagaggaagaaaaggagaggaggaggaagaaaggggagaagtggaggaggaggtgggggagaagtggaggaggaggtgggggagaagtggaggaggaggtgggggagaagtggaggaggaggtgggggagaaatggaggaggaggtgaggaagaagaggggagaaagaaaaaggagcaggagaacatgaatggggaggaagaagagatgaggagaggaggagaaaagtgaggaggagaagacgaaaaggaatggaggagatggaaaggaggaaaaaggaggaggaggagaaaaaagttatcactttgtgacagtaattatgactcttttcatggcttttggattaaagttcaaactcaacaggagagacacacagataaaaaatccagattatttcagagctcaatttcagagctaaaggaaaa

SEQ ID NO: 35888 - DNA, 808 bp, Artificial sequence
  DNA replication origin
ggtgatgaattgtattggcatgcacctgagctggggtctagatacggtcctcgtcttctggggagagggtggcagagaggataatgtagaggtcatgccaagttagttcataacactgggtgaggtactgaaactctaatataagaggtagggtcttctggaaatgaactgagtctttttgttaatttgagagatatcagtgagggagaagggaatgtgaactctaacaacatgttcagtttctgccacttcctgaagggggcactgtagcacagccgctgaagtaagagtggggcatgggctaaaggtggcgcctgagcaagtgtggatgggagagaaggaggaacctggaagtggttcctgctgagggtttgaacaggggaggggggttgagttaacaggcagtggaggatagataggagtgtaaagtggcgggatgggtttacaagcctcaggagagggcggtgggggaggtcagtgggtacaggcaatactagaattgtcctgaggaggggacgatataggaaaagaagtggatactgctgactgggaagatggtggctgggaatattgctgctgagaagatggtgactgagaagattgtggctgagaagataaagaaaaggcttgggggtgaaagaagatggttgagagggagaggtaggggctgggagggtggacagcagtctgctggatccaaagaggaaaaagaggtagggtcgggaagaggaaggcaatctgggtggtgagaacagaggaggaggatttgaacacatgagcaagaattgcagaggttgggttgtgatct

SEQ ID NO: 35889 - DNA, 1293 bp, Artificial sequence
  DNA replication origin
atctcggcattttgggaggccaaggcaggcggctgggaggtggaggttgtagccagccgagatcacgccactgcactccagcctgggcaacattgagcactgagtgaacgagactccgtctacaatcccggcacctcgggaggccgaggctggcggatcactcctgattaggagctggagaccagcccggccaacacagtgaaactccgtctccaccaaaaaaatacgaaaaccagtcaggtgtggcagcgcgcacctgcaatcgcaggcagtcggcaggctgaggcaggagaatcaggcagggaggttgcagtgagcagagatggcggcagtacagtccagcttcggctcggcatcagagggagaccgtggaaagagagggagagggagaccgtggggagagggatgggggggagggggagggggagggggagagggagagggagaataacatttttaaaatgtctcagtggggaatagacttccatgtcagaaaccatgatgttggcctatttctgctgcctttgagcaaagtataaatagtgtgagaactggcatgtgctgggttgtggtttcagtgtgggagagcagttcctcaagatggaaaaacaaatctcactgagccgtaagagccatgctcatcttttaccacattcccaaccagggtctttcacttttcttctgtgcttgaatttctttcaacatacatattattttgattatatacatagggtacatatatatgtgtgtatatatatatgtatgtgtctctgtgtgtgtgtgtgtgtgtgtatacactctgtcacccaggctggagtgtagtagctgaatgatgggtcactggtcactgcagcctcaacctccagtgatggttccacctcagcctttcaagtagctgggactacaggcatgcaacaccacatgaggccaatttttaacgtttttgttgagactgaatctcactacattgcccagactggtcttgaactcctaggtttaagcaatcattccaccatggtcttccaaagtgtttggattacaggtgttagccatcaaactctgccaaaaatattttttaaggaactgttacaaccaagttattagctatggttgtgccactgtactccagcctaggtaccagagtgagaccttgtctccaaaaacaaaacaaaacaaaaaaacttacgaccaaattaaaattctaaggttgtgtcatatgtgtcccctccctgccctgtaagctatcactgttaaatataatggtattggccgggcacggtggcaaatggctgt

SEQ ID NO: 35890 - DNA, 1102 bp, Artificial sequence
  DNA replication origin
catcatggcccgttctcaatgagctgttgggtacacctccccagatggggtggcggccgggcagaggggctcctcacttcccagaaggggtggccgggcagaggcgccccccacctcctggacggggcggcggccgggcagaggagccccccacctccctcccggacggggcggctggccgggcaggggctggcccccacctccctccgggtcggggcggctggccgggcgggggctggcccccacctccctccgggacggggcggctggccgggcgggggctgccccccacctcctggacggggcagctgccgggcggagacgatcctcacttcccagatggggcggctgccgggcggaggggctcctcacttctcagacggggtggctgccaggcagaggggctcctcacttctcagacggggcggccgggcagaaacgctcctcacctcccagacggggtcgcggccgggcagaggcgctcctcacatcccagacggggcggcggggcagaggcgctccccacatctcagacgatcggcgcccgggaagagacgctcctcacttcctagatgggatggtgccgggaagaggtgctcctcacttcccagactgggtagccgggcagaggggctcctcacatcccagaccatgggcagccaggcagagacgctcctcacttcccagacggggtggcggccgggcagaggctgcaatctcggcattttgggaggccaaggcaggcggctgggaggtggaggttgtagccagccgagatcacgccactgcactccagcctgggcaacattgagcactgagtgaacgagactccgtctacaatcccggcacctcgggaggccgaggctggcggatcactcctgattaggagctggagaccagcccggccaacacagtgaaactccgtctccaccaaaaaaatacgaaaaccagtcaggtgtggcagcgcgcacctgcaatcgcaggcagtcggcaggctgaggcaggagaatcaggcagggaggttgcagtgagcagagatggcggcagtacagtccagcttcggctcggcatcagagggagaccgtggaaagagagggagagg

SEQ ID NO: 35891 - DNA, 926 bp, Artificial sequence
  DNA replication origin
tggggagcgcctctgccccgccgccccgtctgggatgtgaggagcgcctctgcccggccgcgaccccgtctgggaggtgaggagcgtttctgcccggccgccccgtctgagaagtgaggagcccctctgcctggcagccaccccgtctgagaagtgaggagcccctccgcccggcagccgccccatctgggaagtgaggatcgtctccgcccggcagctgccccgtccaggaggtggggggcagcccccgcccggccagccgccccgtcccggagggaggtgggggccagcccccgcccggccagccgccccgacccggagggaggtgggggccagcccctgcccggccagccgccccgtccgggagggaggtggggggctcctctgcccggccgccgccccgtccaggaggtggggggcgcctctgcccggccaccccttctgggaagtgaggagcccctctgcccggccgccaccccatctggggaggtgtacccaacagctcattgagaacgggccatgatgacgacggcagttgtgttgaatagaaaagggagaaaagggggaaatgtggggaaaagatagagaaatcagattgttgctgtgtctgtgtagaaagaagtacacataggagactccattttgttctgtactaagaaaaattcttctgccttgggatgctgttgaccttacccccaacctggtgctctctgaaacatgtgctgtgtccactcagggttaaatggattaagggcggtgcaagatgcgctttgttaaacagatgcttgaaggcagcatgctcgttaagagtcatcaccattccctaatctcaagtacccagggacacaaacactgtggaaggccccagggtcctctgcctaggaaatccagagacctttgctcacttgtttatctgctgaccttcc

SEQ ID NO: 35892 - DNA, 4083 bp, Artificial sequence
  DNA replication origin
aggaaagagaagaactagaagagaaaaggagaagaagataggaagaagagaggaagtggagaaaaaaaaagagaggaggacaacaggaccaggagaggagaggaaaaaagggaagctaggaggaagtagattaaaaagagagagaaggagaaggaggagaagaataagagaatgaggaaaaagaaggaggagaaggagaggaggagaaaaaaggaggaaaggaggaaaagaaggagagaaggaggaggacaggaggagaagaagaggaggaggagaagaggagtagaggagatggagaaggagggggggacaagaagaaggaggagaagacgaagagaaaaaggaggagagaaggagaatggggagcagaaggaggaggagatgaagaggtgaaggagaggaggaggaaaggagaaatagagaagaaggaggagaaaagaaagaggaggggagaaaaagaaaggagaggaggagaaaaataggaggagtaggagatgaagaggagaagaagagaagaaaaaaggaggaagaaagggatggaagaaaagaaaaaggaaatttaggaggagaggagaaggaatagaaaaggaggaggaagaggaggaggagaaggaggaagagaagatgaaagagaaggaggagatgaaaagaatgaggagaaaaaaggagaggaggaggagaagagaaggaggagtagaaaaaaaggagaatgaggaggattagaggagaaagaaaaggagaattagaagaggaggagaagaggagaaaaagagaaggaggaaaagaggaggaggaaatgaggatgagaggagaagagaaggaggagaaagagaaggggagaaaaagagaaggagaaggaggataagagaagaaggaaaaagaggatgggaggaagaggagagaaaaaaggaaaaggaggatgaggagaggaagaggagagaaaaaggaaaaggaggagatgaagagaaaaaggagtagaggaggaggagaaggaggagaggaaaaggagtatgaggagaggaggaagagagaaggaggacgaggagaagagagagagaagtagaggagctaaaaaggaggaaaagattgaggagaaggaggaaagtaggagaaaaagaaaagaagaggagaaaggggggaagagagtaggaggaagaggaggaggggaaggaggaaaggaggaggagaggaggatgaggagaagaaggagaagaggaaaatgaggaggaagaggagaaggagggaagaaggaggagagaagccaaaagagagaagaaaaaaggaggaggagaaagaggagagggaaaaagggaggaggagaggaagaggaggaacaggaggagaggagaaatataggaggagaaggaggaggacagcagaagaagaaagaggaaagaaaggaaaagtaagagaggaagagaagatggagaggagaagaagggagagaaaaaggtggagaagaggaggggaggagaagaggaggaggaggagaggagacggaaaaggaggagaaaaggaggaagaaaggagaaggaggagaggaaaaggagaggagggagaagggaggaggaagaggagaaggagaggaggagaaagaaaagagaaaaaggaggggaggacgaggaaaggaggaggagacagaaaaaggagagaggaagaagaggagaaaaagaagaggaaaaggaagagaggagatggaaaatagaggaggaggagaaaaggtggtggagtggagtaaaaaggagaaggagaggaggaggaggaagggaaaagaaaaaggggggaagaacgagaaggagcaagaggagaggaggaggagaagaagaagaaaaggaggtggaggggaaaatgaagaggagcaggagaggagaaaaacgaagtggaagaggagaggagaaggaggaagaggaaaagaggagaagaaggagaagagaaggacaagaggagaagtggaggaggaggatgggagaggagaaatggaaaaggaggaggagagaaaaaggagggaaaaagaaggaaaaggaggggaggaggagaggagaaggtgcaggaggaaaaagagaaggagtaaaagaagaagtggaggagaagaggagaagaaggagtagaaggaggagagcagaaaaagtaggtgaggaggagaaaaaggagaggagggggaatgcagaagaagtacaaaaaagagaaggaagaaaaagaagagaggagaaggaggagttaagaaggaggaggagaggagaagtacgaaaaaagagagaaggaagaaaaagaggaagagaggagaaggaggagtgaagaaggaggaggagaggagaagagaaggaggagaggcagaggaggaggagagtagaagaaggagtagaaggaagaggaaaagaagaggagaaggaggaggagtggggaaggaagaggaaatggaggaaaaggagggggagaggagatggaggaggagaagagagagaagaagagaggagtagaaagaaagaggaatgaaaaaggagaagagaaggagagaaagaggagaggaggaggaggaagaggagagaaaaaggagaaggagagaacaagaaggaggaggaggaaaggaggaagagaggaacacgagtaggagtgaaggaggaggagaaggaggataggaggaggagaagaggaagagaggggaaggaggggaagaaagagaaggaggaggaaaggagaaggaagaggagatgagaaaaaggaggaagagagaaggaggaggaagagaggagaaagcagaggaggaagagagaaggcagaggatgagaggagagggataggagaaaaaagaaggagaaagatgagagaaggcagaggatgagaggagagggataggagaaaaaagaaggagaaagatgagagaagaagaggaggagaggagaaggaggaaagggagaaagaaaaggaacggaggagaggaaaagaagaagaggaaggagtaaaagatgagtaggagaaggagaagaggcgaaggaggagaggagaaggaaaggaggaaaaaaggagaaagaggagagaagaagaggaggagaggagaaggagcaggagaaagaaaaggaaaggagaggaggagaggagaagaagtagaagagaaagaggagtaaaagatgagaaggaggaagacaagaggtgaaggagggggagcgtagaataaagaggagaggagaaggaggaggagaggaggaggagattaaaagaacagaaggaaaggagaaagaggaggagaggggaaggagaagagaaggaggagcagtggaagaggaggaggaggagaaggagaggaggaaaaggagaggaggaggaggaagagaggagaaggagagtagaaggagtagaaggaggaggaaaagagaaaaagaagaaggaggaggaaaagagggaaagaagaaagaggagaagaaggaagaggaggagaggaaaaggagaagagaataaaaggaggaggaagaggagagaagaaaagaagagaaggaggaggagaagagaaggaagaggagaagagaaggaggaggagaaaagaatgaggagaggagaagtaaaaagaggggaaagaggagagaagaaggaagaggacaggagaaggaggaggagaaaaataaggagaggagaggaggaggagatgaggagaggatggggagtaaaagatgagtactaggaggaggagtggagaaggaggaggagagttttggggaaggaggaggagaggaggaataggacaggagaaggagaagtaggaggaggagaggagaaggagaaggagaaaaggagaagaggagtagcaggaggagaggagaaggaggaggagaaaagtagaaagaggagcaggaggagagaagaaaaagaaggagaggaggaggaaatggagaggaagagcagtggaggagaggagaaataggagaaaagtagtggaggaggaggagaatgagaggatgaggaggagaaaaataagaggaaaggagaagaagaggagaaggcagaggaggaggagaggggaaggaagagaaaatggagaggaagagatgaggagaggaggaggagaggagaagagagaaggaggagaaggag

SEQ ID NO: 35893 - DNA, 901 bp, Artificial sequence
  DNA replication origin
gtctgggaagtgaggagcgcctcctcccagccgccatcccgtctaggaagtgaggagcatctctgcccggccgcccatcatgagatgtggggagtgcttctgccccgccgccccgtctgggaggtgaggagcatctctgcccggccgccccgtctgagaagtgaggagctccttcgcccggcagccgccccatctgagaagtgaggagcccctctgcccggcagccgccccttctgagaagtgaggagcctctccgcctggcagccaccccatctgggaagtaggaagcgtctccgcccggcagccgccccgtccgggagggaggtgggggggcagcccccgcccggccagctgccccatccgggagggaggtggggggcagcccccgcccggccagccgccccatcgggagggaggtggggggcgcctccgcccggccgccccttctgggaagtgaggagcccctctgcccagccgccaccctatctgggaggtgtacccaacagctcattgagaacgggccatgatgacgatggcggttttgtggaatagaaaagggggaaatgtggggaaaagatagagaaatcagattgttgctttgtctctgtagaaagaagtggacatgggagactccattttgttctgtgctaggagagattcttctgccttgggatgctgttgatctatgaccttgcccccaaccctgtgctctctgaaacatgtgttgtgtccactcagggttaaatggattaagggcggtgcaggatgtgctttgttaaacagatgcttgaaggcagcatgctcgttaagagtcatcaccactccctaatctcaagtacccagggacacaaacactgcggaaggcagcagggtcctctgcctaggaaaaccagagaccttt

SEQ ID NO: 35894 - DNA, 2216 bp, Artificial sequence
  DNA replication origin
gtggacacaacacatgtttcagagagcacagggttgggggcaaggtcatagatcaacagcatcccaaggcagaagaatctctcctagcacagaacaaaatggagtctcccatgtccacttctttctacagagacaaagcaacaatctgatttctctatcttttccccacatttcccccttttctattccacaaaaccgccatcgtcatcatggcccgttctcaatgagctgttgggtacacctcccagatagggtggcggctgggcagaggggctcctcacttcccagaaggggcggccgggcggaggcgccccccacctccctcccgatggggcggctggccgggcgggggctgccccccacctccctcccggatggggcagctggccgggcgggggctgcccccccacctccctcccggacggggcggctgccgggcggagacgcttcctacttcccagatggggtggctgccaggcggagaggctcctcacttctcagaaggggcggctgccgggcagaggggctcctcacttctcagatggggcggctgccgggcgaaggagctcctcacttctcagacggggcggccgggcagagatgctcctcacctcccagacggggcggcggggcagaagcactccccacatctcatgatgggcggccgggcagagatgctcctcacttcctagacgggatggcggctgggaggaggcgctcctcacttcccagactgggcagccgggcagaggggctcctcacatcccagatgatgggtggccaggcagagacactcctcacttcccagacggggtggcagccgggcagaggctgcaatctcggcactttgggaggccaaggcaggcggctgggaggtggaggttgtagctagccgagatcactccactgcactccagcctgggcaacactgagcactgagtgaacgggactccatctgcaatcccagcacctcaggaggccgaggctggcagatcactctcggttaggagctggagaccagcccggccaacacagcgaaaccccgtcttcacgaaaaaaatacaaaaaccagtcaggcatggctgcgcgcacctgcaatcgcaggcactcggcaggctgaggcaggagaatcaggcagggaggttgcagtgagcagagatggcagcagtacagtccagcttcggctcggcatcagagggagaccttggaaagagagggagagggagaccgtggggagagggagagggagaccatggggagaggaagagggagagggagccacctgagtactcttaatcaatccccatggtgagtaagaaagggagctcagaagcatcagggtaacaatggacaagtgtgggctctggttcgttccaccttggaacattttcacaataatgatgaggaggaaggaaagtataacaaagtaacagaagaggtaacagagcaggtttgtttgccagctaaagctaaagcctcaaaggaggaagaggttcatccctagccttctgcaccccattattttgaagaaaaagagtggcctgaccctccagatctttcttttcccgaggacactgggcaaaaagtagttgccccagtgactgagcagcaccttgagtgaccgctctcagttctattcaggcaggaatccagcaagctagagagggtgatatggatgcttggcagttctctgttagaatatacccacctgatcaatagggaaatattatggctatgtgtgagccttttccttttaaaatacttaaagaatttaaacaaggtattaatcaatatggaccaggttctacttttgtaatgggactgttaaagagtgttgctgtctccagtcagatgttgccagcagggatggtaggattatttctaggtaggtctagtttaaatttaaaaggagtacaagtacatacaggaatcattgattcagattacaatggggaaattcaaaatgttatatctacttctgttccctggaaagcagagccaggagagtgtatagcacagcttctgattgtgtcatatgtggaaatgggggaaaatgaaactaaacagacaggaggatttggcagaaaaaataaacaagagaaagccacctactgggtaaatcaaattactgataagcatcctacctgtgaaataactattcagggaaagaaatttagaggtttggtagatacaggagtggacatttcaatcatttc

SEQ ID NO: 35895 - DNA, 1127 bp, Artificial sequence
  DNA replication origin
cagacacagcaaccatccgatttctcaatcttttccccacgtttcccccttttctattccacaaaaccgccattgtcatcatggcccgttctcaatgagctgttgggtacacctcccagacggggtggtggccgggcagagggggctcctcacttcccagtaggggcggccgggcagaggtgccccccacctcccggacggggcggctggccgggcgggggagctgacccccccacctccctcccagatggggcggctggccgggcggggaggctgaccccccacctccctcccggacggggcggctggctgggtgggggctgacccccacctccctcccggacggggtggctgccgggcggagacgatcctcacttcccagacagggtggctgccgggcggaggggctcctcacttctcagacggggcagctgccgggcggagggtctcctcacttctcagacgggggggccgggcagagacgctcctcatctcccagatggggtcgcggccgggcagaggcgctcctcacatcccagacggggcggcggggcagaggtgctccccacatctcagacgatgggcggccaggcagagacgctcctcacttcctagatgggatggcagccgggcagagatgctcctcactttccagactgggcagccaggcagaggggctcctcacatcccagacgatgggtggctgggcagagaggatcctcacttcccagatggggtggcggccaggcagaggctgcaatctcggcactttgggaagccaaggcaggaggctgggaggtggaggttgtagtgagccgagatcatgccactgcactccagcctgggcaccattgagcactgagttaacgagactctgtctgcaatcccggcacctcgggaggccgaggctggcggatcacttgcagttaggagctggagaccagcccagccaacacagtgaaaccccgtttccaccaaaaaaatatgaaaaccagtcaggcgtggcggcgcgtgcctgcaatcgcaggcactcggcaggctgaggcaggagaatcaggcagggaggttgcagtgagctgagatggcggcagtacagtccagcttcggctcggcatcagagggagacc

SEQ ID NO: 35896 - DNA, 774 bp, Artificial sequence
  DNA replication origin
atcgtctgagatgtggggagcacctctgccccgccgccccgtctgggatgtgaggagcgcctctgcccggccgcgaccccatctgggagatgaggagcgtctctgcccggcccccccgtctgagaagtgaggagaccctccgcccggcagctgccccgtctgagaagtgaggagcccctccgcccggcagccaccctgtctgggaagtgaggatcgtctccgcccggcagccaccccgtccgggagggaggtgggggtcagcccccacccagccagccgccccgtccgggagggaggtggggggtcagcctccccgcccggccagccgccccatctgggagggaggtgggggggtcagctcccccgcccggccagccgccccgtccgggaggtggggggcacctctgcccggccgcccctactgggaagtgaggagccccctctgcccggccaccaccccgtctgggaggtgtacccaacagctcattgagaacgggccatgatgacaatggcggttttgtggaatagaaaagggggaaacgtggggaaaagattgagaaatcggatggttgctgtgtctgtgtagaaagaagtagacatgggagacttttcattttgttctgtactaagaaaaattcttctgccttgggatcctgttgatctatgaccttacccccaatcctgtgctctctgaaacatgtgctgtgtccactcagggttaaatggaaaaaaaaaaaaaaaaaagaaaccaggagttggcaattactttttttt

SEQ ID NO: 35897 - DNA, 4802 bp, Artificial sequence
  DNA replication origin
cctgccagagagagactggaaagaccatagaaggaaagtttctcctttcacagggggaaggatacagggagacagcgcagaagttggagagcagcatcgaaatgtttctggcctatgtggcttgcaccatccgattcccggcagtgttataacagataaattcatcccagtattccgggaggccaaggagggcagaacacatgtgcgcggaagtttcagaccagcctgggcagcatggtgagatccaatcactacaaaaatagttaatcaggtgtggtgggccacgcctgtattcccagctactcgggaggctgaggtgagagaatctcttgaggctacagttagtcataagcttgtgccactgcactccaggctgggtgacagagtaagaccctttctcatagaataaataaataaataaataaataaataaataaataaacatataaataaactcggccgcctgggttgggccggattcttagcttccaaaagctaatattgacgcacttcaggtcttgctagcacagcgctgcagagactgccacaaagtgtgctgggtgctgcttgttgttgccagtggctaggtaagaggcggagtaagaatgtaggagtggagaaaaaggaggagaaaaagagaagagtagaagagaaggagaggtgggaaaggaggagagataaagggaggaggaagtgagagaagaagagaagaaaaaatgcgaagaagatagaagagagaaagtggtgaaaaaaccggaagggaacaatgggactagaagagaagaggagaaaaaacctggaagaaggagtagagcaggagaaaaagagaaggaggaggaggagaggaaaaggagaaaggtgaggagaagaaggaggacgaggagaagaggagaagaaaataggaggaggagaggcgagaaagagcaggagaggaggaggagaggagaaggaggaggaagcaaagtagagtataagaggagaaaagggggaggagaagagatgaatgaggagagaaggaggaggaggagtaaggaaaagtagaagaaaaaaggagaagaggaggagaggaaaaggagtaagagaaagcaaagagaaaaagaaggaagagaggaggaaaaggaggaaaagaaaatgaggaagagtagaggcagaaaaggaaaagcaaaaggaggaggagaggagaaaaaggaggatagaaggaaaaggaggaaaaagaaaaaaggaggagaagaggggacagaggagaaggaggaggaggaagagaagagaaaaaagaggagaggaggagaaggaagaggagaggaggagaaggaagaagagaggaggaatggagaaaggaggaggagagaagaagaaggtgaaggggatgagagaagaagaaaaaggaggaagaggaggaaaaatgaaggaggagaaggtagaggataaaaaggaggagtaggagtggagaagaaggaagacaaaaaaaggaggtggaaaagaaggattagaagaggagaaggaggagaaggaaaaagaggaggaaaggaggaagaggtggagagaaagagaaagcagggaggaggatgcggtggactaggacgtggaggagaggagaaggaggagaggaggaggagagataaagaaggaatagtaggaggagagaaaaaggaggaaaagaggagagataaagaaggaatagtaggaggagagaaaaaggaggagagaaggagaggagatggaggaggaggagaggagtaaaaagagaaggagaggaaaagaaggagaagagaagaaggagcataggaggaggaggaggagaggaggtggaggaggacaaaaaagcaaaaggtgaggagaaggagggggagagaaaaaggaggagaggaaggagaaagagaaggaggccaggagaaaaaggagagggaggtggggaaaaggaggagaaaaggagaaggagaaggatagaaggaggagaagaagaaaaggaaaggagaaggaagagagaaaggagaaaaagaaaaaagaaaaaattagaagaagaaggaggaaagaacaagaaggaggagaggaaaaggaggagaaagtggataagagaaggggagtggaaagaaaaaaggaggagaggaggtgggggaggagaaaaaacgaggaggaagaagaaggaggggaaggaaaataggtggagaaggaggaggaagagaagaaggagagcaggagaagaggaagagaagggggaggagaggagaagaaggaggaggactagagaagacgtaggagagaaggacttggagaagaggaggaaaggaaaaagagaagaaggagaggaggaagagaagaagggaaaggaggagggcgaggagaaggaaaggagtaggtaacaaagagaaggagagaagaagaaaagtaggagaaaagaaaatggagaaaggagaataaggaggacaggagggaaagagaagaaggaggagggaaagaagaagcggaggatagaaggagtacttagagaggaggaaaaggtggaggaggatagcagaaggaagagaaaaaggagaaagaaaggaggagggggtggagagaagaaagaatagaggagaaggaggaggagaagaggaggcagaggagggggaagaaggagaagaggaggaggagcagaggaggaggaaaagaggagaaggaggagtagacaagcaggagaagagaaagaagaagaagcagaggagagaaggagaggaggaggagaggtggaggaggaaaaaagaagtagaggaggaggagaggaggaggaaaggaggagagaagggggagaggaggagaaggaaaagggaaggagacaggagaagaaggacagggggagaggaggagaaaaaggagaggaggaggacaggaggagaaggaggacaggaaaggaggaggaagaggagtggaggagaggataaaaagaaggtggaggaaaagaggaggaggaaaaggaggtgaggagaaggaaaaggagagaaggaagaggaggagtagagaaggaggacaaggaggagcagaaaagagaaaggaagaggagaaggagagaaggaagagaattagagaagaaggagaaggagaggagaaagaggatgaaaggagaaggaaaaggaggaagaggagaaaacaaggagaagggggagaagaaaatacataggagaagaaagaggaaaagaaggagaggagaagtaagaggagaggaggaggatgagaggaggaatggagcaggaggagtagaggaggagaagaggagaaaaaggagaaaagcagagaataaggaggaggagcagaagcagaggagagagaaaagtaagagatggagaagatgaggagcaggaagaggaggtggaggaggaataaaaggaggagtaggagaaaaggagaaagagttggaaaaggagaggagaagaaggaagagaaaaaagagaaggaggagaggagaaggaaaggagaagaagaaaaaggaggaagagaggaggaaaggaggagtagggggagaggaggagaaagaggggaggaggaggtggatgagagaagaaagaagaaaggaaggagaggaggagaggaaaagtaaaggaggagaaggagtaggaggatagaaggaggagaaaaagaggagaggagaatgaggagaaagaggaggagataagaagagaaggagtgagggaggagtaggagaagagaagtaaaaggagagaagaaggaagagaggagaagaaaaaagagaaaaggaggaagagagaaggaggagtaggagaggaaaaaagaataggaggaggaagaagaggaggggaggagaagggggaggagggaaggggaagagaagaagagaagaaaaaggagatggaggagaggagaaaaaagaaaaaggcagcgagaagaaggagaagaggagaagaaggggaggaggatgaaggaagaaagaaagggaggaagaggagagaagaaaaagtaggatgaagagaaggaggaggtgaagaggagaaggaagaaaaaagaaagaggaagagagaagaaaagggggagaggtgaggaggaggagaaaaggagaaggagaggaggagaaaaaggaaaggaggaagagaagagaaggttaggaggagagaaagaaaaggtgaaggagaggaggagaaaaaggataagagaaggaggaagaggaggggaggagaaggaggaggaagagggggaacaggaggagagagaaagaaggaggtggaggagaggagaaaaagggaaaggaggtggagaggaggagcggaggaagaggaggaagaaaggagaaggagaaaaggaggaagaggaggaagaaaggagaaggagaaaaggaggaaaaggaggaagaggagagcagaaggaggaagagaggaggaggagtggaggggtaggaggagaagaggaggaggaagagagaagtaggaggaggaagaggaggagagaaggaggataagagaagatggatgagaaaaggaggagaggaagagaaaaagaggaggaagaggataggaggaggcggagaggagaaggatgagtaagagaggaagagaagagaaataggaggaagaggacaggcggagtaggaaaaggagggaaggaaaaggagtaatagaacaggaggaagaggaggagaagagaaggaggagaagagaaagaggagaagagaaggaggaggagaagagaaggaggaggagcagaggagaatatggaggaggaaagaaggagaagtagaaggaggaaaagaggagaaaaaaggaaggaaaaggaggaagaggagaggagaggagaaggaggaggagagtaggaggagg

SEQ ID NO: 35898 - DNA, 618 bp, Artificial sequence
  DNA replication origin
cctctgcccggcagccaccccgtctgagaagtgaggagcccctccgcccagcagccaccccatctgggaagtgaggagggtctccgcccgctagccacctcgtccggaagggaggtgggggggtcagccccccgcccggccagccgccccggctgggagggaggtgggggtcagccccctgcccggccagccgccccgtccgggagggaggtggaggggtcagccacccacccggccagccaccctgtctgggagggaggtgggggggtcagcccccccgcccggccagccgccccggccgggagggaggtggggggggtcagccccccgcccggccagccgccccgttcgggaggtgaggggcgcctctgcccagccgcccctactgggaagtgaggagcccctctgcccggccaccaccccgtctgggaggtgtacccaacagctcattgagaacgggccatgatgacaatggcggttttgtggaatagaaaggggggacaggtggggaaaagattgagaaatcggatggttgccgtgtctgtgtagaaagaggtagacatgggagacttttcattttgttctgtactaagaaaaattcttctgccttgggatcct

SEQ ID NO: 35899 - DNA, 1057 bp, Artificial sequence
  DNA replication origin
cagacacggcaaccatccgatttctcaatcttttccccacctgtcccccctttctattccacaaaaccgccattgtcatcatggcccgttctcaatgagctgttgggtacacctcccagacggggtggtggccgggcagaggggctcctcacttcccagtaggggcggctgggcagaggcgcccctcacctcccgaacggggcggctggccgggcggggggctgaccccccccacctccctcccggccggggcggctggccgggcgggggggctgacccccccacctccctcccagacagggtggctggccgggtgggtggctgacccctccacctccctcccggacggggcggctggccgggcagggggctgacccccacctccctcccagccggggcggctggccgggcggggggctgacccccccacctcccttccggacgaggtggctagcgggcggagaccctcctcacttcccagatggggtggctgctgggcggaggggctcctcacttctcagacggggtggctgccgggcagaggggctcctcacttctcagacggggcggttgccaggcagaggggctcctcacttctcagacggggcggccgggcagagacgctcctcacatcccggacagggtggcagggcagaggtgctccccacatctcagacgatgggcagccgggcagagacgctcctcacttcccagatgggatggcggccgggaagaggcgctcctcacttcctagatgggatggcggccgggcagagatgctcctcactttccagactgggcagccaggcagaggggctcctcacatcccagacgatgggcggccaggtagagacgctcctcacttcccagatggggtggtggccgggcagaggctgcaatctcggcactttgggaggccaaggcaggctgctgggaggtggaggttgtagcaagccgagatcacgccactgcactccagcctgggcaccattgagcacttgaaaaacattctttagttaacattaagttagtagtatgttactgtacttttatggaa

SEQ ID NO: 35900 - DNA, 1073 bp, Artificial sequence
  DNA replication origin
ggttgctggccgggcgggggctggcccccacctccctcccggacggggcggctggccgggcgggggctgccccccacctccctcccggatggggcggctggccgggcgggggctgccccccacctccctcctggacggggcggctggccgggcgggggctgccccccacctccctcccggacggggaggctggctgggcgggggctgccccccacctccctcccggacggggaggctggctaggcgggggctgccccccacctccctcccggatgggatggctgccgggcggagacgctcctcacttcccagatggggtggctgccaggcggaggggctcctcacttctcagacggggcggctgccgggctgagggcctcctcacttctcagacggggcggccgggcagagaagctcctcaccttccagaaggggtcgcggctgggcagaggcgctcctcacatcccagacggggcggcggggcagagacgctccccacatctcagacgatgggcagccgggaagagacgctcctcacttcctagatgggatggcggcagggaagaggggctcctcacttcccagactgggcagccaggcagaggggctcctcacatcccagatgatgggcggccaggcagagacgctcctcacttcccagatggggtggcggccgggcagaggctgcaatcttggcactttgggaggccaaggcaggcagctgggaggtggaggttgtagctagctgagatcacgtcactgcactccagcctgggcaacattgagcactgagtgaacgagactccgtctgcaatcccgacacctcgggaggccgaggctggcagatcactcgcggttaggagctggaggccagcccggccaacacagcgaaaccccatctccaccaaaaaaatatgaacatcagtcaggcgtggcggtgcgcacctgcaatcgcaggcactcggcagtctgaggcaggagaacgaggcagggaggttgcagtgagccgagatggcagcagtactgtccagcttcggctcagcatcagaaggagaccgtggaaagagagggag

SEQ ID NO: 35901 - DNA, 1036 bp, Artificial sequence
  DNA replication origin
tgaggagcttctctgcccggccgccccgtctgagaagtgaggaggccctcagcccggcagccgccccgtctgagaagtgaggagcccctccgcctggcagccaccccatctgggaagtgaggagcgtctccgcccggcagccatcccatccgggagggaggtggggggcagcccccgcctagccagcctccccgtccgggagggaggtggggggcagcccccgcccagccagcctccccgtccgggagggaggtggggggcagcccccgcccggccagccgccccgtccaggagggaggtggggggcagcccccgcccggccagccgccccatccgggagggaggtggggggcagcccccgcccggccagccgccccgtccgggagggaggtgggggccagcccccgcccggccagcaaccccatccgggagggaggtggggggctcctccgcccggccgccgccccatccgggaggtggggggcgcctctgcctggccgccccttctgggaagtgagcccctttgcctggccgccacaccatctgggaggtgtacccaacagctcattgagaaggggccgtgatgacgatggtggttttgtggaatagaaaaggggtaaatgtggggaaaagatagagaaatcagattgttgctgtgtctgtgtagaaagaagtagacgtaggagactccattttgttctgcactaaggaagattcttctgccttgggatgctgttgatctatgaccttgcccccaaccctgtgctctctgaaacatgtgctgtgtccactcagggttaaatggattaagggcggtgcaagatgtgctttgttaaacagatgcttgaaggcagcatgctcattaagagtcatcaccactccctaatctcaagtacccagggacacaaacactgtggaaggccgcagggttctctgcctaggaaaaccagagacctttgttcacttgtttatctgctgaccttccctcctctattgtcctacgaccctgccaaatccccctctgcgagaaacagcc

SEQ ID NO: 35902 - DNA, 2282 bp, Artificial sequence
  DNA replication origin
cagaggaagcgacactaggctgcaggctggtgtggaaggaaaaaaggaagccctggaaatagccacagatttttccagcgggagtaggccccccccgcatttttcctggactcaacgatggcacccggcaccgagccccccactcgcgcgaagaaggtgcactccacactgacggatccctgtaaaacacacgccccgccatcggaaggaccaggaaagataggcgcccccatggcaaggccctggcccccttctttcctgggcgccttaggtggtagtcggccacaccaaaaccgccagccaggaaagggccagggctcagggcttcctgctgccccttgactccagtgtcctctgcccaggaatttcaaatccgcagagcagggcgcggcaggcgcttccaccaaacaccccggctagagcaccccaggaggccgcctcctggccagcatccctgatgctttgcggctgctggggaaagcaggaaccctagtttccaggcttccccgccagagagggactggaaaggccatagaaggaaagttcctcattccataggggaaggatgccaggagagagagggcagaaggtggggagcagcgtcgggaagatgtttctggcttaggaggcttataccatccaagtcccggcggtgctataataaataaattcaccccagtattccgggaggccaaggcaggagaagcactcgtgtccagaagtttcagaccagcctgggcaacgtggtgagacctccgtcactaaaaaagacatttagtcaggtgtgggccacggctgcaattccagctactcgggaggctgaggtgagaggatctcttgacactatagtgagtcataagcttgtgccactgcactccagcctgggtgatggagcaagaccctttctcatagaataaataaatatataaataaactcggccgcctgggttgggccgtattcctaccctccaaaacctaatatagatgcatgtcaggtctttctagcacagcgctgcagagactgccactacgcgtgctgggtgctgcttgacatggccagtggctcagtaagaggaggagtaggagtgaaggagtggagaaagaggaggaggaaaagagaaggaagagaggaaaaagtagagagaaaaagggaggaggaaacaagaagaagaggagaggaggagaaaatgagaagacagtaagaatagaggaagaggagaaaataaacaggagaggaggacaaggagactagtagcaatgaggataaaatgaaagttgggaggaggagaaataggaggagcaggagaggaggaggagaaaaagagaaggagaagatgagaagggaggaggaggagaggaggaggaagaaaaggagaggaatagacgaggacaggagaaggaggaggaggagaaggagtagagaagaaggatgagaggagaggaggaggagaagacaaggaagagcagatgaggataagagtaggaggagaggaggagaggaggaggaggagaagagaggaggagacgaggatgagaggaggagggggaggagagggggaagagtaaaaagaagaggagaggaggagaggagaaagagaaggcaaggaggtggaggagaggaagaggagatggagagaaggagtagaaggaaagcaggaggaggaaaaagagaggaggagagaaggaggaggaggagaggaggaggagagaaggaagatgaagggaagaaaaggagaggaggaagaagagagaggagaaaaggaggaggaagaagagagaggagaaaatgaggaggaagagaggaggaagtgggggagaaagaggagacaatgatgaggaggagaggagggggaggagaaagagaaaaggaggagatggaaaagaaagagaaaaggaggaagaggagaaaaaaattatcactttgaggcattcagtaattatgactattgtaatcgcttttggaataaagtttaaacttaataggagagatgggaacaaagatcaaagatccagattatttcagagctcaatttcagagctaaaaaaaaaaaaaacgatatgtggtaatacacctgtggacgttgccaatacaaaagagttgcagtattttggttttggatctagccatgtgtcaccatacacaatgtatgcagtgcctaggagagagcagagagccacaacacttaggtgctgggcccagtgaaacatcacaatctctttttggtcagagcccaaacaatagaggagagccacatcacctagtttctaggttcagcaataca

SEQ ID NO: 35903 - DNA, 6029 bp, Artificial sequence
  DNA replication origin
gtgccacagaaagtaaccatacatagggatcaactgaaaacatttaatgactttcaaaaattactagggacattaattggatacgacttgctctagacattcctacctatgccatgagtaatctattttccatccttagaggaggtcctagtctcacttgccctcagcaattaacaaaggaggctgaggtcgagttacagctaatcaaaaagcaagtccataaggctcaaataaatagaatagatccagagaagactctagatttgctaatttttccaactcagcattcacctactggtgttattgttcaagagcaagatcttgtagagtggcttttcattccacatactcattcatggactttgactccttatttggatcaaatcactattatgagaggaaatggtgtatatatacaacattttctttatccagtctgtcattgatggcatttaggttgaccatatcttgctattgtatagtgctggaatgaacatttgaatgcatgggtctctatggtaaaataatttacatttctctggatatatatgcagtaatgggatggctagcagagctatcaaatggtagttctgcttttagctccttgaaaaatcacctaactgcttttcacaatggctgaactaatttacactcccaccaacagggtataagtcttcccttttctccacaacctcaccagaatttattttttcaccctttaattatatccattctgactggtatgagatggtatctcattgtgtttttttcatttctctaatgatcagtgatgttgagcttttattcgtatgcttgttgagcacatgcatgccttcttttaagaagtgtctatgttttttgctcactttttaatggagttgtttgtttttctcctgtcattgccatggttgcagctgctgagtgggggcttacctggtggccatcgtgccattgtgtgtgctgcccatgttgggctctgcgttgtcaggggtgggaaccccctggcaactgttgggtgtctgtgctcacccctgtgggggtggtgtgcatgcccctgtggtgaaaccttccaacccctctgagagttctgtctcagtgctgtctcattggctgacctgaggcaatcccttcggggatgtgctgtgccaggagggcctcccggtgttgggagtccctcaccaaagaactttgtgaaactcttagcggtggatcactccactcctgcattgatgaagaatgcagccagctgtgagaattaatgtgagttgcaggacacactgatcatcatttcaaatgcacttgtgactccgtgttcctcccagggctacacctgtctgagtcatcacttgctgagcaatcatcccaaggggtgcttctggcctcccaggggtgcatggctggcggttcccttgcagggctcgttggcccctctgtcctcccaagtacaggccttgtggtgcccccctccttttccattagcaccttcctcccacctcccattcatccatgcaaaccctgtgagggaccacgtggtgggggaaggagccttggttaggagggatcccactgcctgtgagaggaaggaaaagagccggctggggccgagttcctgtggctgccacagtccgggttcccctagagagctccctcgtgctgcaagcggtccagggttcgcctgggcctgggcaaaatgtcctgtgctgtcctacattggcgggtggggggtggggaaggttgggggggtggaaagcaagatttcatcccggtcgccacagttcaccgcccaccacagtttaccgcccgccccggtggcagcctggtgtccggccaaatgctgctcctccctgcaccctcctcctctcccacccagcctgctgtgcacttctggggccagaagtctgccctgcgtgacccccccggtcggggtcaaggccaagctgcgtgctggcggtgccctggtggtgactcatgggacaccatggcagcatccgccattgtgtgcttgcctctggttcatggctgtgccgcccgtgtggcccccttgagcttccgcattgggggggggtggaagcacatcctcagtcgcagtcctctggacggtgagggtactgtgtattccctgcccctagttcttgcttctccctcccgtcatccggctctggtgcggcagggacgccgtcagccgcagctcttctctgtcacccccgcccccctccctcactgggcctgtctcccaaccgagtgtccaggctcgcatcctccatgcccgcccgtctcttcctttattccaagacgcgacctcaggctagaggtggcaacctgctgaatttaagcatattagtcagcggagaaaatggaactaaccaggatgcccttagtaaagttaggtgaacagtgatcccagtgccaaatccctgccccttggtagggtgcgggaaatgtggcgtatggaagactcactccccaacgccacttgtgggggcccaagtccttctgattgaggcccagccagcctgtggacggtgtgaggccattagcagcccctggctgccacgcctgggtctttccagagtcgggttgcttgggaatgcaacctcaagctggtggcaaactctatctaaggttaaatactggctcaagagacaatagtcaacaagtactgtaagggaaagttgaaaagaactttgaagacgcagttcaagagggcgtgaaaccgttaagacttaaatgtgtgggatccatgcagtctgatggaagattcaaacaggcggcgggtcgggctgtgccagtggtctggcggatctttcctgcctcccgttcctcccgacccctccaaccgccctccctcctcggccacccctcctcctccttggaggtggcgggccccagcaggtgcggaggtgggtgggttgggcaggcgggggagtccttggggactgtcctccagacggcgactggccaccgccagatgcatttccactgtggtgctgcgccgtgactggctctgggacggctggaaaggcccggcagggaaggtggctcggggggtcatgtcctccccatccctctggaggggggtgagctgggccacaccccgagtgttacagtccctcagcagtagcactcgcagaatcccgggactgaggtagtgagacctgttgccctgctctccccttccctgctcccaccccagtgggagccccccatgaggggatcccccgtgggggcatgacagcgtccctctagggggctgggccacccctcccacggtgtaactactctaccaccccttccctgcccccagcgagtaggccgcatgtgaggggcaggggctgactgtggtgtgccccaggctggttgtgctgtcgggtctggggggactcttcggccatgcactcatttcaaaagaacagtggaagaagtgcacgaggccggtggcgctgttggctacccacatgacccatcttgaaacatggtccaaagggtctaacacgtgtgcgagtcaggggctcgcacgaaagccactgtggcgcaatgaaggtgaaggctgatgcgctggctggctgaggcgggatcctgaggcctctccagtttgccaagggagcaccaccgtccactctcgcccactgtgctgggcaggtggagaatgagcgcttgtgttaggcaccaaaagatgataaactatgcctgggcagggcgaagcgagaggaaactctggtgggggtctgtagtggtcctgacgtgcaaatcggtcatctgatctgggtataggggcaaaagactaatccaaccatctagtagctggttccctctgaagttttcctaaggataacgggcgctctcgcaaaaaccccatgccacgcagttatttggtaaagcgaatgattaggggtcttggagtcaaaatgatctcaaccaattctcaaactttaaatgggttagaagcccagctcgatggcatggggccaggtatgaaatgcgagtgcctagcgggcaacttttggtaagcagaactgctgctgtgggatgaaccaaatgccatgttagggtgcctgatgctgatgcccattagaccccagaaaatgtgttggttgatatagacagcaggacggtgggcatggaagtcagaatccactaaggagtgtttaacaacaaagaatcaactcgccctgaaaaatggatggtactgaaacattgggcccatacccggccattgccagcagttgagagtggatgggagtggtgagggtggtcgctcccgctggagccccgaggatgctatgctgctatgagtgggaggaccgctgcaatgagccttgaagccttgggcatgagcctgggtggagctgtcccaggtgcagatcttggtggtagtagcaaatattcaaatgagaactttgaaggccgaagtggagaagggttccagttgaagatgggtcactcggtccccagagataggagagtgccattccgaagggatggatgatgacttccattgccctcagccaatggaaacggagtcaagttcagatttctgaatccggagtggcagagatgggcaccatgaggcattcagggaggtaatggaagtgatcctggagaagctggtgggagcccaggggagagttctttttgtgaagagcagggcaccctgtagtggattcacccttagagagaggtctgtgccttggaaagaatcatagatcaggaggcacctggtgagctctcacaggcccttgaaaatctgggggagagggtgtaaatctcacaccaggctgtaaccatatccacagcaggtctccaaggtaaacagcctctggcatgttagaacaatgtaggtaagggaaatcagcaagctggatcagtaagttcagggtaagaatttgctctaagggctttgccagtctggctggggcttgaaatggggctgggtgcaggcagtggctggatgaggtgctgtactccacccctcaacgctagcggcacccctctgcagacatcctccacccaccttgccataccttcctcttccctatccctgcccaccttgctattgccacttcctagcagccttcttagaactgatgcagaccaggggaatctgactttttaaaacaaagcatggtgaaggcctatggtgggtgttgacacaacgtgaattctacccagtgctctgaatgtcaaaatgaagaaattcaatgaagcacgagtaaatggcaggagtaaatatgtctctcttaagtgtagccaaatgcctcatcatctaattagtgactcatatgaatggatggacaagattcccactgttcctacctgctatccagtgaaaccacagccaaaggaatgggcttgacagaatcagcagggaacaaagactctgttgagactgactctagtctggtatggtgaagagacatgagaggtgtagaataagtgaaaggccccagcacccctctgtttctctgaggagatggggtgaggtccactggccttgtgggctgccggtgaaattccactaccctgatcattttttcactgacctggtgaagttggggctggggaggaaagccaaaaggggctcacttttggcgccaagcacctggccacatgctggctggatgttaactggtcctggaatagtgccaagtgcagagtcggactggtgcggtacacctgtcaaacagtaatgcaggtgtctgaaggtgagtgcagggagtaccaaaacctcctgtggagcagaagggcagaagttgcttgatcttgattttcagtatgaatacagaccgggaaagcagggcctcatgatccttttgacgttttggttgggttttaagcaagacgtgtcagagaagataccagatggttgaccagatggccctcagctgctatgattgaagtcgaccagacggctcttgctttgccatgtctgaggtggacaagggataactgccttgcagtggccaagagttcatagcgacatcgctttttgatcctttggtgttggatcttcctattgtgaaacagaattc

SEQ ID NO: 35904 - DNA, 2994 bp, Artificial sequence
  DNA replication origin
gccagaaagggcctggaaggaccacagaaggaaagttcctcattccacaggggaaggatgccgggagacagagggcagaaagtggtgggcagcgttgggaagatgtttctggcattcaaggcttgcaccttctgagtcctggtggtgctgtagcaaatgaattcaccccgctattccgggaggccaaggcaggtggagcattcgagcccagaaatttcaaatcagcctgggcaacgtggtcagacgccgtcactacaaaaaacatttagtcaggtgtgatgggccacgcctgtattcccagctactcgggaggctgaggtgagaggatctcttgagactacagtgagtcataatcttgtgccactgcacttcagcctaggtgacggagcaagaccctttatcaaaaaataaataaataaacaactatataaataaactcagccacgggggttgggcccgattcctatcctccacaagctaatatagatacacattaggttttgctagtgcagcgctgcagaagctgccactatgtgtgctggatgctgattggcatgaccagtggctctgtaagaggaggagtagcagtggaggagtggagatagaggaagaggaaaaaagaaggggagaagaaaaggagaagaggaaaaggaggagagaaaatgggaggagaaaatgagaagaacaagaggagaggaggagaaaatgagaaaaagatagtaagaatagaggaagtggagaaaaaaaaacatcagaaggggacaatgggaccaggagaagagacgaggaaaaggaagctgggacaacgagaggagaaggaaaagataatgaggaggaggaaaagaggaggactaagaggagaggtggagagaaaaaggagggaaggaggaagaggagtaggagaggaagaggagcaggaggatgggagaagtatgaagagaaaatgaataaggaagcgaaggaggagaggaagagatgagaaggacgagaggaggaggaagaggaaagaagaaagaggagaggaggaaagaagaaagaggagaggaggagcagagaagaggaggaggataaaaaggagaagggtaggagaagagaaggaggagaagagtgagaaaaggaggaagacaggacgaggaggagcagaggaggaagtaaagagggaagaaggagagaaggagaagaagagacaggaaaaggggaggaggaggggagggggagaagaagacgagaaggaggaggagaggaaaaggagaagcaggaaaagagatggaggagaagaggaaaggaaaagaaggagaagatgaggagaagagaagaggaggaagagcaggagatgagaaggagaagaaaaggaggagaggaagaggagaagaaaggtgagaggaaaaaagaggagtagaagaggagaaggtggaggaggagagaaggaggaagaggaggagaaggaggagaggaggagcagagaaggaggaggagagaaggaatggaggaagaataggagagaagtaggaggagggaaaagaagaaggaggggaggatgagaggagaaggaggaggaacaggagaagaggagacagagaggaggaaaagaaggaaaggaagaggagatgcaggaggaaaaagaaggaaaggaggaggagaaggtagacgaggagaggagaaagaggaagagaaaatgaggagaagtagaaggaggtgaggaggaggagagaaggagaaaaggggaggagaatggggggattaggagaggagaaaaaggagaaggagagtagaaaaaggagtaggaggagaacaggagaaggaggaggaggaaaaagagtaggagaggagaaggaggaggagtggaggaggaagaggaagaggagacaaggagaaggaggagagcaggaggaagagaggaaaaggagtggaggaggaagaggagatgaagagaggaagagaaggaggaggaaggaggaagaggagaggagaaggaagagtaggaggagaaaaggagaggaggaagaggagaaggaggaggagatgaggaggaagaaaaggaaagaaagaagaggaggagaggagaagaaggaggagttgaggaggagaggagtcagagaaggagtaggagaggaggcaaagtaaaagattggtagtaggaggaaaggtttagggggaaaaggagaggagcagaatcaggaggaaaagaggaggagatggggaggaacagagtaggagatgagaaaaaggaggaggagaagagaaggaggagaaagacaagagcaggagatgagaaggaggaacagagtaggagatgagaaaaaggaggaggggaagaggagaaggaggaggaggatgagagcaggagaggagaaggacaaggagaggagatgaaggagaaataaagtagaaggagggagaggagaaaaagagtaggaggagaagcagaggagcaggagataaaggataaaatgagaggaggaggagaaatagaggagaagcagaggagcaggagataaaggataaaatgagaggaggaggagaaatagaggagaaccagtggagaaggaggaggatgacaggaggaggaagaggcaatggagaagaggagaggaggagaagaggagaagggggaggaactgtggaggaggaggaggagaggagaaggaggatgggagaaggaggaggggagaaggaggagaagaagacaagtaggagaaggagagaaggaggaggaggaaaagaaaaggaagagggggaaaggagaaggaggaggagaggaggagtagaggaggaagaggagaggaggaggaggagagaaagatgagaggaagaaaaggagaggaggatgaagagagaaagaggagaaaatgaggagaggaggaagaggaggagacagaggagaaaaagggggaggggagaggagtaagagaggaggaggagaggacaaggatgagaggaggagcagaagaggaagaggaaaggaggagatggaaaggaggaagagaaaaggag

SEQ ID NO: 35905 - DNA, 1922 bp, Artificial sequence
  DNA replication origin
gcgggccgcctcctcccgctgctgccccagcgctgtcctacccccggtcgcgtcgccgaggcagccgccacaggtcggtgctaccttctgggcaccgaaggagggaactctcctttccccagccattccgccccactgtcctgccctacccaatggccgcctacctctgactgccctacccctggtctgcctgcctccactaccgcccgccggctgcctgctgccccagccccctccaccgtggcagccgctgccaccgcccaggtagtgcaacatcccgcagcggtctccttagcgcccgcaagttccggcctccaaggaggacgctggcgggtggcctcggcgccggcttctcctctggcagagcacaaaacagccctgggcaaaaaccacaggcaactcaaacgctggaccaggccctcagcaggcttttataccagctttatgcaaataaagtctcctggaacacgtgttctgattgaatgagagcaagtctataggacaactctgattggataatttagtccaatgagattaggtcaaaagcttccttctcatcaatcagaacatgtgtcctaggagcctgcacttgcagaaggtgggtatatagctgttgaggtgggtcagtcttctcgtttgactctcttctggttctgtgtgctgtgctgtcctgttctggcaaaaggaggacgagctggcctacctgctgggcggctttattggagactggagtctgcggatggctgcagtgagatggcagccgctaggagggggacctatggcaacaggaggttggttggtgggcggatggcacgggaggtagcatcgctctgctggtggtggcctagcttcagcgtcagcggtaccggtgcgaccaggttaccaggggatgagggatgtgactttggagttggaggctggggggatagaacactgctggggaataaaacactgctggggggatacaacactgctggggccgggggaggagggtggcacagtgttgcagcaggtagcggggccagggaaaatagggttcatatttccggttgtgacccagccaggcgtgggggacagcatgcccatgcagatagcctgggaacgtcaggattcctgccgtgggttcccaggtttgcatccttgcagtttgtgtggccaggactgcctaggagccactgggcagggagcagccccattatgggagagcagcaggcaaggaagaacctagggggcacaggagggttgggccctgtaggtagctgcatcaggaaccaggaactcgcacctgcatgaaaaggggccaccaggtgtgaatggcactgagggactggttcccagtttctgctgctcctaattccaccacatcgtagctccagtggtcgtagtttgcgtgatgccccgaggctcaggacctccacccaagtgcggaaccaccgccgggagccagggactgtgctgtccgcagccctcacccccggggccccagtttctgcaaagagaggctgcactttggagggtgggtgggtgtgagtccgtcagctgaaacctggccccttatcccaagtggccagcataacacggtgacacaacttagtgtcaccactctcctcaccctactcttgagtcagatggtctgaggggcctggtggagtgtgttcaaccgcaggaaggggcagatgtgagatggtggtggggcaacagacccaagtcggtagtcaaggtctggggggatgtggagggtcttctagcagaagtggaagggccatggggctatggggtcaggagaggggtgggtaagccaggcccactctacacaagcaccatagtcctccagccaagctggccccagcacgccgggtgccatcctacccctatgtgtgttgttaggcaccaggcggcctggcacagagcaggagcctgcc

SEQ ID NO: 35906 - DNA, 3173 bp, Artificial sequence
  DNA replication origin
caccccctccacctcctctttcccctttatgctccttttcctccttcccctccaccctccttttcctccccctctccttcccttccaccctccttcccttcttttctctttctcctcttttccttcttctcctccacctttccccactccttttcctcctccttcttcttctcttccaagatggggagaagaagtgtggggagaagatggtggggaaatgattttgggcagatcgggagaagactttgggaagaaggagtttgggcagaagatggtgggaagaatgatggaggttttttttttttaaaaaaaaaaagaaactaaaagtagaacttccttcttatccagtgatctcaccactgtgagtaaaagaagttattaaaaagaagcattaaaaagacagatgcatacacatgtttatagcagcacaattaacaatttcaaaaatatggaatggtggtgagagagggttgaaggaagattttggggagaggaaatggggagacgattctggggagaagatgtgcaaaacacagtggagagaagacttttgggagtggaactgtgggtatgaggggggagaagatggtggggtgagaagttggggagaaggcagttgtgaagaaggtggtggggaagaggacgatcagaaaaagagggtgggataggaagaaggttggggatggggtggagaagaaggtggagaaagggaatggggaagaagatggttggggaagaagacagtgggagaagaagacaagacggtgggggaagaaaatagggagaagagggagttggagaagtaaggtgaggagtgaaagtggggataaaacattggggagaaagagtgaggaggaggtagggaagagatggtggggtgagcaggtggaaaaaggtggtggggagaaggtgatcagggagaagaggttcagggagaaagaggatctggaagaagatggtggggtggagatgtaaagagaacatgctagagaggaaactctggaaagacgatgttggacacaacacagtggggagaagactctggggagagggagtgtgggaagaagattgtagggtgaaggagtggggagaaggaggttgggagaatgtggtcagggagaaaagggtcagaaagagggttgtgtggggagagggagtgggaaagatgatggtggggggagtggggagaagacactgaagagaagcttctggagaaaagattctggggagagaaagatattgggtggaacacagtgggaaaaatacagtggaggtggagagggggcagtctggaagaagaaggtggggtgggaaaaggaaatggcaaagaagaagatgaagaaaaaatggtgaagaagaagaagagagtagggtgggaaatggaaatggggaagatgaaggtggggagaagacaatggggaggagatgttgggcagcactcagtggggagaagagtttagggagagggcttgtggggaggaagacagtggggtgaggggttaaggacaaacagttgggaaaaaagtggtctgggaaaaggtagcccagaaggaaaataatggtggggtgagggagtggggataaaaatctgggtggaatgagtggggaagatggtgcaaaaggggacagtgggaagaagaggatggtggagggggaggtggggagaagatggtggcggtgggatgggaagaagatggtggggttggagaagatagtatgggagaaaattttgaaagatgttgagcagaacttattggagagaagactggggagagggatggagagaaagtggagagggagtgttggggtagacagtggcgtgagggggtgaggagaaagtggttcaggagaagatggctggggagaagggggtgggtcgggaagagagggtggggataaaacactgtacagggaagatggtggagggggagctggagataaaattctggggagaaaatgttgggaagaagacagtggggggaagactgtgatgaggggttgggaaggagtcaacaagggagatgattgggaagaagagggtcaggagaaagactgtggagaagaagacatcgtgggggagaaaacactgggggaaaaattctggggagaaggtggtcacagagaagggggtgaggatgatggtgggaagagagaatggggagaaaatggcagggaagaaggcagttagacagaaaatggtgaagaggggcaggggagtcagaaagaagatggtctgaaaaagagggggtgggaaaaagagggtcaggaggaagaccttggggagaagttgttgggtagaacacagttataagaagactttgggcagagggactgtggggagagggagtgaggggaggagacacgagagggagtgtgggagaagacggtggggtgggggagaagacagccgggaagagggtcggggaagaagaagaaagaaggggaagaggagaggggagaagggggtctgggaagaagatggaacaagagggggaagaaaagggaaaaaaaggaaagagagggaaaaagagggtaagggaagaaggtaaaaaagggagttagggagaaaggggaagaaggtcaaggaagaagggagagaaggggaagaagagggtaaagaaaaaagaaaaagaaggtgggagtagaagggagaggagaagagtgtcagggaagaaggggaagaaaagggtagaagaagaaagcggtcaaggaagaagggaaagagggttggagaagaagagaagagggtcagggaagaaaaaagtgaaagaagagggtcagggaaggggaagaagagcatcaggaatgaagagggagaagagggtgggggaataaaaaagaagagggtgggggctaagggagatggaaggtgaaggagggtgtggggaaggaaggcggtagggaagaagttgttaagcagaacacagtgggaagaaggctttggggagagagagtaggagtagagggggagttagggaagaacagtgggaagaagacagtggagaataagagtggggactagagaacaagatgatggggagaaaatgctcaacaaatcaagtatagtggaaatgtgtctcaccacagaaaggccgtatatgacaagccctcagtaaacagtattatgtacactgaaaagttgaaagctttttgcctaaaatcaagatcaaaac

SEQ ID NO: 35907 - DNA, 2076 bp, Artificial sequence
  DNA replication origin
aaagagaaaagaagggaaggagggtggaagggaaggagagggggaggaaaaggagggtggaggggaaggaggaaaaggagcataaaggggaaagaggaggtggagggggtgaagaagaaagaggagaagaagggtgaagggagaaggaaggtataggagaaggagggtataggggaaggagagtagagggaaatgtggatgaaggaaaaaagggtgagggggaaggaaggtagagggaaaagagggtggaggggaaaaagagtggaaagggaagaggctagaggaaaaaggggggaggagtgtggagaggaaggagggtgaaggggaaggagggtgtagaagaaggaaggtagaggggaaggagggtgggaggaaaggagggtggaagggaaggagtgtggaggggaaggagggtggaggggaaggagggtggaggggaaggagggtggaggggaaggagggtggagagaaggagggtggagggaaggggggtggaggggaaggagggtggaagggaagggtagtggatgggaaggagggtggataggaaggagggtagataggaaggagggtggagatgaaggagaagaaggaggatggagagaaaggtgggtggaggggaaggagggtggaggggaaggagggcagagaggaaggagggtggaggggaaggagggtgaaggagaaggagtgtggaagggaaggagtggaagatgggtagaggggaagaaggagaaggagggtggaggggaagaaggatggaggggaaagaggatgggagggaagggagaaagaaaggtagaggggaagaagggtgcaggggaaggagctggaggggaaggagggtggaagggaaggatggtggagagaaaggaggggaaggatagtggaggggaagaagggtggaggggaaagaggtggaggggaaggagggtggaagggaaggatggtggaggggaagcaggttggaggggaagaagaggctagaaaaatggaggaggtgaggggtgaatggggaagaaaaggttggagggtggaagggaagaagagggtggaggatgacaggtaatgggctagaacaagtggttgtattagtataaattcccaccagcagtgtaaaagccttctctattcaccacatctttgacactatttattgtttttgattttttaattatggccattgtagctggagtaaagggtatctcattgtgatgttaatttgcatttccctgataattagtgatgttgagcattttctatatgtttgttggctgttttcatgtattcttttgagaatggtttatttatttcctttgttcactttttgatgggattatttgtctttttcttgctgatctgtttgagtaccttgtagattctggatattagtcctttgtcaaaagcatagtttgcaaatattttctccccctctgtgggttgtccatttactctgctgattatttgttttgctgtgcagaagctttttggtttgattaggtcccatttatctatttttgtttatgttgcctttgcttttcggttcttggttataagccaatgtttaggagagattatctgatgttatcttctagaatttttatggttccacaccttaggtttaagtctttgatccatcttgagttgatttttgtataaggtgagagatgaggatccagttttattcttctacatgtggcttacctattatcgcagctccacttgttgaatagggcatcttttccccactttgtttttgtttgctttatggaagatcagttgtctgtaagtatttgactttatttctgggttctctattctgttccattggtctgtgtggctgtttttataccaatgccatgctgttttggtcactatagccttgtagtatagtttgaaatcaggtaatgtgatgcctccagatgtgttgtttttacttagtcttgctttggctatgagggctctttttgtgttccatatgaatttgtgtacattgattttgtatcctaaaacaacctcatccttcttctagtaatattgctccagatatctcattaaatttgatcattgcacaac

SEQ ID NO: 35908 - DNA, 1378 bp, Artificial sequence
  DNA replication origin
cagaaatatgttactacttggctgcctctactctattattgtacaccttgaaggcaaggttaattaaatcctgttgtggggtttgagggctggaatttaatctttgaagttttatttaatgtcgggagcagattgggtaataaaatgtatattgagaataagatggccttttgaccttttagggtctagggctgtaaagcatttcagggttgctgccaaacgagccatgaactgggctggatttttatatttgatgaaaaagagcctaaacgctgtctgatttgggataaagaaaaaggagcattaaccttgactatgcttttagctccatccacctttttaagagtaaattgctgggcaggtgggggagggctagtcaaggaacgaaactgtaagccggactgggtgtgaggaggcgaggtgataaaaggattacagggtggaggagcggaagctgaggaggaattgggacctagctcagcctggagaggaggggagaggtcagatgggtctgtagaaaaggaagattagaaagactcagcgacacttggggttgggactgaggggacaggtgggagggaaagaaggaagatttgggacgagttgcattgggaacagagactagggagggaccaatgtgtaaaagaatgcctggacgtcagcacctcagactgtttgcctattttacgacaagaattatttagatcttgtaggatggaaaaattgaaagtgctgttttccggctattcggaactactgccaagtttgtattgggatcaagcggcattgcagaagaaaataaggcatttaggttttaggtcaggtgtgagttgaagaggttttaagttcttgagaacacaggctaagggagaagaaggaggaatggagggtggaaggttgcccatagtgaaggaagcaaggctagagaaaagagagagtagagacatggagggaaggggttcgggggttcttaccctccagaaaagtgggaaagaggtgggggtgcagaaataaggggttggggtgcagagataagaggtcagggcacagaaataagggatcagggcacagagataagaggtcgggctgtggaaataaggggttcttgcctctcccccagaaaagcgggacttgcctctaagggtgaaggagaaggggttgagaggttcttgcccctctcccagaaaagcgggacttgctgctgacggtgaaggacaagggtttgaggggttcttgcccctcccccagaaaagtgagacttgctgctaacagtgaaggacaagatgttgaggggttcttgcccctcccccagaaaagtgggacttgccattaagggtgaaggagaaggggttgaggggttcttgcccctcccccagaa

SEQ ID NO: 35909 - DNA, 1604 bp, Artificial sequence
  DNA replication origin
tctaaagaactggtttctgtccaggaccaaaatgactctgttatgtttctcttgctttaaaatagtctgtcagttgaagcatttgaaggtgaagggataactgatgagtttaggaaattagagaggatgccaatctctatgggtatagaagttggtagaaagacaagtacctggaactggtaagagttcctgttaaggaagaggagcctggttacatttactctccatgttgaggactcagattctggtcggtgcctagagaaggtcaaattatgagggttttcatttgcccattgattcaataagtgtggagtgctgggttctcagctgagggtggggtatgactggtgcacaaaaccaacacccttgtcggggagctgccagtctaaaggtgggaggtgaagctttatagaatagtcacataaggatgcagatgcaattggaagcggccgtgagcaccgtgaagaattgcagagtgtcctaagactgggtcaggttgctgttctgtgcttatttcctgaggaaatgacattcaaatttgggtgtaaaaggtgaaaggaatggcaggtgaaaggggtggcagagatgggggaaccggttcaggaactcagtggctttgaggagctgcaaggtcaatgtggccagaacacagtgctgggagagtcctgtggactctcagccagggtagagaggttggcagggctcagacggtgcagggctttgtctcccagtgaatcattttgtaagagcatgaaaagccatggagggatttttattctggggtcaatatgacttgctttgtgttttaaaaggttcgttctggctgctgtgtggaaaacaagtggagggagatggaatagggaggtggggatatggaggggtctagagtggggatatggagagatctagagtggcggatatggaggggtctagagtcaggatacggagagcactagagtgggggatatggagggatctagagtggggatatgtaggggtatagagtggggatatggaggggtctagagtggggatatggaggggtctagattcaggatacggagagcactagagtgggggatatggagggatctagagtggggatatgtaggggtatagagtggggatatggaggggtctagagtggggatatggaggggtctagagtgggggatatggaggggtctagagtggcgatatggaggggtctagagtggggatatggaggggtctagagtggggatggaggcttattgagaaagtagaatagctgggccttggttgtcgaacagttatgggggatgagacatgagtggatgtggaagtcaaggctgatactcatgtttctggcttaaaggaataaagactggggaggtgtagatgtgaatgatgtgtaagtgcctggcatggtactggtgaggaggatgtctgagctgagtcatgggttgtaaatacaggcttaccaggtggagaaggaagacacttccagcaggctgaccaacatgttacatggaggttagaaagagcttgtgaaattgacagtttacccacaagggctctcaggcaagggaggtaattggagttaaattatgaatccatgttat

SEQ ID NO: 35910 - DNA, 1507 bp, Artificial sequence
  DNA replication origin
tggacgtgactgcccggaggcagcctcggagctctgcccgtcccgggagcctgcctggcagcgtcgggaagcgcgggcggctggtcccttcttgctccttcccccagcgcctctgccttggcctccgggaggccggaaaccttcctccctgttttgagatttcggtggagacccttattttttccaccactaaggttaagagattctggaatggaaggaccagagatggtgaaccttctgcaattctcagagttagccagactcccttttggggcagaagaccacccttgagcacctccccaaggggcagctcctttgcagtgtgacttctctgatctacccctaggaatgaagagtcttctgataacccgatagggccctgaaagtcaaagggcaaacgagatctcgcaggacataagcttgtgatcgtttaagggggtggggggggggtcactcacgtttctgaatggaattggaggagcgtcaaagaggtgcctgtgaagaagcgcagcagtccttcaagtggagcaaaattgagttttcccatttttgccaagattttgaagacagttcaatgtatcgtgcatttgctgtaagcttcaagagcataaacgatgactaccccagccctgctgccctctccagacgtgggatcccacctctgaacctggggccgccctccccacatcacagcactaccttgagactttctgagaagacacttatttttaatgccttcatcaccctgtgtttgggggcattcttttttcttctaggcttctcaaaacacaaacgctttgatctgggtttagacgatgtgttaattcctcatgtagtagctggcaaaggggctaaaaaccctgaagtcttcctgatctatgcacccaattaacatacacacagagaagaagaagaagaacctctgagaaataaagttcgagctaatcatgacaagtccctggaagagacaaaagaaaaattgagaaagtcaagcagcctgggtgctgtggctcacacctgtaatcccaacactttgggaggccaagtcaggaggatggctttcatctaggagtttgagaccagcctgggcaacatgatgagaccttgtctccacaaaaaatcaacaaccagccaggcctggtagtgcccttttgtaatcccagctattctggggtctaaggtgggaggattgcttgagcctgggaggtggaggctgcagtgagccctgatggcactgcaacactcagccagggtgacagagtgagaccacatctcaaaaaaaggaaagaaaagaaaagtcaagcaaggaaatccaagcagaaattcagatagagaaaaatagggtccaagaaatgaagacagagaacaagccactgccaccagtccttattccaaactttgtaggcatgaatggtggagacctggaagacaacataaaaaagaaaagggaaaaaaattaaagcatgaaacatgcctaggataattataggacatacagttgggggca

SEQ ID NO: 35911 - DNA, 1592 bp, Artificial sequence
  DNA replication origin
gggagagaaagaaagagagagaagagagagagggagaggaggagagagagaagagagagagggagagagagagaaggaaagagagagagggagagggtgagagagagagggagagagagagaaagctagagagcaagcccgcaggagagaacacagtgggcacagcattcagacaagctgagctcaggatgcagattcagcctggagatacagaactgggggcatcagtgtattttaaacctcagggaggatttgatcaccagggagaataccataaggtggcagcaaagaggctggggtagaagtggaacactggccatcaccaagttttatggagcagccacaagaaagaacctcagaggcccaggagggagttgcagagaaacggaggagcagcacacagcagggccggggctctggggagagcgggactccagcgcggtgcagagctccggcccagctacactggcagcatcttggtgagcagagcagggcggctcctgctgcgagagcgatgctagcagatgctgagacagaggctagggtgcaaagaggctgccctgagcaaggagggagatcttccggaagtttgactgaggtgcccgtggagttgagggaataagctttcgaggtggggggcaccgaagcccacataggaggcttgcaaaggagtcaggatgggacaggattggagactgtgaggagccagcctgagtgaggaggagaacaggcatctccttaggacaaaacccaagcagaagagctttacaggtgacactgtttgcaggcgtctttgagggccagaggcagaagttgaagaagttcctgtctggggcttctcctttatcccatgccctctgtggattgggatggagaggatctggagtaggaggtggagtcgctttggagaggggaaagctcaccaggtgagcaagtggccaaggagagcgagggagattacaggaggacagtgaggttcctgggcagctccaggaccgagtgtgagatcgccccgacatctaccagtgggtctggctgatgcagggctagagtctggctgggcaggcatggcaggaagatgaggatcttcacaagggagggttgacaaagtaggccatggcctctggatggtacgggaaggctgtcagtccagcgggggagggtgggtggcccagggggtgaggctggagactgcagtctgtgaacgaaagacgtgcgtgttcatcctctggggtgtcttaagtgtcggcctgttggggtggtcatatacacggtgggcctgggtgtcacgcgggcagagcaatcacacttggaaagcctgtcataagctgcctggtgagtcccgcagtgcttgggagcccttttctcagtactggcatcggccgtgagtttctgatggaaagagcccggcttcctggagagcggcaccagagcttttatggactgttgcttcaggtggaacgtggagtaattattttcttatgactgtttgtagatataattgtgtcctcactactcaggaatttatgttcagaaaataattactattggattaactgcaatggcaatcctttaattccactctcaacact

SEQ ID NO: 35912 - DNA, 935 bp, Artificial sequence
  DNA replication origin
gagagacagcaagagagaggaagagagaaggagagggagagagagaaagggagagaaagagggagagacagagagagaggaggagagagagagggagataaagaggaggaggcagaaaaagagaggaggagagagagggagagagggagaggggagagacagagagggagagagagggagaaggaggggagagaaagaaagagagagaacagagagagagggagaggaggagagaaagaagaagagagagaaggagagagagagggagagaggggggagagagagggagggagagggggagagagaaggagagagagtggaagagagggagagagagggaggggggaagagagaaaaggagagagagagggagagaaagagggagagacagagagagaggaggagagggagagagagataaagaggaggcagaaaaagagaggaggagagggagagagggagagagggagaggggagagacagagagggagagagagagagaaggaggggagagaaagaaagagagagaagagagagagggagaggaggagagagagaagagagagagggagagagagagaaggaaagagagagagggagagggtgagagagagagggagagagagagaaagctagagagcaagcccgcaggagagaacacagtgggcacagcattcagacaagctgagctcaggatgcagattcagcctggagatacagaactgggggcatcagtgtattttaaacctcagggaggatttgatcaccagggagaataccataaggtggcagcaaagaggctggggtagaagtggaacactggccatcaccaagttttatggagcagccacaagaaagaacctcagaggcccaggagggagttgcagagaaacggaggagcagcacacagcagggccggggctctggggagagcg

SEQ ID NO: 35913 - DNA, 1453 bp, Artificial sequence
  DNA replication origin
cagcactgggggtgaatgtgtgtccagggagccctgcaggaagcatcccgtgtcagtggggctggttcgctaccgtgacctgggaatgcgcctgacagatctccaacgtcagggatctggaccaagcttctgtgctctgagcagcgtttacaccaaagcttcccaggagctgctcccagcccatgtctgagccaggcagggctcccaagacaggcaagccctggcagactgggagaaggcaccactctgctggttgattttggctggaggcttcccttacagccttggtggacgttccctagactgtaccatggtctaggtggctcccacccaagcttccctcccacttcccttcatttagggtcaggtttgcacctccttttgatgattctccaggcttttcccactttccctccattttcttccaaccctgtttcccttaggaaaatccttacatgcagaatcctatgttgccatcgtcttctccaggcacatggagtaacgcaacctcagattagaaaatgtcagaagaaaattggtgggggtggggggagagagagagagagtgagagaaggagagagagagagagagggaaagaaagggagagagagaaggagagacagagaggaaaagagagggagagagaggaagaggaggagaaagggagaaagagagggacagaaagagagaaggagaggcgagaaagagggaaagagatggggagagagagaaagaggaggagagcgaggagagagaagaagagcaggggagagagagagggagagggggagaggagagacagagggagagaaagggaaagagagggagagagagagaaaaagggagagataggggagagagagaaaggaggagagagagggagagagagagaaaggaagagagatggaaagagagagagaaggagagagaaagaggaagagagagagaaagtgggagagaaaaagagaagaggagagagagaggaagaggagagagagaggagagagaaggacagggaggaggagaggagaaacagagggagagagaaggaaagagagagaaggagagagaagggaagagagggagaaagagggagagggggagagagggaggggggaagaaagaaaaggagacagagagggagagagagagggaaagagaaggagagagggggaagagagaaagggagagagagagagagggagagaaagagggagagacagaagagaggaggaaagagagggagggagatagaaagtgaaagagagagggagagagacagcaagagagaggaagagagaaggagagggagagagagaaagggagagaaagagggagagacagagagagaggaggagagagagagggagataaagaggaggaggcagaaaaagagaggaggagagagagggagagagggagaggggagagacagagagggagagagaggga

SEQ ID NO: 35914 - DNA, 1552 bp, Artificial sequence
  DNA replication origin
ataaatgcatagttctggaaataagtcctctaaaattctgctcaattgtggcaccatctactttttacctctgtactttcatttttaattccccaaaatgttttactataaattcttattagccaaaacatgctttaaggattgaaacaaacaaaaacctaaaatgacttatcgtctcctgcagaccaatatccagggtcaggctgggcacagtggctcacccctgtaatcccagcactttgggaggctgaggtgggaggaatgcttcaggtcagcagcttgagacatgcttgggcaacattgtgagaccctgcctctacaaaattaaaaaaaaatttcacgtgtgatggcacacatctgcagtcccagctacttggaaggctgaggtggaagcattgcttgagcccaggaggtggaggcagcagtgagccctgattgcactgctgtgctccagcctgctgtttttgaaaaaaaatcaaaaaacaaaaaacaaatccagggtcatgggctggacatggctggacatgggctggacatgggctggacacataggagcccactgatcggccttcctgtcgtgtcactgcccgtgacaccaaatggacactcatctccttcaagctctccacacccttgctccctcaggccccttcacaaatgccagctcagatgtcacagccttgaaggaccctgctcatcccgaccccaaggggcggaactcatctcgcccacccacctgctgctcatcactgagtcctcaccagtgtatgaccactgcccattagactgcgtagagtcagtgctcatcactgccacctccacagagtctttcccaggacccagctcaacgtttatggatggaggctgtgtttgaaaggtttccaggttgagtccccagacagccaggtatcacggtagccaaggacaggatgtgccagaaacggatgaagtcccgcccctgtgccaactctttcaattctggatgcagctctgcaactgaagctcccttatcatccccattgcacagggatgatgggaaccatgcggggtcagtttcactctgggaagtggtggagctggggctcgctctaaggggacagcagagctggggctcgctgtacgaggcagtggggctggggctggctgtaggaggtggtgaggctggagttcgctctagggggcaggggggctggggctcactctaggaggctgtggggctggagtttactctaggtggcagcagggctggggctcactctatggggcagtagggttgaggctggttctaggaggtggtggggctgaagttcgctctagggggtggtggggctgggcctggctctaggaggtgatggggctggggctcgctgtagggggcggcggggctggggctggctctagaaggtgatggggctggggctcgctctagggggcagcagggctggggctcgctgtagggggcggcggggctggggctcgctctaggaggtgatggggctggggctcgctctaggaggtgatggggctggggcttgctctagggggcagtggg

SEQ ID NO: 35915 - DNA, 1341 bp, Artificial sequence
  DNA replication origin
ccatgggaagatgacgtgaggacacacggggagaacaaccatgtgaagaggacatgaggacatgtgggggaagatggccaaaggaatatgatatgaggacacacggggaagatggccacgggaagatgatgtgaggatacatgggggaggacagccacaggaagaggacatgagaacacacacagggacgatggccacaggaagaggatataaagacatggagggggaggatggccacgggaagaccacgtgaagacatgcaggaggagacagccatgtgaagacgatttgaagacatgcaggggagatggccacaggaagatgatgtgaggacacacgggggtgggggcatggccatgggaagaccacatgaggacacacaaggggaggatgtctgcgggaagatgacataaggacacacagggggaggacatccatgggaagatgacatgagggcacgtggcggaggacgtccatgggaagatgacatgaggacacgcaggcagaggacgtccatgggaagatgacatgaggacacacagaggaaggacgtccgtgggaagatgacatgaggacatgcagggggaggacatccatgggaagatgatgtcaagatatgcagggggaggattgccaaaggaagatatgatgtgaggccctgcagggggaagatgtccatgagaagaccacgtgaggaaaaacggggaacacgtccatgggaagacaatgtgatgacatgcagtgggaggacagccagggaagatgatgttagaacacacacagggacgatggccacaggaagaggacatgaagacccacagcgggaagacggccatgagaagaccatgtgaggacgtgcagggggaggacagccacgtgaagacgatttgaagacacatatggggagatggccatgggaagatatgtgaggacacgcagcagtggggatggccatgggaagaccacatgaggacacacagtgggaggacatccacgggaagatgacgtgagaacacacaggggatgacatccatgggaagatgatgtaaagacacacagggggaggacgtccatgggaagatgatgtgaagacatgcgttgggggatggccacaggaagactacatgaggccacacagggggaagacgtccatgagaagatcacgtgaggaaatagagggggagacagtcatggaaagatgatgtgagaacacgcaaggggatgacttccatgggaagagatgatgtaaagacacacgggggaggaagtccatgggaagatgatgtgaagacatgcagggccacaggaagatgacatgaggccactcagggggaaggcgtc

SEQ ID NO: 35916 - DNA, 1070 bp, Artificial sequence
  DNA replication origin
aggtgggggcagctctagccccccgtgatggagaaagtcggtgtctgtggacccttttgtgctttcagagagcacaagtggaaagccaaatcagtgtattatgggttggaaataccattaattggagaggaaattgagaccagatattaggaaaatatatgatggtttttacacgagggccaggaaatcatcagggctgacgctgataattcccctaatgctgcacgtcctgtgagtcatgggctggcgggactgacacgctcgctctcgccctgcacactgcctgtctccactccagccccgctcaccgttcccctgcccaggccgtgtctgcactggcaccataaacctccattatcagaggtttaaaactgggccataaaaactctagggctgagacgtggcatgtaaggtctcagtctgatcatggccatccccttccagctggggacttaaaaagtgggttgattgggctgaaaagacagctaatatgttctgagcggagaggaggctgggacaggtgggtgtgagcgtatgtgtgagtgtgggtggagacgaggccgggggaggtgtgtgagaatttatgtgtgagtgtgggtggagacgaggccgggggaggtgtgtgcgagtgtatgtgtgagtgtgggtggagaggaggccggggaaggtgcgtgtgagtgtatgtgtgagtgtgggtggagatgaggccgggggaggtgtgtgtgagtgtatgtgtgagtgtgggtggagaggaggctgggggaggtgtgtgtgagtgtgggtggagaggaggccgggggaggtgtgtgtgagtgtatgcgtgagtgtgggtggagaggaggccgggggaggtgtgtgtgagtgtatgtgtgagtgtgggtggagacgaggccggaggaggtgtgtgcgagtgtatgtgtgagtgtgggtggagacgaggccgggggaggtgtgtgtgagtgtatgtgtgagtgtgggtggagaggaggccgggggaggtgtgcgtgagtgtatgtgtgagtgagggtgtgcacacactcggtatgtgcatgtgtgcatgactgtgtacc

SEQ ID NO: 35917 - DNA, 672 bp, Artificial sequence
  DNA replication origin
cctggaatgataggaggggcatgggaagggagctgccctccatggattctggggcagggactgtgcctggctgggagctggctgtgcctggtggtaaggctgtcaacgcttcagtccctaccgtggcacctggggctggggatgtgggtgaggtgggtgaggctgcacggtgcaacccattgttcttgctcagcaaaggcgcccaccatgttcttctctgcacccagctctgtgagaggggagtgacatgcaagctgtcccatggagtgcccaggtcagagggggatgtaggggggtgggtgggaaacagaggcagagaggactggaaggaggtgccactgccctggagagggcatcacgggagctttgtggaggcggtactgagctggcctgggtggggtgactggtggcctaggtttggctgggcaggtagagtcttccttggggtcactgggctggagctggttggggtccaccttagcagaggccctcaggctaggccaggacaggctgggcttgagcttactgtcaccttcatttggctcctagggagaggttgggagaagaaaagagggataatcagatgggagatttggaaaagcagagaaagacgatttagcaatttaggagacagacacacatgcacgcgtgcatgcatgtgcgtgtgcacac

SEQ ID NO: 35918 - DNA, 1310 bp, Artificial sequence
  DNA replication origin
gtgctgattggtgcatatacaatcctccggctagacataaaagttctccaagtccccactggactcaggagcccagctagctttgcctagtggatcctgcgctggggccgagcgagggtggagctgcctgccagtcttgtgcagagtacctgcactcctcagcccttgggtggtagatgggactggtgccacggagcaggggtcagtgtctgtcagggaggctccagtcacgcggcagcccaccgcacggggctcgggcatggtgggctgcaggtcccaagccctgccccctggggaggcggctgaagcctggcaagaatttgagcgtggcgccggcaggccaacagtgctgggggatccggggccccctctgcagctgctggcccgggtgctaagcacttcactgcccagggcgggtggcgctggccggccgctcagagtgcgggcccaccaggcccaagcccacctggaactcacgctggcccccgagagccgcgcagccccagttcccgcacttcccacctgcgcctctccctcctcacctcccggaaagctaactggctccggcctcaaccagcccagagaggggctcccacagtgcagcggcaggctgaagggctcctcaagcatggccagagcagacacgaggctgaggaggtgctgagagcaagcgagggccaccagcacgttgtcacctctcattgggtctctgtctacctggagcatgggctggcatcatctaaacaatggctggtgttgactagtcaccttgagctaaccactgggatgctgcagctgggtctacaggcttggtacacctgtctccagattagcccggggaactcccaagtaagcaccaaactagatactagcatgcagtttggtaaatgtgatgtgaatctacagtgggaaagggaccaacctggagtctattttgaggttaagggaaaaggcctctgcagtttgttccaaggttatatctcaagactaaagagaaagggaaataaaattttgcattttgaagttaagctggtccatgataattctgggtctgtcaccgctaaggcagtgggcatctattgtttctgttcctttctcctttgatgcttcccctccctccctctctcccttcctctctctcccctcccctccctctctccctcaccccctttctccctcccatcacccccctcccctcttttcctctcctccccctctccctcccattatcccctctccttctctctccctccatctctctctctccccctctttctctcttcctctctctccctctctctctctccttc

SEQ ID NO: 35919 - DNA, 1004 bp, Artificial sequence
  DNA replication origin
agagggggatgaagaggaaggaaaggggggacgtggagaaaggagagaggggatgaggaagaaggaggagggatgaggaggaaggagaggggggatgaggaagaaggagagggggtatgaggaggaaggagatggggggatgagtagtaaggagatggggggatgagggggaaggaggggggatgagggggaaggaggggggatgaggaggaaggaggggggatgagggggaaggaggggggatgaggaggaaggaggggggatgagtaggaaggagatgggggatgagggggaaggaggggggatgaggaggaaggagatgggggattaggaggaaggagaggggggatcaggaggaaggagacaggggatgaggaagaaggagggggggatgaggaggaaggagaggtgtgatgaggaggaaggagagggaagatgaggaaggagaggaggatgaggaggaaggaaagggggatgaggaggaaggagaggggatgaggaaggagagggcagatgaagaggaaggaggggggatgagtaggaaggggaggggttatgaggaggaagagagggatgagtaggaaggagatggggggatgaggaggaaggagagggggaatcaggaggaaggagacagggtatgaggaagaaggagagggggacatgaggaagacagagagtgaggatgaggaggaaggagacggtctcttccaagagcaaggtctccactttcctgttgcctcacacggactgccggcctcttggctggaacacaccttgctgccttttccctacacacacacattctgtatacatacataccgcctgcacacactctgggcatgtcattatacacactgtgtcatctgctcacatcagctgtcactcctctatgccagcagacattatttgtgtgtgtgcacgcacacacacacacacaggggactccccatctgcacacacgctctctgtctgcacacaataggcatgccatccacacacgg

SEQ ID NO: 35920 - DNA, 1398 bp, Artificial sequence
  DNA replication origin
cccgccccgcccccgccccagagcgctccccctctctcctcgggggtcgctcggagggaccaccgtctttctggttggagtacagccccgccccgcacccgcttgggttgggagtcctcccacccaaactctccctggcttcttcccagtctgcacggctcgagacggccgctcatccctgctccccgtgtgtccctcggtcctctctgcagctcccagccctcaactccttaccccagtttgggcaaccagctgccccgctgtttggcccaggcctgggccatgacggatgggtgggcgcccggggccgcgagaagggcggaacgctgtgcccagccggagactacgctgggtggcggcggcagcgccgggagtctgcagtgcgcgagggagaagtgagcgcacagcgcccagcgagcaggtgcctgcggcgcggagagcgcacacgctagccagcccgcagcggccgtgagtgacggcaggggcggcgggggtggggtggggtggggagcgccgggcacgactcagggcccgggaggtttccgggagggggcggggttcctgcccctggatcgcgggtccctgtgtctccacgcgctcttcgccggtcgtggccccttctttgcccggtgcaaagcgagatgccgaggcggcaggaagccggaacccatcccccgcctgctctggcgtactcggcatcccggtacctcccccagccttcacccggagtctgctccctccccagccatctgagggagcgcggtctggtccccgaaggcaaatgcggggtggacatgtggttcggacgcagcgcgtagtcatagtcataggggcgagtcctaaggctcgccttgggtctctcctatctccttcccccgggagtccccagctagtgcgtttcggcacctctgcccctaccccggcccctacgcctcagctctgacctcaggttggggtggggcagcccggtggattcacgtgcctgcttccccggctaccagcctcccggaggcaccgccagaggattccctgggagccaaggagaaggaaacccagagggaaaacactctccagcagccaccctggtccaggcggccagcgcagcacagctcagaggggaggagctgcaggccctctccaaggctgtcctcgccagcgggtgcccggggccagcccttcttgcctccagtgcctgcctttcagtttcctcgtctatggcccaggagtcactcccaccccctggctcactgtggctcatctatcaagcccttgttttctaaggtctcctgctgggggcaaagggaagaagggggtcctataggactttcctcctttccctcaagttcctctctaggggctccacagaggcagttgccagctccttctgtcatggcagga

SEQ ID NO: 35921 - DNA, 1428 bp, Artificial sequence
  DNA replication origin
ggaggataaagggttgcagcggagggcgcagagcagatgctcagggcggggcagagggggcgggaagctggcgccacggtcgcggcgagggcgagcagccgcgcgctcccggtgctaggaggaatgcccgcagagcggaggctggcaggcgcgagaggccctaagcgcgcagtccgaccaaggggagttttacaggtcagcgccgagccgaattaggggactcaagccttggacccttgatttacacaaaagagaacccgaccctgcaaccggcgacagatggcgcccggacacgccgagcagccaccgatgcaaggctgcgatcgctgccctacttgcgcggccccacatgcgcggccgccgcggcttgctaagggagggagctgcgggacccgaggcggccagaaggggtctcccgcggcccgcgctgggctccacacttacgctgattttagttgcatccttatttgttacctaaaatgcaaagagggagagagagacgtgaggctcgcggccttctggctaggggaactcggatccgcctttaggcaagggcaccctcctccggcaggctaggaccgaaaccgcccgggggatgggggttgagggcacaaaggacgtccggctttccaagagtttcccaggaggaagcgggctttggagctagcatggtgcctgaccaacgggtggctgccctggtgcacacctgccggctgaactggggagactggatggacaccagggtgggaaggaaagcccctctccttccctctgggcatccttaggccctgccgcgtggctcaaaatcctcccccagctcactgggagccgtgaagaactggagggagggccgctgtgtctggacagcacccagcgggaggctcagtgggagtaactctgggtgggaccctgggagaatgtaggtgtgtgtaggtgtaggtgtgtgtgtaggtgtgtgtgcacgcgagcacactagagtgtgtaagagagtgtgggttttgaggcagacaggcagcgtgggcctgttttcggccacagagaagtggcccctctgtgcccctgagggctggaggtcctgccggctttccggtactcggttttctggtggcctctggaacgcagccgtgggagccctggggtcctcaaagtggcagagggcggggagagcctgatgggaccaagggggcttccttcactacccagcacccatcagagggccgcagccagcgagcacgagcaagcgaccaggctgaggtgtggctctttaggggctgggcgtgaatggagttctgggaggtggtgggaacagcgatgctgtcaaaataattgacaggtttgggggtaaccactgctgactttgaagatgctttgggatgcgaaggtggaagatgggctgcgccacagggcggcgccctgcgcgagtgaagc

SEQ ID NO: 35922 - DNA, 1569 bp, Artificial sequence
  DNA replication origin
agcctcacgtctctctctccctctttgcattttaggtaacaaataaggatgcaactaaaatcagcgtaagtgtggagcccagcgcgggccgcgggagaccccttctggccgcctcgggtcccgcagctccctcccttagcaagccgcggcggccgcgcatgtggggccgcgcaagtagggcagcgatcgcagccttgcatcggtggctgctcggcgtgtccgggcgccatctgtcgccggttgcagggtcgggttctcttttgtgtaaatcaagggtccaaggcttgagtcccctaattcggctcggcgctgacctgtaaaactccccttggtcggactgcgcgcttagggcctctcgcgcctgccagcctccgctctgcgggcattcctcctagcaccgggagcgcgcggctgctcgccctcgccgcgaccgtggcgccagcttcccgccccctctgccccgccctgagcatctgctctgcgccctccgctgcaaccctttatcctccgcctggattgcgggtctgggtgcggggtgttgcaggcttgcaggggacggggtagggggtggttgtgccaggctgcgaggggcccgggtcatggggttgctaactctgggaggagatgcgcccaagcttcccacctggagcgtagaaaggcctggagatgacgaagcctcctcgtgggctcggttcagaggtgagggctccctgggtgtttgttgagagccgtagagcagtacttcccgaagtccccaccggggcgcaggggaggagcacttcgctggggggcttctggagatcccgcggaaaggcgggttggtagcaggtggccagggagccaggcagcagcctcagcgttgcttgccttcttaagaaagcacagtgttagctgtaaagggcggggtccggtgacagggtggctttccttaggaagcgattcgggcaggccctccgtgctccgggaggtgaggagggccggctggggcgggactgtcggttggagcgcgtcggggcgggaaagacgtggggaagttaaggaacaaggaatccagcctggggtttcctgaaggtgcaggagggaggaaggagaggtggactctgcccttctgaagcgccagctacgggaagacaagcagtgttggtttgtatgggcggggcagatgcaaggtgggcgtttggttaacgtgatggggacgtggggacacagtccaaagagctggctgcctggcgtccacgcagagttggaagccctatgccactgggtagacgcgggtgaaagggaagccggatcgtgatggtgggcaaaccaggatccgggaagtgttggggtgcgcggatgagggggcgcgacggccagggtggccagaagagtaggtttgggagctgcccagcccggcctctaaccctgctctcttgcagaccgtacgcgtccagggcaatgacatctcacaccggcttcggctgtctgccgtgcggctgcaggacgagggcgtgtacgagtgccgcgtgtcggactacagcgacgacgacacgcaggagcacaaggcccaggcgatgctgcgcgtgc

SEQ ID NO: 35923 - DNA, 1655 bp, Artificial sequence
  DNA replication origin
cagcgacgacgacacgcaggagcacaaggcccaggcgatgctgcgcgtgctctcgcgcttcgcgccgcccaacatgcaggccgccgaggccgtgtcccacatccagagcagcggcccgcgtcgccacggcccagccagcgccgccaacgccaacaacgcgggcgccgcgagccgtaccacctccgagcccggccgcggcgacaagagcccgccgcccgggagccctcccgccgccatcgatcccgcagtccccgaggccgcggcagcctcggcggcccacacgcccaccaccacagtcgcggcagctgctgctgcctcgtcagcgtcgccgccatcgggacaggcggtcctgctgcgccagaggcacggctcgggtaagggatcgcggagagggggcgcacgcgcggggatggcgcagggctagggctgcgccgggacgccccggggggctccggacccaggacccgccccctgggcgcatttgcatatgcatactccttcctagttaggtcgggagcgccccccccagggccttcttcccgcggtttctctgtctttactcctggcctctggaagcatttctgatgtgcatttatgaatggaggagggggctgccctgccagctacctcagggtacgctggaggctgtagtgtggggaggcgacctcttttgggtttggagaactggaccctgagggctgagctccgatggtggcaaggggccagtactcagccaccaccggtggtggaaatgagctatccccagatgggggcactggcacctgctggagagcgggaggcggttaaaacttgagttgcgttggtttctattttgtgtgctcgattgaacagactttgtccaagggtgtggaggggcctggctgtgtaacctacgccctctttggctaaatgcaggatggccctaggcagcagctctgcactctgctgtaaatcgcagatcctctccctttggctttggggtgggggcagtaaggactgagccctaagccactgttaggaaggcacccagaggggaaggcttgctttcttagggagctgagaggctgggagaagggattggggatggggggcgggatgtgagaaggcagaaggaggagaaaatgatggcttgactaccccctggtaggcagctctggggcggtaggagccattggcagaggcaggggtgggggcggtggggggcggttatggagggtagaaaggcttgcccagtgtgcccctcctcccaaggcatcccccactctctccccctgctccaagctgggcctcagagcccaccccagtgcctgactgtgagcaggttgctccctcccttggcccctctcctcagtcttgtttgatgcagagtcccacagggagcatctctcctggccacatggccctgggagcctggctttgggtacaggtgcatgtgaaacttcctagatgtgatggagcacattgtcacacccctacagtggtagttctcaaagggtggtcttcctgcaggctcctggactacctgcagaatccgctggggcaggtcttcatgtccttagtgtcaccatctcatcctgcctccctggctaactctcaagccctccgacagttgagcctgcagtctgcctggcacatcagttcagttctgtctctca

SEQ ID NO: 35924 - DNA, 2450 bp, Artificial sequence
  DNA replication origin
acagcaggcctggttcattctcactgctgtttccccactgtcctatattcattggacttggtactagttcattcattcattcaatcattcatccagcaaatgtccatggagcatttttttatgtgcaggaacttttctagtcactgagggcataatgtgattaagactaatgaggtcctgagaaagtgacagaggaagagacagatattgatcaaatagtcacatagcaagtggaaattagcagccatggctggtactctaaaggagaggcccatgggctatgggagctaaaatagggagatttgacccagtcagggaagggtcaccaagaaagtgacatttgagccataatcaggaagacagttaagagttggccaggtaaagaaagaaggtagagctttccaggaagagggactcacatgtgcaaaggtcctgcggcaagagggatctggggaaatgcaaaggcctcacagaagcttactgtggtgggtgcagagaaagcaagatggggaagcaaaggggaaattaagtcaaggttagagtttactggtcaaacagggtcaaactgtaaggccttttgaagagatcaggaagctttgactttatcctaagagcagtgggatggggtttgagtggctagggcatgatgccttcagaaatggtcactctggttgcaatgtggagattggagaggtgggatgaatttgatagatggggaagaccacttaggaggcagtgatccagtcaagagatgatggggcttggaatcattggatggatgggttgatggatgtctgaatggggtgataaaaacaagtagctggtgggtgagtgaagggaaggatgtgtgaatggatgggggatgaatgggaggaagaatgaatagatgggtggatgatggaagaatgaatggatggggagaaggaagaatgagtggatgagtggatgaattggagaattaatagatgggtggaaggaaggatgaatggatgggataatgaatggatggaataataaatggatgggataataaatggatgggtggacagaaaatgagtggatgggtagatgggtacatagaagggagaataaatgggtgggtagaaggatgataagttgatgggtagttgggtggatgggtagaaggaaggatgagtgaataggtagatgggtggatggtgggagaattattggatgggtggaaggaaggataaatgaatgggtgaatgagtgggagaatgaatggatgggtagaaggagaatgagtggatgggtagatgggtgggcagatgggagaatgaatgaatggatacaaggatgacgagtggacgggtagatgggtgggtggatgggagaatgaatggatggattcaaggatgatgagtggatgggtagatgggttgatggatgggagaatgaatgggtaggtagaaggatggtgagtagatggtagatgggtgagtggatgggagaacgaatggatgggtagaaggatgatgagtagatggtagatgggtgaatggatgggagaatgaatgggtgggcagaaggattataaatagatgggtagatgggtggatggactggagaatgagtggatgggtagaagaatgataagtagatgggtagatgggtgaatggatgggagaatgaatgcatagatacaaggatgatgagtggatgggtagatgggtggattgatgagagaatgaataggtgggtaagaagaaggatgaattaatgtgtgagtgggtggatggatgggagaacgaatgggtgggtaagaagaagggtgaatcaatgtgtgaatgggtggatggatgggagaatgaatggatggatagaagaatgatgcgtagatgggtagatgggttgatggttgggagaatgaatgggtgagtagaaggaagatgagtggatgggtagataggtagatggatgggagaatgaatgggtgggtggagggatgatgagtggatggatagatgggtgaatggatgggagaatgaatggatggatggatggattgatggatgagtagattgggaatgagtggaaaaataaatagctgacgcataggtggaaagaagatataagtgggtggatgggtgaatggagagtagaaagtaggagaaatgggtaagtaggtaaaacatggatggaaagatgggtagatttgggatacaagttgaggcttgcaggatgggtgggattgggattgcaggcatgcctaaggttggagtttccagcaactgaatactgcacactcatgtcttccaggaaggaggccataggaaaaaagtctccaagtggtggtaggtcccagaattccatgccattccatgcttctgcctgcagtccctaggccactgaacctagacagaggggaagggcagagtgagtggacacagccaatcccagcctgcttccgactcccctaatccctcagc

SEQ ID NO: 35925 - DNA, 2613 bp, Artificial sequence
  DNA replication origin
ctcaggggaggagtaattgtgcatttggacagtcccacgtgtacagagacccccaggatggagctgatgtcaggggaggcctgtgtggagagaacgtcgggacggctgtttctgatgggtacattaacttgtttcacatttcctttatattgatcagcaccaattgagctgtaagtttaatcactctgtctggtggatagtgattctgtccagaaggatcatctctttttatagttaactcaatactgcagcagctaatgtcatgtgaaatactggcccagtgtgctggagagcaaaccgtacttcccagataccagtggaacggggacaatgtgtcagtaagggtgacgttgtaccagatcgttccaggggatggagggctggggagtcattccccatcaccaaaaccagatgcctctgtacaaacacaggtagtcaggtcccagcctggaagctcccaacctttagcgtgatatgcacaggggaggggcaagtgtgatgggcacagtggagggggcaggtgtgatgggcacaggggagggggcaggtgtgatgggcacaggggaggggcaggtgtgatgggtacaggggaggggcaggtttgatgggcacaggggagggggcaggtgtgatgggcacaggggagggggcaggtgtgatgggcacaggggagggggcaggtgtgatgggtacaggggaggggacaggtgtgatgggtacaggggaggggcaggtttgataggcacagtggagggggcaagtgtgatgggcacaggggagggggcaggtgtgatgggcacaggggaggggctgatgtgataggcacagtggagaagctggtgtgatgggcacgggaggggctggtgtgatgggcacaggggagtgggcaagtgtgatgggcacaggggaggggctggtgtgaggagcataaaggaggggcaggtgtgataggcataggggaggggctggtgtaatgggcacaggggaggaactgctgtgataggcacaggggaatgggcaggtgagataggtagaggggaggggcaggtgtgatgcctacagcagaggggacaggtgtgatgggcactgaggaggggctggtgtaatgggcacagggaagggactgctatgatgggcacaggagaggggcaggtgtgataggcacggggaggagccggtgtgatgggcacaggggagggaaggggctggtgtgataggcacaggggagaagctggtgtgatgggcacaggggaggggctggtgtgatgagcacagaggagaagtggtgtgatgggcacaagggaggggctggtgtgatgggcacaggggaggtgctggtgtgatggacacagagaggggctggtgtgatgggtacaggggagggggcaggtgtaatggctacaggggaagggcaggtgtaatcggcacagaagagaagctggtgtgatgggcacagaggaggggctggtgtgatgggcacaggggagggactgctgtgatgggcacaggggagggtcaggtgtgatgggcataggggaggggctggtgtgacaggcacagggaagggggtcatgtgtgatggcatggggaaggggacaggtgtgataggtacaggggaggggctggtgtaatgggcacaggggaggaactgctgtgataggcacaggggagtgggcaggtgagatgggtacaggggaggggcaggtgtgatggctacagtggaggggacaggtgtgatgggcacaggggaggggctggtgtgatggacacagggtaggggctggtgtgatgggtacaggggagggggcaggtgtaatggctacaggggaggggcaggtgtaatgggcacagaggagaagctggtgtgatgggcacaggggaggtgctggtgtgatgggcacaggggaggggcagatgtgatgggcacaggagaggggcaggtgtgatgggcataggggaagggctggtgtgatgggcacaggggagggacttctgtgataggcacaggggagaagctggtgtgatgggcacaggggaggggctggtgtgatgggcacaggggaggggctgatgtcatggtcacagaggaaggagcagttgtgatgggcacaggggcgtggccttgtgtgatgggcacaggggaggggctggtgtgatgggccctggtgagaggaacaggtgtgctttggagaaaccagctttttctgcacaaagaggattcccctcaaacacagaaaattattcctaatatctgcctcctggggacagagaacttccaggtgggaagccgagcatgaggctaagcatgttccctgaaggggaggctgaacccggcctccagcagaagttaatggaactgagactggggctgtcgtggggctggaagccaaggcaaatctctggacccaggcttccatggagtggctaccagcattcccactggtccagggccccggacacaaagaaaggagaagttaagtgcacccctaagtatccgcagtgccgatccatggggtctgggctcctgttttctggggtctcacgcactccgagaatgaggacaaagaacacttagcctgcactgtgttttatggaatgcatacaaaccagaag

SEQ ID NO: 35926 - DNA, 1656 bp, Artificial sequence
  DNA replication origin
aacaccatgggcagtgtcccagcgtccgagcagctcacattccagtggaagaaaatgatatgaaacaggcagatatggttgcactggggactgagaagtggtacacaaaacataagactgctggatgcagtggctcgcgcttgtaattctagcgcttcgggaggctgaggcaggaggattgcttaaggccaggagtttgagaccagcctgggcaacacagcaagacccccagctcttcaaaaaaacaagcaaacaaaaattagccaggcatggtggcatgtacctctggtcccatctacttgaggggttgaggtgcgaggatcgcttaagtcagggaggttgaggctgaagtgagctatgatcacaccactgcactccagcctgggtgacagagcgagaccctgtctcaaaaaaaaaggaaaaggaaatatcagacagagtaatgtgacagagtgactggttggggtgggggctgcagagctaggatgatggggccttccctgtgtgcagagctgaacgcagggaggctgcctgcagattgaggggtcaggagaaagctcgagaggaaggaatggcaggcacagatgtgcacggggacaatcgcatgcttgggggtgtagagaggcacagggtgcagcgggaaggtggaccacgatggcaggggtgggctggggtctgatctggaagggccttgatgatgccgatcaggggctggctctcattctgcgtgcagcaggaagtcgcttgtgggttttcagcgggagaggcaccccgagtcatgtttcacaaaggtcacccgggctacagtgaggccaggcgtggatgcagggaggccagcggggggctgtggctgtggctgggtgctggcaggtgggtggaagggggctggagcagcaggtggtgggagggttgcaaggagggccaccatgtcgtgatgaaaggttggtgggggcgtgaaagcaagggaggaatcaggatggctccttggtttcccgtgtgagcatccaagaggcgaggggcctccgcagaagcgcgggtggaaggaagggaagagaagggaagtccgtcatgctgtgtgcagcccaccatgctgggctgcctgttagatctccaggtggagcctggtgggcagctttctcatttcctcaacagtcacagaacactgaatacagtcagatacactctggatgagtgagggtatggcagtgaggaaaacagtcctgtccttaggaacttccgttctagctggcaggaggcagatggtaaaccaagttacacatgtgggtctggtggatctgaagtggtggacgagacagctatggagggaatggggaaagaagtccaaaggcagagctcagggcattctaacactgagaagttctgcagaggagctcccaaaggacagtgagagggagtagccagggaggcaggaggaaagttgggagtgtggggataagaggtgttccaggaggaaggaagggatgacctgttaaatgccgatgagaggccaggcaaggcagaggcggagaaccgaccactggctctggagagacgcagtcacttgagtgagagtggcttagtggggcggtggaggcaaaagaatggaatgttttccatttcatcctgctcccggcctgtcccaggaaatccttccct

SEQ ID NO: 35927 - DNA, 1500 bp, Artificial sequence
  DNA replication origin
tttgaaagcaaacagacattattcgggtcttgtggggttcagggttacttaccaggcggtgacttctgttgaatgctcataaaagctgtccttgctgatgagggcaacggtagtgggtgggcgccatgaagtggtagtggggagggggctccccaaggccacagctggtggccctctcacttgcctgtcccctctccctccccctccgtcaccccctttcccttcccttctcagctgggagaggaccgtctccagcactgggcccacctcacagcctcgcccatagccccctgccaagagagcaggcacctcttctagctccagccccacagccctacagcccatcagccctccccccgctgctcccctctcacctggtcctggcccagcaggcctgccccggcctgagccacccctctcagggtgcccaggtggagttctatttggcaagacaacctgcatctatgtgacaggtagggactgcgttcctcctatgcgctgcccgttctcagcactcggtatgcaggggtgaaccagaagaaagtcctgtctgaacacgagaagaaattactgtctagcccgtggggctcacagcctgggtgggaggcaagccaccagcatgacttgtttatgagcattccacagaagccacagcctggtaggcagccctgaatcccacgagcggcctcaggagaggactctgggttgggagatgctttgcaaaattacaaacacgggtgactgtggagggagatggggtggagacagggaaccgctttgggtggccagggcagcctccctgaggaggtgacagtttgaggtctgatggaggtagaagcaaaggcctgaggctttaaggaacaggaagaagcccatttgagaggacctgtggggaggaggccagggagggccaggaaggcctccgggcactgaggcctgggaatttccttctgagccgcacaggaggctcaggtgcggttgagtcaggggtgacataacttgctgctagtgttggacctgggtgacgggcaccagggtcccctggactattctctttccttcagtttgaaattttccactataaaaagcttaaaataggccaggtgcggtggctcactactgaaatcccagcactttaggaggtcaaggcgagaggatggcttgagctaaggggttcgagaccagcctgggcaacatagtgagacctccgtctgtacaaaaatacaaaaactagccggtcctggtgggctaattctcctggggtcaggatgatttctgtgcaggctgcagtgagccgtgaccgcgccattgcactccagcctgggcgacagagggagacaccgtctcaaaaaaaaaaaaaggttataaagtgctgctgcattttcatattacgattattgaccgctgagggtgactgtgctgtgaggcccgccggaggcaccagaaggcacaagcctcccactgcccctttccccgccaagtcccgcaggtctcgcagtc

SEQ ID NO: 35928 - DNA, 2034 bp, Artificial sequence
  DNA replication origin
aggccagggtcgcagtcccaccgggtgacggcagtcgcgctccgcgtggggcagcggcgagcggaaagggaagccgggcggggccagggggtcaaacacgggcgacagtcccgcccagccccggacctgcagcgcgcacaagctcgggcgccctccgagcgccgcgcccaagccccgcccctcccgcttcccgggctccgattggccgagccaccgcgggggcgtgtccggcggagctggccgggacccgggcggagcgggcggggacccgggctactgcggtgtggactcgagggctgggcgcggggccggcgcagaaggtgagtccccccaccgtcccccggccgggctgcgggtcgcggggcaggcgcatgaggcgagtctcccatcaccacccccggacaagcgagctctctcccgccgcgcggtcttggcggctcctgggccggcggggcgcagtgccgctgactccagcccaagaagaggcctgggaagggcgctcctgggcggcttgcggggtgaacctgcagggagcctggggagagcggtcaggggtcagagcgtccgaggcggaatccccggggaaacgcgcagatgtaagctggtggaggtaagggggtcgcgggccacccgggactgcaggggtctcagcgcacccggtcgctggtggtgtttccgggatcctggcctcgtgtggccgccgggacctctcttctcagccccagtctgcagtctggaggcctggatgggaccactgtccccctgggcaggggcgcggcggggggcgctggggtcccagttcctctggagcagttgagtttgtgattcttggtgggagctgccaagggaaacagggtcgggcactgctcccatctcagagaggaaactattgagcaggcccgcagagagaggcggcctggaatctccctcctttctcgtttccccaacacctggcgggccgtgtagggcagaggtgtggtcagcctctttgcaggtgggaaagcagagaggttccgagccacgctgaaacttgatctctgcagcccaaggggagcactcctttggaatttgaacacctctggtatctcctggccagagagggtcagaggccaaggaggtggggaggtagtcccctaatgcgctgggatcgtccctctgcacagcgtcgttcccactggagtctgttgtgagctgagatgactctctgacttcggcctgcgtccctgcacacgtcagccctccgggctgccaaaacacaggccaggcagccctgggtgaactaggggacctgcccaacccagcccaccccgaggaaggaagggggattggccagtgtggcctggagggtgggacagcccagccaagctgacggacctgctcgggatggggtgggcatcaggcatttggagcgcaggcaacacccgctggactctgacttctggagttctgatttggtctctggttgagtgcagctttccacagctcatggttattttggagccgagcttcctgatcactcagcagggaccttgggcagtgactttgatgtggtggaagtaccttccccaagggggcttttgtgaggattaagtgaaataatgaacgtaatatgcttaactttgtgcctggtgagctctaagtgctcagtcggcggcacttccagttttgttttgctttgtttttcattaccggtctcttcccggaggagggccttccaggaatcacagggctggacagagcccaggggcggcccctctggagggagaggaggcttggcgcctgatgctgcagtctcaatgcacatggagaaaacctcacatcctcacgctggcctgggagcctgcaggatgtctcctgccggcactgcaacctcatctgtcctccttgccccatcgctccttcctccgcagcctgacttcacccattccaccttgagctgctccccaggaccggagctctgcccctagatctttgcacagctgacttcaggctggagtgagttcacttcctcccaaggccttccttcctcgacct

SEQ ID NO: 35929 - DNA, 1787 bp, Artificial sequence
  DNA replication origin
ctcatggagctaagaactgagcagggaagcagaaaacacacaagcaatgaatagacaagcaaacagcaggtcctgttaaatcccacaaagaaaaacgattgaatcccagagaagtggccagcagaccttttctacaaagggccaggtggtgaatattttaggctttgtcaccatgtagtccctgtcaccaacactcaactctcccattgcagtgtggaagccaccagagacaataataaatgaacgaatgtggctgtgtcccaataaatctttaacaaaagcaggctgagggccggatttgactctcagaccttggattaccaatgcttgtcctgggtgtgggaagaggctgcctgagctggggttgtcagggagaaccctttcaaaaaggaactgagaacccgttgcaggaaggagctgaccctgggacagcctgtctcaggtaggacacaatggcaccttgccaccgatatggtggcggagttatgtgctgagaaatgggcaggctagatttgagaggtaaagatgatgagatttactcatggcttgaatattggaggtacaggaagggggagattcaaggatgtgtcctaggtctggggtttgaactcctggatgaatggtggtgtcactgaaggagaggaagaggtgcaggtctgcggaggtttgttgttggatgtgttgagtttgaggagcttattagacaagcaggtgaacatctatgctgacagccctcctagagcttggagaggccaagactggaggcttggaatggggaatctatggcatttatggggtcttcaaggtcgtgagtctggtgggctggtgtgtgtgtggaccaagcagggggcgcccggcatgagctctgagttagtgcttagtgcttagggcaccaacagaggggcctgtgtggcctcacactccactcgggacggcagcatagtgcgagctccagggcccctgcctcctagcatcgcctcagttcccctcctgtaaagtggggattctgccttctggggttgggtgggaactaaatgagatagtcacgcttggctgacaggaagcactcggcgcctgtgcttgtgatggtggtggtgactgctgcacttcctgggtggttgcgtgggttgcagggcctgtgacagcttggtttggtggatggcagagtcagggttgggttgggggtagagacacccaggtctcctggcacagaccgttctgatgtcccgttgaggcctgttccgccctgtttttcaaggctccccagcggggctgaacctctgccctctgctgcccacagtagtagccggctcagtagcactttttttttttaagagatagaatccactcagtcacctagctagagtgtagtggcatgatcatagctcactgtagcctcaaactcctgggctcgagcctcctcttgcctcagccttccaaaacgctggaaccacaggcatgaaccgctgcacctggcctaagtagcacactttatcactgccttcccatccctgtctggcctccacatcccctttactgggaaatcccccttccctccccgtagttccctgtactcccgtctaagggtcagcttccgaggtgatgcttctcagtgctgggcaggcctgcgggttactgtgcgtagtcagtgggctgcctggcatggtgggttagtcagttgggggtgggcagcgtggttctgacacccccatgcctgagcctggacatactccttgtctgtctcctcctgcagccgccagctggagacgatggtggaccacttggcc

SEQ ID NO: 35930 - DNA, 933 bp, Artificial sequence
  DNA replication origin
gaagccataaggacacagtgtccagcaaaaaggcactgggagtccagaaagagccactccccaccgctgcacctgccaccatgggatggggtcccggagccctgggcagcttctggagctgccctcttgggggcctgggcagtggagctggcttggggacagatgttctgcaggccgggggtcagctgtggaaggcagaccaggccacccccgaggcgtagaactccacgctgctgggccagtcgccgtccctgctgccctccttgtcctcgtcggagtcatcgtcatctccactggacgctccgcagatgggccgggccaggtgggctggctgccctggggaccccgcgccctgctcctccgcctcctcctgccgctgctgggcggccagttcgcggtagcagaggctgcagacgcgcacgggcttgggggacaggcgcgggagcaggaagcgctggcgcgagcactcagcgcagaccacgaagccgcacttgcggcagtggtggcgcctcgtgagggcagagaagcgcgtctgcgtgcagcgcatgcagatgtccgtggccttgtcggggatccagggtgccgcgtgctccgtgctgggcgggcggcccgtggccctcagttgccgccgcacgcactcctcgatgtggctaatccattcctggcgctccgtagcggaggcggccgacaccacaaaggacttcttggccgtcttgatcatccagcggttcttggcctgcagcgtctccggcaacagctccagtgtgacctcctccagggggatgatgtgctggctgcggtacttgcgcttgttgagcacgatgctgccatacaccaggatgtcgttaaagaggaagaagatgcgcggcttggccttcttgcggcactctttggtcagcacgccctcgcccagcagcactcggcctggcagcg

SEQ ID NO: 35931 - DNA, 3593 bp, Artificial sequence
  DNA replication origin
tttgtgtattttttagtagagactgggtttcgccatgttggccagactggtctcaaactcctgacctcaagtgatctgcccacctcggcctcccaaagtgctgggattatgggtgtgagccactgtgccccgtgaagtatgcaactttttttaaggttggttgttttattaggtcagaatcctttctggagaggcggtatcattaacttactctcccatcaagggggcacacatctcattgcatccccaccaaggagcagagtgctagtgtcttatgccttgattaatttcatgggtgactactgacatctggtttgattcattttctttgattatgaatggggttgattgatctgtagcttggctgtctctctgtgaaagacagctggaggtaatcccctatggaactgcctgcccaggggtgctgggaccccaccccagttccctatggctgacgcagttgggagggtgagcagggagtcagccacatgtggctggcggggcagctgggtggctgtgtgtccgggtggctgggtggcatggtgtccaggtggctgagtggcagggtgtctgggtgtccaggtggtggcatgtccaggtggcagggtggcagggtgtctgggtggtgggacagcagggtgtctgcgtgtccaggtgacagagtgtctgggtggtgggatggcagggtgtttgggtgtctgtgtgtctgggtgatagggtatcctggtggtggggtctgtgggtggaggggtctccaggtgtccacgtggcagggtgtctgggtggagggttttccaggtggtggggtaactgggtgtcttggtgtctggggaacagggtatctgggtatccaagtggcagggtgtctaggtggtggggtggctgagtgcccaggtgtccaagtggctgagtggcagggtgtccaggtgtctgggtggtggggtgtccggctatcttggtgtcaagtgtctgtgtgtcttggtgtcaggtgtctgggtgtccgggtgtccaggtttctgggtgtcaggtttctcggtgtctgggtggtgaggtgtctgagtgtccgggtgtctgggtgtccgggtgtccaggtgtccaggtggtggggtgtctgggtgtctgagtggcagggtgtctgggtggcagagggtctgggtgtttgggtgtccaggtgtccaggtggtgggttgtccaggtgtccaggtagtggagtgtctgggtgtctgggggttggggtgtctgggtattggagtggcagggtatctggatggtggggtggctgagtatccaggtgtccaagtgactgagtggcagggtgttcaggtggcaggatgtctgggtgtccgggtggtggggtgtcaggtttctgggtatcaggtgtctggatgtctgggtgtctgagtgtctgggtgtctgagtgtccgggtgtctgggtgtcgggtgtctgggtatccgggtgtctggctgtcaggtttctgggtgtctgggtgtcgggtgtctgggtatctgggtgtctgggtgtcaggtttctgggtgtctgggtatccgggtgtctgggtgtcaggtttctgggtgtctgggtatctgagtgtctgggtgtctgagtgttgggtgtccaggtgtctgggtgtctggtgtcaggtgcctgggtgtccgagtgtcacttggatacctggatactcagccaccccaccatccagacaccctgccactcgaatatccagacaccccaacccccagacacccagacactccactacctggacacctggacaacccaccacctggacacctggatacccaaacacccagaccctctgccacccagacaccctgccactcagacacccagacaccccaccacctggacacctggacacccagacacccagacactgagacacctcaccacccagacacccagacagctgacacccagacacctggacacccagacacccagacacctgacaccgagacacccagacacttgataccaagacacccggacatcccaccaggtgtctgggtgtcaggtgtctgggggtccaggtgtcaggtgtctgggtgtcaggtgtctgggtgtcagctgtctgggtgtctgggtgtctggatgtcaggtggctgggtgtctgggtatctagtgtttgggtgtctgggtgtccaggtttcttggtgtcaggtgtctgggtgtccaagtgtccaggtgtcaggtgtctgggtgtcaggtgtctgggtgtcaggtgtcaggtgtctgcatgtctgggtatctgggtgtccaggtgtctggatgtcaggttgtctgggtgtccaggtatcaggtgtctgggtgtctgggtgtctggtgtttgagtgtctgggtgtctggtgtttgagtgtctgggtgtctgagtgtctgggtgtccaggtgcctgagtgtcaggtgtctgggtgtcaggcatctgggtgtcaggtgtctgggtgtcagatgtctgggtgtctgggtatctgggtgtctgggtgtctgtgtgtctggaggtcaggtgtctgggtgtccgagtgtctgggtatctgggtgtcgagtatcttggtgtcatgtgtcaggtgtctgggtgtccaggtattcgggtgtctgggtgtcaggtatcaggtgtctgggtgtcaggtgtcgggtgtctgggtgtctgggtgtccagatgtcagggtgtcagttgtctgggtgtctgggtgtcaggtgtcaggtgtctgggtgtctgggcatctgggtgtctgggtgtctgggtgtctggatgtcaggtgtctgggtgtccaggtgtcagacgtctgggtatctgggtgtccggtgtttgggtttccaggtatctgggtgtatgggtgtctgagtgtcaggtgtctgagtgtccaggtgtccaggtgtctgggtgtcaggtgtctgagtgtctgggtatctgactgtctgggtgccaggtgtctgggtgtctgggtgccaggtgtctgggtgtccaagtatctgggtgtcaggtgtctgggtgtctgtgtgtctgggtgtcaggtgtccgggtgtcagatgtctgggtgtcaggtttctaggtgttgggtgtccaggtgtttagctgtcaagtttttgggtgtatgggtatgtgggtgtctgggtgtccccaggtgcctgggtgtcaggtgtctgggtgtccaggtgtctgggtgtctgggtgtcaggtgtctagtgtcaggtttctgggtgttgagtgtccaggtgtctgggtgtcaggtgtctgggtgtctgagtgtcaggtgtctaggtgtctgggtgtcaggcgtctcagtgtctgggtgtcaggtgtctcggtgtccgggtgtccaggtgtccgggtgtcaggtgtctgggtgtcaggtgtccgggtgtctggatgtctgggtgtcaggtgtctgggtgtcaggtgtctcagtatctgggtgtcaggtgtctgggtgtccgggtatctgggtatcaggtgtctgggtgatcgggtgtccaggtgtccgggtgtcaggtagtctgggtgtccgggtgtcaggtgtccaggtgtctgggtgtcaggtgtctgtgtgttaggtgtctgggtgttcggtgtctg

SEQ ID NO: 35932 - DNA, 1359 bp, Artificial sequence
  DNA replication origin
cccgggctgcagccgcgtctgatcgccgagcgcgccgcgtagacctccgctcccccaggtaaaggagcgcccggagccggggcggggcgcctcccaggccgcgccccgcgagaggagggggcaccccaagagcaggcctggagacccgggagtgccttggggagagggtccccgccctgccgggagcccggccctcccggtgccggggtggacactgttagtgtagtcattgtccctatggagaaactgaggcatggagaggctgaagtcacacaagtaagcagcagagctgggactagagtcccgggccctggctcgctgtcacccaggagtggcgtaggcatgggtgtggtgggtgggggtggggtgcgggtggtggatgtggtgggagtgggtgaggttgggtggggtggggatgtgggtttggcgggggtggggtgcggaatgtgatgggtaggggtggggtagagtgggggtggctggtggggcaggggcggggctgggggtggggtgctaggtattataaatgtgaagcggatcctgacaggacacctgtggggcagcggagctgggctgagccatatgggaagaaaatctgggcgctagtttagatttggtcaggaagggtcgttaatgctttaggaggtgagattagttttggggatggcaggtagtttgttgagcttttgtttagacagtcttgctctgttgtccaggctggagtgcaatggcgcgatctcggctcactgcaacctccacctccctcgttcaagcaattcccctgcctcagcctccctagtagctgggattacaggcgacaccaccaagcctggctaatttttttgtatttttagtagagacggagtttcaccatatcggccaggctaatctcaaactcctgaccttgcgatccacctgcctcagccttctgcaatgctgggattacagacgtgagccaccccgaccaatttttgtattttttagtagagacggggtttcaccatcttggaatagcacctgtagttccagctactcgggaggccgaggcggaagaattgcttgaggccagttcccgaccagcctaggcaacacagggagactgcgtttctggaaaaaacaacaacaacaccagcaacaacaaaaagcaggaaggaaggggagagggaaagagaaagagagagagagagaacgaaagagaaagagaaaaggaaggaaggaaggaaggaaagaaagaaaaaaagaaagagggatactttgagaagctttgaagtgatctgtttattgatcaagtagataggtaaggtgcatgctgccaggaggagctggggtagggagggcagggccctgctgtatgggggt

SEQ ID NO: 35933 - DNA, 1573 bp, Artificial sequence
  DNA replication origin
tgtccaccccggcaccgggagggccgggctcccggcagggcggggaccctctccccaaggcactcccgggtctccaggcctgctcttggggtgccccctcctctcgcggggcgcggcctgggaggcgccccgccccggctccgggcgctcctttacctgggggagcggaggtctacgcggcgcgctcggcgatcagacgcggctgcagcccgggcctggcaggccccgggctccccgcccagctccccagccccgcggagggtcgcgcaggccttggtggcggccccggcgctggccccgccctccgtcccaccttccggctgcgccgggccttccgggaagccacgcgccgggccagctcctggctccgagctgcgcccggccttagggggagccgggggtcgctgctgggcaccccctccccggtcctggcccaccccgccgctgtcaccggggccctggcttgggttgcgggtggcgtaaggagacgaggcgcccggagaagagtcctgggaaccgcaaggccgcgctcccgcaggcccagccctgcctttctcccacgcgcacgcatgatcacatccgggccccgcgcacctgcctccaggaccgcggggacctcccggagacctccctccctttggcctggaggacccctctctccccgcagcctgggcacagaagagagcacaggggcatctggaggtcaagggtgctgcgtcagtatttggtgaatgtgtgggccggagccagatttcctctgttccagagcctgctctggagcctctgggtctgggggttgcaaaaggagaagcaggttgggtgggactcgtaatcccagctgccagtgaggctgaggagggaggattgcttgagcccagcagttcgagcgtgggcaacacagtgacatcccatctctacaaataataataaaaattaggccgggtgggtgagtcatacctgtgacctacagcattttgggaggctgaagcgggaggattgcttgagcccaggagttcgaggctgcagtgaactatgatcccaccactgcacttcaacctgggtgacagagtgagaccgtctcttaaagaaagaaaaaaaaggaaaagaactggctttgctcttaggagtcttggatggggaccaaagctgaggcaaggcagcctcttaggaaggtgcaaagggcatgaggctggggttgcagaactgcctgggaatactactttattgaggcctgtggaaagctgtccctactcttgtcatgcaaggtctggccttgaaccatctcaaatccaaaagtggcttctggggggctctatagagaattaatcctaacaggaaccctgcaaagcaggcatggttgtcactgctatattacagatgggaagctctaaacacaggctgctctgcccaaggccatcctggttagaaagtttcagggcccaaactccagcctcggtctcggtatctcaaagtctccgcctgtgaccagcactctgcctgctttccagggtgccatgggcacccagaggacggacccttttccatttttaaaagaatggaacaaacgctctta

SEQ ID NO: 35934 - DNA, 1036 bp, Artificial sequence
  DNA replication origin
ggtgggtaaatggacagatgggtggataaatgagtggatgggtgggtgtgggtgggttgttgagtgaatggattggtgagtgggtggatggatagatgggtggatgtttggatggatggatgggtagatgagtgaatggatggatggatggaagggtgggtagatggatggatggatggatggatggatggatggacggatggatagatgaatgaatggatgggtggatggaagtgtgggtagatgggtggataggtgggtgggtgggtgaatgggtggatagatggattggtgggtggatgggtgagtgattagatggatggatggacagatgaaccaaataaaatagagggaataaactgttactcaggtgttaagcccctatgcaccaggaatcttgaggatgcagggagatgatgagaaagagttggagtgggggacatctccttctctttattaataagaagaatatgttataagctgaatgagccaacagatagttgctgtgcacctatgtgtgtcccgcaccgtaagtggatgtggaagaccataagagaaggaggaaaagataaataaagagaacacagcagggaaaggggaggagaaagaaaaggcaaagcccaaggctgttgagacaggatggtggagctgagggtagccaccagcagcctggaagggcagctgaagaggagagtggctgcaggagggagggcagggcctggggacactccgcccttcccacaaccacctgcagcccctctgctttggagaactaagtcttgggatgcccaaccaggagtgagtcattttttgtctctcggggacagcctgtgtcacccaaaggcccagaatctggggtagagacacgggtctcaatgtcaaggggatcaccaaccctgttggaacttcccccggcctagtaccagccccctaaacctgtgagccatgacaattcttctcaaagatagctcaaatacccacccctggggagggtcctgaagctcatgaatttacccattatttactgggcctccct

SEQ ID NO: 35935 - DNA, 1612 bp, Artificial sequence
  DNA replication origin
ctcgcaccgccccgccgcggctcccagcccctcagcggccgcgcgggacccagagcccgtcccgccccgtccctcgccccgcccccggacccgcccctccacggcgccggcccgcgaggcgcagggacggggaatcaggggcggggccggcggacagggcggggccaagtgacagggcctgcgcgccgagggccgggcgcggggcgcggggcgcgggacgcggggcggggcggcgggcgggacgcgggagaagtctggcgcgcggcggcgaggggcgggccgcgggcgccgggggcggggccgagcggcgctggagcggcaaaaagccgcgtggctggcgcgggtggaatgtaaacacggcgggcggcgcgggttcgggccccggcagggctgagccaaggggatgtgtggggggcctacccgaggagcaccgcccgccgttcctccgcgcgcgctgtcccgccaggcacgccctccccgcccccgagacgccgagttccgggccctgagtcctgggcggggacatccccaaggtcaccgcgcctgtgccttggcctagaaccaaggcttcaggccgcggggtctggggctccctgggggccggctgctattcctggccgcctgtccattcatccgtcagtgcattgggtcgttcattcattcattcaaggaatctgtgagttccttccatgcgccccttccatatgcgcccctcccccgcaagcccttcctggctctctgaagacctttctgactctgggattcccttgcaccccatctctcacttaaagccttccagttgaggccgggcgcggtggctcacgcctttaatcccagcattgtgggaggccgagacggctgatcccttggggtgttcgagaccagcctgggtaacagtgagacccccatttctacagaaaaagaaacaaaaagccttccagttgtttcgcataagggtcaaatccacactccgtgtcctaggctacaggctccacaggacctgaccctgatcccccaccctcagacctcaggcctcctctccacagctcctctgtcctttctccctcaagacttgtattttttattgtggcggggggtggggggtggcaggtagggatagggtcttgctatgttgctcaggctggtctcaaacccatgagctcaagcgatcctcccgccttggcctcccaaagtgctgggagcccagcccctacacagtcttggtgcctctctgtttcttgtctctctccccaccttgcccatcttgctcactgctgtatctgtcagttcttggcatagtgcctggaccaagggagacacttaaattgtttctgaatgaacatttgaaagacaggcactggccaagcccttgcagggcttaccggctaatgagagagacaggtaaggaacagtcatcacctcagagtaccctctgtactcagcttcaggaagatgtgcgtaaaagaaggctctggaatgctcccagggcccttcttaagctaaagtctcagtcctgtccctcaccctcccctagtgaccgttttcttgaagttagagccagggtcttatcaaagaggctcacaaattcatgattcccccaggtgctctgagg

SEQ ID NO: 35936 - DNA, 1446 bp, Artificial sequence
  DNA replication origin
ggacagggactcctggggcccagaccgcgccggggagctgggtgggggcggggtgcggccgggtcgcgggtccccgggcggcgtcgcggggcgcccgggagggtgctgagagcgcggcggggtggggtggaggggacactgaggcagcccgggccccgggaggcgacgggccggtgagggcggcgggggcggcgggaccccgggtcgggggtcggcgggtgcccgggtcgcgggtgacaggccaccccgccatcggccatcttcctggctcgcccggccgcccgcgcgcaaagggggaaggggtactgggcccgcggcctgaccccgccgccgcctcaccccgcgccgccccgcaggcctcaggccggagcagccccatcatgccgagggagcgcagggagcggtgagtgcccgcgccgcggggccggacgggacgggacgggacgggacgggtggcgtgggggaggggcggccgcgggtgctcacccggcccggtgccacccgggtccacagggatgcgaaggagcgggacaccatgaaggaggacggcggcgcggagttctcggctcgctccaggaagaggaaggcaaacgtgaccgttgtgagtacaaaagagacaggttggggagcatcccccccatctcacctgggtacccgacttggctctgcctacgggggcgggggtcccttgggcaggaacggagctcataacctgatcagctttctcttcttctctctgtttttgtcttgtttggtgtgtttccttggggtcatgggggtggcttcatgttagtttttgcaggatccagatgaagaaatggccaaaatcgacaggacggcgagggaccagtgtgggagccaggtaggtccgcccggggttgggcctctgtggaggtccttctccccctgggtcacatggggtttcatgctgtcttgtctcttgctggagacactctggtgagagtgaacttctctaatgcagccacagcccatatggcccagcactgtacctgtcagtgggcactggcctctgccagtcctgggattccaggaagcttggtgttcctgactggcaccgtctgagattacagatatgtgcctagcctggaagaaccagaatggacatcacagtattcagtcctccccttctgcccaggaggaaactgagactcagttagaggaagaaagtaacccagagtcctgtgccatccaggggcaaagttgggctctcggccttgtctgtaaaagctggtgaactgggggagggttcctgggtgtttataagcaacaactttccccctatctacacctatttttcttgtcatggtgtttaaggacctcctccgtcttctgtaggtcagatttcaaattcttctcctctttctggccctggaagttcttatagcccctccagcaattacctgcattgatccccagctcagcctg

SEQ ID NO: 35937 - DNA, 1714 bp, Artificial sequence
  DNA replication origin
gccagagacagggacctgcagctggcgacattgcgggagccacttacccgcaggtaggtttcacctttgatgagccatctgacctggagccaccaaggctcatccagaaatggtggctaaagtctttgctctactagagggtcagatgagataagatgttcagctgcaaggaaaagacaactcaaagtgccaggagaaaacaaggaattcatggattcgtatgaatgtatggattcaaacgaatggcccaggggcctatctagcctcaggcatggctggatcagggtgtttacattgctgtcctcaggaatccttgcctcagctctgaaagctgactgtgccgactttgttctccacgtggcatttgccagtagagaacagtgtctccaggcagatattcctcccagcaagtacctcctacccagactctccagcaaaagtcctggggatgcttctcattggtccagcttgggtcacatgcccatcccttctctaatcactgtggccagaggaatgcagtgctgtgattagccaggcatgtgtcaggtgtcagtctctggggcagagttggaataggtccatctgaactacctggctctgcagaaaaggggaagggatgctgggttggcaaaagcagcaagtacagaaacaataaagactctcccaaagcatgggtgactgcagagatgggagcatgctctggaacagctgcaaaaatcctgcttcccacagcaggattcttcttgctgcagttgtgtggccactgtcattcatcccctcagcgtctctaattccagcgtgctggcctctgtgccaggcccgggatatggggaaggttccgcatgaccgtgtggggaagcctgcctgccacctggcctcaggggtgggagcagccccctggggacttttcgcagttgaggtctgcctcacccctaaggcccctagtttccctctctggtgtctcttagatctccctgtgtttggatttccattttcctcttccttaaaccaacaccgtaaggtccaaccttcaggaccctgaccctggagagaaaaaaacagagaccaggaaggtcttcactagccaaagccccaggtctgggcttctcatgcacaaagcctctgtctgccacccacaaacccattcggggtagagttgccctcttgtagtggaataaaggacaagtgtggccaaacttgtttggctcttggtcctgggccgggggtggaggggagaaaacaggcattatcagagaagggcatgctgaggctggccagggggtatgtgaactgggagggggccagctggggagctcagcttccaggcccccacccaggcctatgtcgctgctctgatgtgtctcagtgagtgcaccgggcaagacgctgtttgaaggagcttccgtggaaacatccataaaactaaccttgagggaagaactgccgccctggctttactcctgtttagtcatttcattttctcacaatcctatggggtgggaatgatcactggccccattttagagaagaggaaactgagaaacagggaggtcctgcaacttgcccaaggtcccgcaacttgcgcaaggtcccacatggggcctggcttcagggcctgtgacaagacactgcatgagaagcccggggctggttgataggacttctcattaaccagctcataggactcccaaaatccaactgagggttggggccc

SEQ ID NO: 35938 - DNA, 955 bp, Artificial sequence
  DNA replication origin
ccggccccgcccctacctctccggccccgcccctacctctccggccccgcccctaactcttcggccccgcccccacctcttcggccctgcccctcccgcggcgcgcgcccggaagtgctcccgcgccctggcagcgcggacacagcggagtggctgggccaagcccgcccagggaggccgtggctcgctccagtctcccgggtggggcggggggcgtccgggcgacgtgaggccgcgctcgggcccccaacccccagcatccgccttggccaggctgcagacgcgcggcgcgggagacgcggggcggggagacgcggggcggggcggggcggggcagcgcatcacgtgggtaaacacggcgcacgtggagcgcagcctgagctctagggcggggcggcagtcccagcccttgagcccgggctgtgccggtcccaggccctggggagccggtgaggcgtgggcgcaggccggggtccgcgttggcccagctgagcctcagttcattctgttaaaacgttaataggccagcgctgtgggaggccaaggcaggaggatcgctgttggccaggggttccagaccagcctgagcaacacaggagatctcattggtacaaaaaataataaaaaatgttgctgggtgtgatggtgcccacctgtaatcccagctacttgggaggctgaggtgggaggatcgcttgagcttgggagttcgaagctgcagtgagcgctgatcgcaccactgcactgcagcctgggtgacagagaccttgtctccaaaacaatacgtaaaaaataaaaccaaactagccacgcaaacactgacgttggctcagcctgccaggccctgcccaagggaacatgataaccctgtcaggtgggcaccatcctatttcacagaaggggaaagtggaggccaaggcggttaagaaacttgcccaaagcacttggctggaaa

SEQ ID NO: 35939 - DNA, 1551 bp, Artificial sequence
  DNA replication origin
agcccgggctcaagggctgggactgccgccccgccctagagctcaggctgcgctccacgtgcgccgtgtttacccacgtgatgcgctgccccgccccgccccgccccgcgtctccccgccccgcgtctcccgcgccgcgcgtctgcagcctggccaaggcggatgctgggggttgggggcccgagcgcggcctcacgtcgcccggacgccccccgccccacccgggagactggagcgagccacggcctccctgggcgggcttggcccagccactccgctgtgtccgcgctgccagggcgcgggagcacttccgggcgcgcgccgcgggaggggcagggccgaagaggtgggggcggggccgaagagttaggggcggggccggagaggtaggggcggggccggagaggtaggggcggggccggagaggtaggggcggggccgccccttgcgggggggttctgagcggcccgcaccgcaaaaggcggtgtcagggcggtgaggggcggggcctggcaatgcacaggggctcttaggggcccgcactgcgggaggggcagggccagggcggttggtggactgggcctggctgtacgtaggtgctctgagaagcccccggcgagaggggcggggccagagcaacagtgggcggggacaggctgtgcgtcggagctccgcggggcctgcggcggggtgggtggggccagggcggcggtgggcgggccgtgctgtgcgtaggggcgctgagaggcccgcaatgtgagaggggcggggccggaacagcggtggacggggtctgtagttcaactgtgccgtggcgtcttcttcgcggcgagatctgagtgcctcgcagcagccgaaggcgggtttgcaggttgcgttgcgctggccctgccctcggcaggcagaacgggatagagcgcggacaggcgccgtcactcccagattcctctgcgtccatggcagagccactcctccttggtactccttccttgacccaccggggcccccttcctgctgtctctgcccctctagctgctgcctccaggggcttaggtctcggcccctttggcttctgggctgcccctggcagatctcgtccatcctaggttttaacgcctacctgcatgcggatgatcctgatagttctaacagtagctaaactgttttccacgtgctttctgaacattgatgctgtttggacccctgacagccacatttttacgcccccgcgcagcccgctgctctgagctccgtattccccgccggccgggtgttccacggcccttctgagtcaacgtgtgtgcagtgaagtccttcttccttctcgtttcaccctgggtctcctcctcagggagtggcatcacggtctgctcagtggcaggcaagccccagatagcgcttccgtcttgactcctcactctcctccctctgatctgtcccagaatcccatcagttcttcctccaccccacccgacccacaattctctgctacacttgtctccacggccctggtctgaaacacatgatgcttcacctggactcgtaggcgac

SEQ ID NO: 35940 - DNA, 1257 bp, Artificial sequence
  DNA replication origin
ccgcagatgcccgggcgccgccaccagatggcagcagacgctttgcgatcgagcggccgggagggcgcggggccgggtcggagcggggtcaggggagcccacccgccgcgcggctcggtctcagggccgcctcctccctccgctcccccgggctgcgccacccaggcctccaggagcccgccagagcagcaccccgcccgccctcgggcagccacctcacgctgctcaggaaggactgattggcttgggccggagccgggtcccccagccatcgaccccgcggggagggcgcggagcgggcggggactgtggctggggaggccgcggagacccctcggaccagcccagctcacccccgctacgagacgggccgtcacccacgcgagccctgaggatgctgacctggagtggcggcagagggcagagcgcgaccctgccctgtgtccccgcggcaaggcccgcgctgggccccgccgagctccaccacgcccgacgacgctcagaacccggcctgcagtgctggatgcgaggggtttgggcgagcatgggtgcaggccccgtgggcaagtcagggcgcctctgagctggccctggctgggtgttggaggtgaaggctgcagaatgggggagggtggccaggctcccacctcggggagatcacctggcccgtcaagggcaacgcattgcacgggggcacaaagatggaccagcggacactggggactaccacggggtgtgggcgaagcaagggctgaaaaaccacctactgggttccatgctcactatctaggtaacgggatcattcgtaccccaaacctcacagtacacccgtgtaacaaatctgcacgtgtaacccccccccccccaacgaatccaaaatcaaagtggaaattattattactattttaaagagcaattcaggacgggcgcagaacaggatggaggttcgagtgggggtggagggccatgacccgggagctggaatattctgcgccaggggacgggggctgagagttgagggtgcccggggacctctagagggaccctgcactacacagatcgggacactgcagccaggagcagccgcgggcacccgggcgtcaagggggaggtggaggcaagcactgggaaagcggaggaggcggctccatcgtagccttcaagaagctaaaaataaagtgcctcgcggtggacgctgtacagcccactaaaaagaatgacctcctcggcccgcgccataaaaagcccacctggccg

SEQ ID NO: 35941 - DNA, 1009 bp, Artificial sequence
  DNA replication origin
ctctcccgggaagtccccaacagcctctggctttgctcggcttctcccagcagaaaccgagccccacgtctcctgggagccagcgcgcggtggccggtgccgtgcccagggggtgacgtgcgtccctctctaactcggttttctcatctctaaaatggggttcatggaagtgcgtgccttgtggaggcttcgcaaggctcccaggttcccttagctcagaaatcaggccttacccctgaggcgcgaggctgcgggcacgaggctgcgatttggcggcagccgtatttgcacactgtcacagaattaacctcagagctggctggctgcgggtcctggagggggtgcagaaaaggggagggcgggccaggctcccaccaggagcacctgcagatcgccctgatcgtcaagagcaaggcatgacccctgcagaacgggctgtaggctcggggcgaggggggagggggaggggactgtcaccggggggggggccagaatcctctgagcctggggacaggggactgagcgaggcaggtagagccccaggcccaggcaagagctcgaagagtattagcttttgctgttgtaaaccccatggggtggtctgcaaactgcttcccatactcgctccgtcatgccctggctcggctctgacatcactggtgttggccatatcgcggattttctgtttccccctctgtaaactggggatgccaatgccagcccccactcccggatgaggtacctggtgtacagatggctcggccactctgctgaccgtgcccccgacatcattgttccccggggttttccctctaagctccaagaggttagttaattctctgccagtgtgcagagactcccacagctgcccccaaaccttgaggtctccccccatatcctcctgccttataggcaaggcctgtttcctgagccaagggaaggcgggtgtctttcctgggaaccccctccgcacgatcacagactagagagtccaaaccacagatcatgt

SEQ ID NO: 35942 - DNA, 1006 bp, Artificial sequence
  DNA replication origin
tacccatggatagatgggtggatgaatgggtggatagatggatagattcgtaggtagatggatggatagatgggtggatgaatgagtacatggatggatggatgggtgaatagatgcatggatgggtgggtgggatagatggatgaatagatgggtggatggattggtagatggatgcatgggtggatggatgggatagatgcattggtagatggatggatagatgggtggatgaatgggtacatggatggatggatgggtgaatagatgcatggatgggtgggtgggatagatggatgaatagatgggtggatggattggtagatggatgcatgggtggatggatgggatagatgcattggtagatggatggatagatgggtggatgaatgggtatgtggatggatggatggaaggatgcatggatgcatggatgcatggatgcatggatggatgggtgggtgggtgggatagatggatggatagatgggtggatggaagggtagatggatgcatgggtggatggatgggataaatgcatgggtagatggatagacgggtggattaatgggtatgtggattgatggatggatggatggatggacggatggaaggatggatgactagatgcatggatgggtgggtggatgggatagatgcatgggtaggtggatggatagatggatgcctgaatgggtacacagatgcatgggtggatggatgggatagattcatgagtagatggatggatagatgggcagaaggatgcgtagatggatgcatgggtgggtggatgggatagattcatgagtagatggatggatagatgggtggatgaatgggtagatggatgtgtgggtggatggatgggatagattcatgggtagatggatggatagatgtgtgcatgaatgggtacatggatggatggatgggtgaatggatgcatggatgggtggatgggtgggtggatgggatagatgggtggatggatgaatgaatgaac

SEQ ID NO: 35943 - DNA, 943 bp, Artificial sequence
  DNA replication origin
cgcctctgcccggccgcccctactgggaagtgaggagcccctctgcccggccagccgccccgtccgggagggaggtgggggggtcggccccccgcccggccagccgccccgtccgggagggaggtggggggggtcggcccccctgcccggccagccgccccgtccgggaggtgaggggcgcctctgcctggccgcccctactgggaagtgaggagcccctctgcccggccagccgccccgtccgggagggaggtgggggggtcagccccccgcccggccagccgccccgtccgggagggaggttggggggtcagccccccgcccggccagccgccccgtccgggagggaggtgggggggggtcagcccccctgcccggccagccgccccgtccgggaggtgaggggcgcctctgcccggccgcccctactgggaagtgaggagcccctctgcccggccaccaccccgtctgggaggtgtgcccaacagctcattgagaacgggccaggatgacaatggcggcattgtggaatagaaaggcgggaaaggtggggaaaagattgagaaatcggatggttgccgtgtctgtgtagaaagaagtagacatgggagacttttcattttgttctgcactaagaaaaattcctctgccttgggatcctgttgatctgtgaccttacccccaaccctgtgctctctgaaacatgtgctgtgtccactcagggttaaatggattaagggcagtgcaagatgtgctttgttaaacagatgcttgaaggcagcatgctcgttaagagtcatcaccaatccctaatctcaagtaatcagggacacaaacactgcggaaggccgcggggtcctctgcctaggaaaaccagagacctttgttcacttgtttatctgctgaccttccctccactattgtcccatgaccctgccaaatc

SEQ ID NO: 35944 - DNA, 1271 bp, Artificial sequence
  DNA replication origin
caacaatccgattcctttatcttttccccacatttcccccttttctattcgacaaaaccgccatcgtcatcatggcctgttctcagtgagctgttgggtacacctgccacacggggtggcggccaggcagagggagtcctcacttcccagaaggggcggccgggcagaggcaccccccacctcccagacgggaccgcggccgggcggaggcgccccccacctcccggacggggcggctggccaggcgggggctgccccccgcctccctcccggacggggcagctggccgggcgggggctgccccccgcctcccggacggggcttctgccgggcggagacgctcctcacttcccagacggggcagctgccgggcggaggggctcctcacctcccagatggggcggctgtggggcagagggggctcctgacttcccagatggggcggctgccgggcggaggggctcctcacttttcagacggggcggccgggcagagacgctcctcatctcccagacggggtcgtggccgggcagaggcgctccccacatcccagacggggcggcggggcggaggtgctccccacatctcagacgatgggcggctgggcagagacgctcctcacttcctagacgggatggcggccgggaagaggcgctccccacttcccagactgggcagccgggcagaggggctcctcacatcccagacgatgggcggccaggcagagacactcctcacttcccagacggggtggtggctgggcagaggctgcaatctcggcactttgggaggtcaaggcaggcggctgggaggtggaggttgtagccagccgagatcacgccactgcactccagcctgggcaacattgagcactgagtgaacgagactccgtctgcaatcccggcacgtcggggggccaaggctggcagatcactcgcggttaggagctggagaccagcccggccaacacagcgaaaccctgtctccaccaaaaaaatacgaaaaccactcaggcgtggcggcgcgcgcctgcaatcccaggcactctgcaggctgaggcaggagaatcaggcagggaggttgcagtgagccgagatggcggcagtacagtccagcttcggcttggcatcagagggagaccatggagacagagggagagggagactgtggggagacgggagggggagggggagggagaggttacttattttttaagaaaggcacagttgtaagaatatgtttgcttgtatagccgaaggcacattccgttt

SEQ ID NO: 35945 - DNA, 1433 bp, Artificial sequence
  DNA replication origin
gttaagggcagctgatggctctgttccccactgtccctgtccccatggcccctaggtccccaggttccagactccattgcttcacatctatctcagctccctcctccctctgagcaggaagggcagtgagtggcagggtctccatgtggcagcacatcccttccctacaacgatgacactcacatgctggcttctaggcctgccttccttcccttcgctgacagcagggtctggtgtctgctgcgggagggtgcaggggacatccttctagtcattcaggaagaccctcagaggctgccggcaagcccagctaggggtggagtgggagagtctccgaggccagccaggagtcaggacaccagggttctcatcccaggtcacagttctcatcccaggtgactgcccaggggctcagcagcctctgctatgaaaagcaagactctcccaggtcctcataggagggggctggggtagggggagagactctgggagactgcatccctctgcagtgagattactgacgcctctacccagcaaaggtattgaaccctggtgtggctggagacacggcagacagcaaacagacaggcccctgccttcatggagctgagagtctggagggagagtcagatgtaatggaataatcacgcaggctactgtaaggagggttggtagctgccgctgtgggagagctttacggcggaggggaccagtgaggtacagcagggggcttggtgggggcagcgctcagctgagctctgcagggatcatgggccttcatgaggatgggacagagccccacgctggtgtggtgatgagccgggagcagggggcgtgtagggaagagggttggaaggccagggccacactgggctgtggtggggaggtgaagatgaggtttcatgcccagagcagtggggagccactggggtgctaagtcagaggtcatgctgcctgtgagggagagagggcaccagagatgccaggggtagctggggctgccgagaagctggggttggggctgggtccagggaggagggtgcagggcaggggaggagacagcactgggacccttattgcggtggtggggaaggggaaggttgtcccacctcagagaagccttaagaatgggatggacaggtcttctgtgtgtaggtgtctccgcatgtgtgtatgtgtgcgtgtgtgcacacatgagaattcagcttcatgtctctacatgcatgagtgtgtatgtccacgtgtatatgttcatatgtgtgcattctcctgggtgctcatgtgtgtgtatgtccacgtgtatatgttcatatgtgtgcattctcctgggtgctcatgtgtgtgtatgtccacgtgtatatgttcatatgtgtgcattctcctgggtgctcatgtgtgtgtatgccttcatctgtgcctgcatccacacgtgt

SEQ ID NO: 35946 - DNA, 1149 bp, Artificial sequence
  DNA replication origin
tggcagcggcggccgggttttgtttgccagatattgttatgtctaacgggtgcctcgccggagacgtgatttgtcagccgccttcgttttcactttagcagaaaatacggcagctgcgaggtgtcccggcctgcggggctcgggcacccggtgcgtcctgggggctgggtcgtgtgcgcgggtgggagccggcggccggcggggccggggcgaggggcgagcgggaggggcggagtgagcgagcgcgcggtacggccctccggttcctcctgcgccttctcccggcagccgccgccgccgccgccgccgctgtgcaatttagcagaaatccgacaggggccgcgtttgctgagcgcatccggcggccgggcagcccgagcgggccgccgggcctggtcggccggtgtagaggcgcggagggggccggcggaggggaccggcggggatgggcgcgggaagcacgcctgaccagagcacgcgccgttccccaaccctggtgtccccggcgagttgggcagccccgcgcgccctgaccttgacgccccagtctccagccagggcttaggtgaacttggggtggggtgtgcgtgcgtgcgtgtgtatgtgcgtgcgtgtgtgtgtgtggaaggggtggtgagactgggaacgcgctgttttctttcccagtttgatactagcaactggatttttactttaagaccggctttgctctctgctggggttgggagggggggcgatcttttcccatcactcacatctttgttcattgttcactgagtggaaggcaggcgacttaaagagacgaaagagaggaaaaaggggtgagagacggagagaggaaaaagaggggggcggccagaagagggaaggagaggcgtggggacagggcccccgcccccgccggggtcgggtttgatggtgaaatagtaaacccacgcacggagggtcgccaggaaagtggacattaccgctttaattaacttcgagatgctccggcggcgggacctggcgtagccgtgacgcgcccccataaatctgcccggcccggggctgctccgagaactcgtacagtagcggcgtcagatccatcccgcgcctcccagtccggagtccatttgcataattggattttttttttttgcctccttc

SEQ ID NO: 35947 - DNA, 1042 bp, Artificial sequence
  DNA replication origin
gcccagccccggggtgttttctggcgcggtcgcggtgcaggaacgcgagccccgccgccgagcctcccgccgcctgcgttcgttggcgcggcgcccggcggtagtgccaccccgaggccgagcgctgcccccgccggcccgcggctgccagccggccctgcccgcgcccgggccccgcgagcggccgcacttcaccttacggaggggagataatgagatcaattagaggcgccgtcaccgcgccggagacagctgccgccgcatagtaatcacccgcgggctgggtgcgcgggggctccccgctacctgcgcgcctgctgctcccaccacgcggcaccgacccgggcgcgcccccggcccctgtccgcagcccacagccacaccgcgcaccctacaccctccttgcgcctctgctggggagctcaccccctccactcgcacagtgcgctgcggcccggggtgtgggaggtcccgggacttggggtgtgagtgcctgtgtgggggtaggggcaggtgtccgcttgtgcgcatatgggcatgagtgtacatggcgtgtgcctggagatgggcgagtgcaggctggaatgtgccggcgtggcacgtgtgtgggcccaaatagatgcgtgtgtgatcacatgttgtgttcgtgtttgcacctcgtgtgcctgtgtgtccgtatttgagtgcttacaggaatgtgggtggtgagtacccgtatgtgggtgctatctgcacttgtatgcgtgtgtgtgtgtaggcgcgtgtgtgtgcgtgtgtgtgttagggatacgtgtagatgtgcattagtgtgactgtgtgtgctcatgtgcctgtgcacgtgtgtttgaggtttgtgtgcatgggtagcgtctgtgagagccatgtgtatatctgcatgggtgatgagtgtgtgaatgagtgtgcgcgggtgcccactccatgtgagtgtatgcccatgtgtgtgcttgatgtcttgagggtggggacagctgctgtagcgccctctccctcaaccccttgtcctctagtggctccatgggta

SEQ ID NO: 35948 - DNA, 1418 bp, Artificial sequence
  DNA replication origin
catagaatagccacttgttccatttctgtctctcattagccataaactctgtgacagcagtgacaatgtctccttctattattactgtatccctattggatacctgagtgctggaggcacccaacagatttttggtgctattgtttaatactgaatattcttaataaaatatttatttagtggatgaagaagtaaatacatagatgaatagatgggtggtagatggatgaatggatggatggatatgtgaatgggcgggtggaggaagggagaaaggaagaaagtaagggagagaaagagaagggctaaatagaagatggttagatggatggatggatggttggatggatggatggatggatggatggatgcatggatggatggatgtgtagatgagcagatgaagggagggatgggtgggtgggaggatggatggatggatgtgtagatgagcagatgaagggagggatgggtgggtgggaggatggatggatggatggatggatgtttggttggatggatggatggttgaacggatggagagttggatggatggatgtgtagataggcagatgaagggagggatgggtgggtgggtagacgcatggatggatggatggatggatggatggatggttggatggatggatggatgaatgtgtagataggcagatgaagggagggatgggtgggtggtggatggatacatggatcgatggctatatggttgggtaggtggagagagagagaaaagaagaaaggaagagagagaaagagaagggctaaatagaaggatagaaggatgggtagatgtgtggatggatggatagatggaatgggcaaatgatgccttctatgtgctaggtgttatgagaactgtggagataagcctggacaagtctcctctagaaaggaagagggtcaagacctgatacccaaactgagagcaggaagaacacagtaggccacccccatgggctatactcttgcagggaggtggcaggagaattcagagaaaggaaaaggtaaaattcagcatccattataatattacttgacatctagtaacctttttcttgggcagtagggttcttagcttacttagggagatatctttagtcctttctagaaaaattaatgctaaagaggagaggggctactctatcttgggatctttctgatgcaacttccttgggcctggaatccatcctaaacctcttaggtcaatatgtcttgtcttcaggaggttttctgtagagccctgtttcctaaaatcctaaactctccagtagctaagggtcacctcacgtgtttcagaaaataaataaaataaaaatagtctaaaagggccttacagatctgtgctcccagtttcaggcacccgcatatcaccttcctgatgctttttgctatagagt

SEQ ID NO: 35949 - DNA, 1336 bp, Artificial sequence
  DNA replication origin
agcactcaggtatccaatagggatacagtaataatagaaggagacattgtcactgctgtcacagagtttatggctaatgagagacagaaatggaacaagtggctattctatgcccttaatgaatgaagaagtgaatgagtggattggtaaatcccttttctctgtcactgctgggcactgggacctgtggagtccaagaatgctggggtgaacaagcagttccatagatcagaggttgcacttgccaggccttcgccagctgggcttctggagtgagataacaggctctgcacagtctgctcaatgtgtccccagccgctgagggcctgcccagactgtgcgaagagcatgcaagggcagggctccctcccgggggcttcggcaggagcaaggctggcagtgacagcagctgtggcggggaacgggggcctgggagcggtcgctgcgaaggacgtcagggaggtgggggcaggtgggagggtggataagtagtaatatgatggggatttcagggggtcagacacaggcagtcccaggctccctgccagggtcaagcatggtgtcttgaaaaaaagacagggggcaagtttcccagggtctgggcagtgccctctgcacctacagtcccgggtgctttgctgggggcctgggctggccctgcttgctgtgagtatgcaagggcggccactctgaagctcagctgatgctggccaggggacactttgtttctgggccacaggacctggatgtagctcattttctttctctctgtaactctccacctgctctgggtgccctgtttctggttccagatacccttacacttcctgcactttccaaggcacacacacagtgggctgcaggggggtctggacttggagcaggagcactaggtgggtgcctggtcactctgggcttctgggctttataatgctcactgtgcaataaagaggaggccaggaatccctctctccagggcagggctgaccgagggagcacagggaatgaacctcaaacctgtgcaacatcaaacaccctggggctcccctgtcatggacagcagactggcttctttactgagcacaggtaacacagtctgctgagcacacagggatctgagtgtgggtaacaggggaatctctgggttctggggaggctgagagacattcctgggacagggacgtttggctgtagatcagagaagttacccaaggaggggatgaggaggggaggatggatgcaaaaaaaaataatagggtgtgcaaggctctctgctgagagggaacttattaaatccacacggccttctttccggaagactctggaacatcatgcc

SEQ ID NO: 35950 - DNA, 1163 bp, Artificial sequence
  DNA replication origin
gtcgttatccagcccaacaagaataaatgtgttgcaaaaagccagcctggccactggcatgtcttcatgacttaactttctgagcccctatttcctcatcttttgtattggaataacatagcaccaatcatctaagattgtataaggctaacatgagacaatgactgtgatgtacctagcagtgttggcaggtggtattttgatggagaggaggaagatgatgaagatgaggatcctgttaatgtacatagtgatggtggtggccatgatagtgatgatggtggtgatattgatgataatgatgatgatggtggtggtgatgacgacgatgatgatggtgatggtgatgatggtggtgatggtggtgatggtaatgataatgatgatgatggtgataatgatgatgatggtgatggtagtgatgatgctgctgatgatggtgatgatgctgatgctgatgctgatgatggtgatgatggtgataatgatgatggtgatgatactggtgatgatgatcgtggtgatgatggtgatggtggtgatgcggatgctggtgatggtgatgatgatggtgctggtggtgatgatgatgctgatgatggtgataatgctggtgatgatgatgatcatgatggtgtgatgatgatggtgatggtgatgatgatgctgatgatgatggtgattatgatggtgatggtggtgatgctgatgatgctgctgctgatgatgatgctgatgatggtgatgatgatggtgatgatggtgatagtgatgatgatggtgataatggtggtaatgatggtgatgatgacggtgatgataatggtgatggtggtgatgctgatgctggtgatggtggtgatgatgatggtgatggtggtgatgctgatgctggtgatggtggtgatgatgatgatgatggtgtgatgatgatgctgttgatggtgatgatgctggtgatgctggtgatgatgttggtgaagatgatggtgatggtagtgatactgctgctgctgctgatgatgacgatggtgatgacagtgatcattatggtgatgatgatggtgatagtgatgatgatggtgataatggtggtaatgatggtgatggtgatgatggtgatgatgatggtgatgatggtgatgctcttgctgctgctgctg

SEQ ID NO: 35951 - DNA, 977 bp, Artificial sequence
  DNA replication origin
tcaggtccggccggggctgcagcaggctgcctttcagctgcttgtcccgcaggatggcgcgctcctccagctcgtgcagcaggcggttctcctcgcgcacacgcccacgccccttgcccaggttgcccagcttgtgggtccgcaggtgaatcttgaggttccccttctgcgccgccctgtggtcgcagtacgggcacttgaagggcttctcgcccgtgtgcgtgcgcatgtgcagggagaggatgctgttgaagcggaagcgcttgccgcagagtgggcacgggtacttgcggttcttgcgggcgtcgtcctcgatgtcgctcatctgggacatgatgcccaggttctgcccgttgaggaactgctgcaagtccaccctcccgttgaggctggtgtccacctcccggcccagctggttggccaggagcgccatctgactgcccatgggctggccgctcatgggcacgtgggccttctcctccagggatgcggggggcttctcctcggggttgggccggggatggagctcggggaaggcatggctgagctgggaggtgatctggtgcagcttctgactcatggcatactggccgttgaggacggggccactcaggtggggctcagcttccggctccgccgaagacactccaaggcacaggctcgcttcttccatccctgaaaagagaggcagagttcagatccgtgccaggtgcggctgtggcgccatgaatcaacagcattggcgggcagggaatttccatttcatgccttacctacacataatcatgctaaggaattcttgtcaaaaacaataataaaaaaatgaattattaaatgccaattatgcaatatggcattgctcctccaatttgttttggcgacagatcgtcttccttgtattttctatttacagactgcaattattcattcacctttaaattattaatgttttaccactttcaacacctaataacaaa

SEQ ID NO: 35952 - DNA, 981 bp, Artificial sequence
  DNA replication origin
agttccgctgcgaggtgtgcggtcaggtgttcagccaggcgtggttcctcaagggtcacatgcgcaagcacaaagactcctttgagcactgctgccagatctgcggccggcgcttcaaggagccctggttcctcaagaaccacatgaaggtccacctcaacaagctgtcggtgaagaacaagtcccccagcgaccccgaggtgcctgtgcccatgggcggcatgtcccaggaggcccacgccaacctgtactccaggtacctctcctgcctgcagagtggcttcatgaccccggacaaagccggcctgagcgagcccagccagctctatggcaagggcgagctgcccatgaaggagaaggaagcgctggggaagctgctgtctcccatctccagcatggcccacggcgtcccggagggggacaagcactccctcctgggatgcctcaatctcgtgccgccgctgaaatccagctgcatcgagcggctgcaggcggctgccaaggctgcggagatggaccccgtgaacagctaccaggcttggcagctcatggccaggggcatggccatggaacatggcttcttgtctaaagagcatccgctgcagcgcaaccacgaagacactttggcaaacgccggggttctgtttgataaggagaagcgggagtacgtgttagtgggagcagatggctccaagcagaaaatgcctgctgatttggttcacagcactaaagtgggcagccagagagacctgccaagtaagctcgaccctttagaaagcagtcgggattttttgtcacacgggctgaaccagactctcgagtataacctgcagggtcctgggaacatgaaggagaagcccaccgagtgccccgactgcggccgggtgttccgcacttaccaccaggtggtcgtgcactcccgtgtccacaagcgggaccgcaagggcgaggaggatgggctgcacgtgggcctggatgagc

SEQ ID NO: 35953 - DNA, 982 bp, Artificial sequence
  DNA replication origin
tctaaaccaaagagtgagggtgggggggatcaagaaagaagaaaaaacttttaaaaaatgaccctcaacagggtgctgctacgtctttaacagtgggcaaggcagtgcctcgaggtgcctcaaactgtctttcattttctagacttaatggctgattgcagaaatcaatgttgccattagtaacagggtatttgttatggcatgatttcctctgttgttaggctgcagaatgattacagtattagcgaggtgctttctttataaagggctagagataactttcaatttactatccattagtaaggggctttggaaatatggatgaaggcaacgccttacctgctgttaggtggtgattttaatttagccgtctgaggctagcgtgttttgttgttgttgttgttgttgttgttgttttggttttttttttaaactgggccaggaagcttcataatttcacagacattttgatgacagattttctgctttgctattttagaccccaaagctgtatcagccgtgtaacacagtacaatttaagacagaacagtcatgcgtctgtgtttcaaatgcctgtacttttccaaaccatcagaggaaagtggtggggctctttaggtcacacggatctggcaggtgagccacgttgtaattttggaaggggccagaagataggtttggcttggggagggagactgcggtgcctgcatgagagaattatgggaatacgctaagggggagagaaagatggtgaagtttggaacttacacattcatacccagggatagagcagaatgccagctcctgagttccagagaccagatgatggccgacagcgtcaggcggtgaaatggggttggacaattgcaagaaaaaggtagattatgcccactgaaaaatgtaccacctggccatctcccgcacaactttcttttttctttctttctttctttcttttttttttttttttttttttttttga

SEQ ID NO: 35954 - DNA, 1144 bp, Artificial sequence
  DNA replication origin
ggcctgcaggtagaagaacgttgctggcaccgccggtgctgccttgtgcatgagcttgcagacaccatccggaagtcagctctccacccccaccccttctccagaagaggagagactcccccatcagtagacaaagagaaagagaagaaggagatctctaatcctccggcctggtcagggcagtccatggggttgtaaattaggagggctagatgattgtctgggagggcctccagaggaggggtggctgagagttttgttgttgtgggcacagagggctggagcaagcagccactttgcactggacacatgcagcaggaagcttggggctggcacgaggccctggccccacctaagatgctcttggagaaagggcccaggactcagtagaggggctgagtctgctgtgatggatgggaggaggccagcaggttcttttcttgtgattttgtgtgtgtgagtgtgtgtgtgtgtgtgtgtgtgttgaatgtgtgttgtgcatgtggggatatggatatattggtgggtgtgcttgtgctgtcttggggtggtgatgctgtatgtatatctgcaagttaccttaatttttcaggtgtaggtagctgcgggtgcatgtatccctctgtgcctgtgtgtatgtgttggcgtgtgtgtcttgggctatggctgtcttggtatgagagaggatgtgcctgtgttgagtatgtgtattgatgtgtgcacaggtgacagtgacttgggatgtgaatgtcagtatctttgtggttattgggaagtgttaggatgtggcatttgggtgtgcaattatgttgctgtgttggcatgggatggggtgtgtgttgtgtggataaggatgtgtgtgttgtgatgggtgtatccatatgcatttgcctgtgttggaatgggatagggtgtgtgttgtgtggataaggatgtgtgtgttgggatgcatgtatccatatgcatttgcctgtgttggaatggaatggtgtgagtgttgtgtggataaggatgtgtgtgttgggatgggtgtatccatatgtatttgtctgtgttggcatgggatgggtgtgtgttgtgtggataaggatgtgtttgctgggatgggcgtatccgtatgcatttgcctgtgttggaatgggat

SEQ ID NO: 35955 - DNA, 1232 bp, Artificial sequence
  DNA replication origin
aaggctttgttcttctgtgacagtcactggccacaagtgacaaggactgagtgggcctgggtgcccatggtcttctaagggctcttcacacattttcctcctaggaaacaactctgcaaaaaaggtgcactttgctcctgattttactcaagcgttatttataccatgcctactatgtgctcacagacatcattactgtcattccaatgtgaaacccagaaatagagtctgagaatgtgtgacttcagcagtgccacacatgtgccaactggaggaaagaagaaatggagggaggtaggaagaaaaggaagggagggaggaaaggaagggagaaaggaataaaaaggagggatggagggagggaaggaaggaaagagggaagaaagggagagaggaagggaaagaaggaaggaaggagagagggaatgaacaaaagagggagagaaagaaggagggagagaggaaagcaagggactagggagggagggaagaaaggagtgagggagggaaggaaggagggaggaaaaggaagagaaagagagggaaggaaggaataagggagggaggaaggagagagagaagagggaagagagggagggggaaggaaagagggagggaaggagggaaggaaggagggaggaagggaagaaagaaggaaggagggagggaggaaaagaaggaggaagggcagaagggagggaagaaaaagagaaagggaagaaaggagagagggagggaaggaaggagagaggaagagagggaaggaaggagggagggaagaaaggaaggagggaagaaaggaaggaaggagagagggaaggaagaagagagggagggagagaaggaaagagggaaggaaaagagagagggaaggaaagagggaggaaagggaggggaaagtgagagagggaaggaagaaaggagggaaagaaggaaggagagaaagagggaaggaagtagagaggaaagaggagaaaaggagggaggaaaggaaggaggcagggagtgggagggaaagaaggagggagggaaggaagagagggagggagagaaggaaggagggaggaagggaaagaaggaaggaaaaaaagggggaatctccctaagcccatttcctccgcagctctagctcccatttcccagctcatgttcacagcgacctctctaagtagcacccaagagggctgccttggccaagtctccccctttgttccctctgcacccctttcttg

SEQ ID NO: 35956 - DNA, 1132 bp, Artificial sequence
  DNA replication origin
aggagaaagaggagggagagtctgggtaagaagtaggcagcttttcctaactggtgctgccttcccaagagggggacctgacctctttccttggaaacagccctcaacaagtccctactgggtcctacctgtcctcaggtgtccagccatgctttggccccctctgtccctttccctgagaaaaaccacttggagttacagaaagacatggcacactccacagagaggcttctttccatctttacccgtgttaagataaggttcattccatgatagaggtaggcagcttcagagctcccagaagtcccagagcacaaggcagtgaaagatcctggtagagcaagaggagatggagaaggagaacctgagggcaggagaatgctctggagggagagaggagagaggaggaaagggaagaataaacggagtcagaaaggaaggtaagagagggatagggagactagagagggagaaaagaagggaggaagggtcgggggagggaagaagggaggaagagaagaaagaagagaaaaaagaggtgagagggaaggaggaagggagggagagaaggaggggagacgggagaaaggaagagcagaagggaggaatgagggaaggcaggcgtgagggagaaaggaaaggaaggagagggaaggagaaaagaaggaaggaagaaaaaaaggagggagggagagaagaagggagggaggaaaggagggagagagaaatggggggaaaagaagaaaagattggagggaaggaggaagagaggaagacaagaagggatgggaaaagggagggagggaggaagataaaaagaaagggaaaaggggaaaaagggagagggagaaaagaagggaaaaaggagatatagaaaagagagggaggaagagaagaatggagagaggaaggaagaatggagagaggaaggaagaaaggagagagaggagggaaggagtagagcagaatagagggaagaaggatagcaggagggagggaggaaggaagaaaagaaaagatgtggggagagagacagagaggaaggaaggaaaagtgtgtgatggccggtgggaagggtagacaaaggatagacacagagataggcagtggattcctggttaggatttctggc

SEQ ID NO: 35957 - DNA, 937 bp, Artificial sequence
  DNA replication origin
agatggataaaataatggaagaaaggatggatggataaatggatgcaggtggatgggtagatggatgaatgaatagaaggaaggatggttagatgaacagataagtggatagatgtatgaatagaaggaagaatgggtgaattgatgggtgggtgtgggaatgaatagagggaaaaatgaatgaaaatggatgggtgggtgaaaggaagaatggatggatggatcaatagaataaagaatggatgggccgggcgtggtggctcacacctgtaaccccaacactttgggaggccgaggtgggtggatcacttgaggtcaggagtttgagaccagcctggccaacatggagaaaccctgtctctactaaaaatacaaaaattagctgggcatggtggtgcattcctgtaatcccagctactcaggaggctgaggtgggagaatcacttgaacctgggaggcagaggttgtggtgagccgagatcgcaccattgcactccagcctgggcaacaagagtgaaactctggctcagaaaaaaagaaaagaatggatggatgaattgattggtggatggatggatggatggatgagtgaatacaaggaaggatggatcggtgaatagatgggtgagtaaatgaatggatgggtaaatagatgggtgggtgaatggatgtatggatgaatgaatagaaggaaagatggatatatgaattgatgggtaggtagatggatgagtgaatggatggatggatagatggagactgggtagattaacggatggaataagtgagtgagtgattgagtggtagggaagacagatgatagatgaaagtaaaaggattgggttgttgaggagatggaatagatgcataggttagtagatggattatcagatgagtaggtgagcaaatggaaaggatgccatgttcctcagtccat

SEQ ID NO: 35958 - DNA, 1100 bp, Artificial sequence
  DNA replication origin
tgcacagcgcggggcgccgcacacggaagcgtgtagttctccctggtcgcgcttttctcctcctttccatcccctcgctgttcttgcaaacctctgttccttcggccccctcccactgcgggccgcggcctgaactcgggtctccgcgtagccggccgccgccgctgggtcgctgcctggccctcccccgctcaggcgccgagcgctgtgcgatccgccctaacatctgtccgtccaaccattggcgcatccatcagtgtcaatgggctgcacattgcagcgacagcccgccacgcacaacacgggctatgcggagtgcacgcagcaaccatactgccatgtcgggacacgcaaaaaggcccccggcctggcttggcacagcctgaaggcctaatctgtgttctttcagccacatgtacccacccccacttaatatctggacccccaaacatgaatagttttgcagaccattgtagggatggaattgaaggaagaggggcagtgtcgcccgagtcattattttccaccaggttttctctgcccttgtgtgggctgggtgtggctaggagagaaggaagggagacttcccaaatccgcaccaagcacactgcagaaccggaagctacctggatgcaagggcttaaacccccttcacctgggcctaggatgtgttgtcgaggtcgctggccaggttttagccaggaggtctcgcgctaaaactttttggccccgcctggctgctgtgtgtgacatggcctgatggagaggagctggagagcggaggaaaacgtggatcccagtgagaactaagggccagatttagggagaaatagtgtctggatggcagtaagtctgtaattcacattttgtttacaaagggagaaagggcagggctgtaggtttgagaagccagaggtttgcgcggagttccgtgtgcccattccccgagagtgccgctcttggctgtagttgtttgttctacctgattttgcctcttgccttcaactcccccataacccctccccaaatgtccagagggcaaacatatgcgcatacctccctgatcaatccagccagaccaaagggccttccctgtcctc

SEQ ID NO: 35959 - DNA, 884 bp, Artificial sequence
  DNA replication origin
ctggaactgggaataaagaggagaaggaagatgaggaggaggagagaagtgaagggggaggaggaggaggaagagatggataagaagtagagtggagatggggaggaaggagaggaagagaaggtggagaaggagggggaggatgaggaggaaggggaagaagatgagggggaggagaaaagtgaagggggaggaggaagagatagagaagtggagtggaggcagggaggagggagaggaagaaaaggtggtggaggagagggggatggaggagagggaggaggaagaagaaaagggggatggggaggaagagaagaaagaggaggaggaggagagagatggagaagaggaggttggggaggaagagggggataaggaagagaaagaggagagggaagaggaggaggagggggaggaggaagaggaaaaggaggagggggaggaagagaagaaaggggaggaggaggaggcgagggatggagaagggggaggaagagaaagagaaacatgagggggagggggaggaggagagagtggaggaggaagaggaggaggctggggtgggaggacttgagctgtgtactttgtgcctgttcctgtggaatttcaggtggaaatgtctgtgagaagtccccttcccagcatcggagcaccctcctcaggcctagcccgctggcctgtttgcagtccccagcagggctcaggcctttgcagagctatgcacacttctgtactggccctgggaatcaccagcagagcatcctccatgttcccgggccttgcatccctctgctgtcactgcacttggcggtgtatgtgctgtcttgtgcctgagatctcttctctggccccagggatacctccttatcagccctgtcttttgt

SEQ ID NO: 35960 - DNA, 1250 bp, Artificial sequence
  DNA replication origin
aagtgagttcaggctgggggctgtgactcttgcctttaatcctgacaccttggttgctgggtgtccaggggtctggacagtcaaccaccaagtggaaatatagcaaattaatttgcttgttaatattaataataatatcaataaatattaggcaaggttttattgaacatccattgggtgccaggcagtgaatcaagctaacacaaatccctttcctcaggactcttacatgcaggaagaagatatgggttcaaagggagaagacggatctggctggaggaaaatgagctgtggctagaggaaagaaggatcgggagagagagaagagggttccagagggaagaaagagggctctggagggaggaaaataggctctggagggaggaagagggctctggagggagggaaagtgggctccggagagatggaagtgggctctggagggaggaagagggctctgaagggagggaaagtgggctccggagggagggaagtgggctctggagagagggaaatgggcgctggagggagggaaatgggctctggagagaaggaagtgggatctggagggagggaaaagggctctggagggagggaaatgggctctgaaggcagggaagtgggctctggagagggcgaagtgggagctggagggaggtaaatgggaactggagggagggaagtgggctctggagggagggaactgagcactggagggagggaagtgggctctggagggagggaaatggacgctggagggagagaagtgggctctggagggagggaaatgggtgctggagggagggaagtgggctctggagggagggaaatgggtgctggagggagggaagtgggctctggagggagggaagtgggctctggaaggagggaagatggctctgaagagagagaaatgggatctagtgggagggaaatgggctctggcaggagggaggaggtctctggggggaggggagaatgctctggaggaaggaaatggactttggtgggagggaaatgggccctggaaggagggaaatgcttcactcaaatgtttgttcccttggcctccttcttcttcagcaggaattacacgtgttcctggcaccggcctgccaaagcacaggctcattgtctcctcctaaacaccaggacaagcttccagaaccaagcctcgccaccataagaggcaactgagaccgtttcctagaatgaaagtgatccgtatgttaaaaatgcaataagcaagt

SEQ ID NO: 35961 - DNA, 1003 bp, Artificial sequence
  DNA replication origin
cggctccgggaggggaaggaggccgacggggctaggcgggaacggggccgcgccacgggccgcagcgcgccgcgggtacaaggagggcagaaccgccgcggagctttgtggaaatgaggggctggggggcgtcaacagccccggggagggggcgcgccggagaggccgggcggctgcccccgcgcccataggccccgggagctgttcgtcaacactaggccccgcctcctcccgcggttccccgcctcgtctcgtgctgcgctggccggaaggaagcggcacacttccgcttgcctggtccgcattgagtccggtctgttccggagactctgagcgcggccgcggagctgcagtggcggggagtggggtgcggatcttgtgtttgcgcacgcagtcgccggccacctcaggccggagctagagatacggctcgggataggagggcccggcggctctgaggcaggttcgcctcgagccgcacggcccggagcagcggctccgcggtggtccccggggcttgagaggggtgcgggcctgggagcccctgagggcctgatttacggaactccccctccttcctcctttctgccgttccctgctctgtggcggatgcgcagggatcagtagggacggcagcagtagggccactcgggcctgccccgcttcccgcattgcccggtttggcgcgccgcctccgggccttggcaaagccccagcgcccgattgtcactgaccagtgcttggaagtcctttaccgactgcccgtcagcgtcccgcggagaggattttgcgtctccaaagacgcccctcttccgaaaacaggctcctctgtgttctcagtcgggtatatttttctgtctccaaactagattggcagccgttttttgagagcaggtactgactgtgctttatttctagatacttttcttagtcacaccacggaaaacactaggtggaaccttttttaaaattattttttacaggtgaggctctcagtctgtcg

SEQ ID NO: 35962 - DNA, 960 bp, Artificial sequence
  DNA replication origin
ttccacaaagctccgcggcggttctgccctccttgtacccgcggcgcgctgcggcccgtggcgcggccccgttcccgcctagccccgtcggcctccttcccctcccggagccgcgcgtgaggacggctgaggccgcaggtctgtggcggcgcgccgggacgcgcgggcgagggtctaccgagagggcgggcgggcgccggcggaaccctcggctacagccccgagcccctggggccgcccctccccgccgcgtggcgcagtcggggggcgcggccgcggcgtcggggcgtcgggaggggcggagcgcgggagtgtctgccgggacgcgggccgggctgggctccggaaggaccaagtttgcggagcggcttctgctcgtcggccgtgcggcgaggcagggcctgggctgcgaccccggcggccgctcgcggtcttgggagagctggggcgcgtgcctgaacttcccggctgcccctgtccttggagacctacctgatggggacgccaggtgtgcaggggcgtggcgcgtaggtaagcggacccggtgcctgcctcgtccaggggatgctcactagagcgctaggcttttttatttttattttttagagacaggggtctcgctgtctcgcccaggctggagtgcagtggcgttatcacggctcactgcaacctcgaactcttgggctcaagcgattctcccacctcagcctctggagtagctgggaccacaggcatgcaccaccgagcctggctattttattgtatagatagggtctcgctctgttccccaggctggtctcaaactcatggtctgaagtcatcctcctgcctcaacctcccaaagcgctgggattacatgagccgcctcgcccggctagcgctagtcgtccttattaataaagaatcgcttctggtcccttttcagttgtttacaatggcattccttttgatctgatggag

SEQ ID NO: 35963 - DNA, 969 bp, Artificial sequence
  DNA replication origin
tgatgccatcatagctcattgcagcctcaaactcctggactcaagcaatcctttcacctcagcctctgtagtagctgggactacaggcgcatgccactatgcacggctaatttttaattttttttttttttttttgtagagatggagtctagcaggttgcctaggctggtcttgaactcctggactcaagccatgctctcgtcttggcctcccaaggtgttgggattacaggcactagccaccacgttttgctgagcagtagctgttacgtttcgagatcagcctggcatgaggactggtgttgaggtggcctaagggtccggtgtactgagccccggggcctgctgtcacccaggggtccgtcctttaactgggtgagcagtaggctgggtgtttgctgccagggcttgggtactcctggccttgaccattgtgtggaaggggggttctcagccacccacacgctacatagggtcgttcccagggggatagtagttttcaggacaaaatgggtggaaagagggaaaatactctttcccttcgggggaagctttggagacagcagagggtgaggaagctgcaaaggtggccagaggccagatgtgccaggtcctgagcacctagcagagaagttgagggctcacctggtggggagtgcaggggaatcctttgaggaatcctgcagagctcggcgctggaaagatcgctttgttgtgttgctggtggacaggcgtgagtgaaatccagggggcagatccaggaggcacagcccgtaggccttggaaggaggggatgcaggatgggagcaggagcagagacttcttctgaccagccatagggacaggaatgcacctggggatctgacattggatagacttacattcccaagttacacccagtcttgcctggtgacctgaaataatcttggccggcagcttccctgggagggcaggcagaggtgtctgcaga

SEQ ID NO: 35964 - DNA, 1013 bp, Artificial sequence
  DNA replication origin
agcggacgagggaggtgccgccgtcgcccaggatgggctgggaatgaagcgatgtagccttttaagtaagtgtcctcgcgctggcctcctcctgcgcctcccctcccgcgggatggctgcgcctcggggcgcggcggccgggcggggcccggagagtgaggggggaggggctccctgctctccggagtccgctcccgggtccgccaggtggccccgcgccgccccagcccccgcgtccccaggtgggtgcccggtgcgcagccggcgcgccctgcccactccgcccctcgggtctggaggaggggagcggtcggcgcggagaatgcaccctccgagcctcgctgcgtcgacaccggcgggtgtggccggggtgccgggtccggcggttcggatctggcggggcgcggggcggtcgccgcgcggtttcccggaggcctagggtctgctggaggggagcggcgggtgggggtccgagccgcgcgcgcagcggttgtggtttccggggggtgatgagggcgcggagcggggaatccctggctgccggcctctcgcagggcgggggggtctctgcattcccacaggtaaagattgttaaaggaaaactcttaagcaccgagagatgttccggattctgagtctgttccgtcttgtggttgaaaatggactgcccaggagcacacgagccacgcggtgcccccttggctgccccacgaggtgcaggggacgtgggcactcgcggcctgtgctgggcgagggagcaagggacgggtcttcgctgaggatttagagcatgcagggaacgagggctgctggcagtgctggagggactgtgaggctgcagagagctcagattttacaagttgatgggtttcatggatagaggcccctattttgattaaaaaatgcactcttcccactggccgaagagtagagcagtggatattttttttcttttctttcttttcgtttttttctttttgagacagggtctggctctgttggctagtctggag

SEQ ID NO: 35965 - DNA, 1576 bp, Artificial sequence
  DNA replication origin
aacctgcggcaggagctgcaaaagacgcgccagaaggcgcaggagctggcggtgtccacctgcgcccggctgactgctgtgctgcgcgaccggggcctggccgccgacgagcgcgccgagttcgagcggctctgggtggccttctcgggctgcctggacctgctggaagcggacatgcgacgcgcgctggagctgggcgccgcgttcccgctgcacgcgccgcggcggccgctggtgcgcacaggtgtggctggcgcctcctccggcgtggcggcgcgcgcgctgagcacccgcagcctgcggctcgaggcggagggcgacttcgacgtcgcggacctgcgggagctggagcgcgaggtccttcaggtgggcgagatgatcgacaacatggagatgaaggtcaacgtgccccgctggaccgtgcaagcccggcaggcggcgggcgccgagctcctgtccacggtcagcgccggcccctcctcggtcgtgtccttgcaggagcgcggggggggttgcgaccccaggaaggccctggccgccatccttttcggcgccgtgctgctggcggctgtggccctagccgtgtgcgtggcgaagctgagctgacggacacccgacggccgcctgctgctgccgctccctcccctgagaaaagactcgggatgggtgtggggtctggcctgtgcaaggggagtggtcctaaaaccccgtgtgtgcatgggtacacgcgcgtttccagtgcacatctgcctgggcaggacacggtttcctcttgctggcccgggaggagttaactttgcgccggccgtcagggcattaccgctaacgtctgcaggagctttattccctattaatagaaaaccgtcacagtgaccctagatccctccgagttaatgagttaacacatgtgctgttggggcgtctttacagggagtccgagttcggtgcccacccctgccagcgtcgccccctttctgcgtgggacagtttgaaaaggtgggtggggtggagtgaagtttggagagggacgctgtttggttctatgtggttggtctgtttcccggacaagaaaaattgcaatcaaatgtcagcagcttttattaccttaatctttcagggcctaaatttaggagagtgtcccgagagcagttcatacaaagggctttctctaagacgcgctacagcccttcctagcagagtttatccattcgtccccaagagcagctagaagagatttgaggtcatgacctcccactgccgctcaggggctgaccctatttaggaaaccaaagagggtgggttgaacctactctcacggacttggatccagtgcgcacacttgcctgcggaaaagggctctccccagccacccggagatgggggtaagaggaagagcagaggcttggggtagggccacctggtgtttaaacaggcactttctccttctctggggcttatttttgttcagaactagaccagagtgtttgaacctcctttgcaggagggctgggaatcctctttagagcacttaatcctatttatcccctggaatgtgcgtgctggccagtaggagggc

SEQ ID NO: 35966 - DNA, 1198 bp, Artificial sequence
  DNA replication origin
cgacgggaaagcggtgcggctgaatggcgccgggcccaggccgaagcgcggcggcccgtggtgcggcgcgaagaggcccagccagtccgccgagcggtcggccgcatccagcactccgccggagaagacgtgcgcgcccggcatgaagccttggtgcggggagcgctgcagcagcagcagccggaagccctcggccggcggcgggcgcgacggcggggtggcggtctccgggcgcgaccagccagccgccaggacgatgctggccgcccgccgccagcggctggggcccggccgcagggagctgctcatggcgcgcagcttcccggatccgattctggcgcggcctgagctccacggcaggtggcccggccctgcagggaccccagcacctccgggggcctcgcgggaattgaggacgagcctctggcgttgggtgaacctgggcgtttggtcggcaacggcgcctgcctgtgggaggggcacccgagcagggaccgcctcgagtgcactggggcccagctagggcactctcgcgggacaatgggtgtcacggcagccagcgaccgtttgtcattcacagctgcctgaaaggaggaccgcagtattcccacgcaggaagcttggaccaaaagcaggaatgcttaagggcgcatatgacttgccatggtaaaaaacaggatgccaacccaggcctgatgacatccacctcactaaaagctaaggactaggactttctgctttaaacaaggacccacatgtgggtgttttctgtgggagagggagagaggacattcgaagggcagaagtctgacctttgcaagcacacgtgaaccacaccaatgagaaatgaatggacgagccagatgccaatttataaatttcctactgcacaccttgaatgtgaaaggtactcccagagtaatttctctcgtgttctggttaccttttattgtcagggcgcctggggacggccttaggtgtcttaggacatttgacgagttccactttgatgggagatgtttaatctgggcctccacatggagatttctctccaccttgttagtgtctagaagacttccacctccaatagcaggattatgatcttttgaaaagcctgtgtaaatttgagtcttttcttttataactccttatcagtcaccgacagcttttcccataattgctattataattggatcac

SEQ ID NO: 35967 - DNA, 983 bp, Artificial sequence
  DNA replication origin
tcaccttcagcaccaggagctggagcatcctcctggcgcccgagggcagatgggccccctcgccctggaagtcccctaccgtcgcgggtgaggctggctgcgtccgccccggccaggcccccgccgcgagtgcgttccttccctccacctttagcgcctgggccccccgcggcaggtgccccacactcctcgtccccaggagccctcgcggaccccggggtcggctcgaggcaatgcgctccgtcctggcagtaaccagcccctcgctgcgggatccctgcctgcctggcctcgggcctcccgcacccaccggatgcccgcgcacgctgagcaggccttgaggcgtcggagaccacgtggtccacccaacggcccaacaacgtaaggcacagcgccacgcggtggccaggaggactgacgcgcggaggccctgggaggcccggctaggggtcgcgtgattctctcttttgcagccagcaggactgccctgcaggccccagggacactcgcctgtcccccggagggacagaggggccgcgtgcggctgagtccgttggaaaccacctttgcaaaattgtaactgaggaaattgtgatggtgaaagaaatcagacctaatcaactccatcttgcctctaacctttaagctgtccttgtttattcctgggcggaagcccaactaaccttgggaaggaattcagtccatggtttgactctgaaacaaaattgataagagcctgtgaatcctgaaaatgtgagataggtctcagttcatttagaaagtttatttggccagcagagcgaggtggctcaggcctgtaatcccagcgctttgggaggcgaggggtgcggatcacctgataaggttaggagttggagactagcatcctcgacatggtgaaaccccgtctctactaaaaatagaaaaattagcctggcatggtggggagcgcctctaatcccagctacttgggaggctgagac

SEQ ID NO: 35968 - DNA, 1151 bp, Artificial sequence
  DNA replication origin
ccacccctctgctctggcctgtcaactccttcctccagcaacgctttccccttcaccaatgagccctcactggactccaagggggaaaagcaagggtccaggcgggcgtcccttccccgaggactagaacaacgcccacgcagagcccacgcggtgagcggatagggcaacagagactgggggcatgagggaagcccggacccatgggctggggctgcccgggccacccgaccctgtccaggcgccgagcctaagggccccgtggagtacggagagcggggccctggggacgccagtgtcgcttggcccgggtgatcgagcattcggaggagcaaccaattccgcgctcctccaggtgcatcccggagcacgccagggcccgtgaaacccgggctcatccgggttctaccccagctcccagcccggggtgccccctggtgggggcgcagggagggttcaggtgggggagggcggggtggggttggagtggaggtggggtgggctgcggctggggtgcaggtgggagtggagatggggtggtggtggggtgtgtggggctgagtgtggggggatgaaatgttggggtggaggtgtgagtgggggcggtgggaataaggatggggtggggacaggggcgagggtgtgactgtggggtgggcagcgataaggaaacgggtgggagctggggctagggtaggagttgggggtgtgtggggttgggagtgggatgggttggggtgggagtggggtgggagtgggggcgtggtgtggcggcatgggatatacggggttgggatgtgtgggagtgggatggagtgtgcagcagtgagatggggtgggggcatgtgtgagtgtgggggtggagctgggtgggagtgggtgtgggaggatgtgtgggttgggggaggagtgggcgtggggagtaggtgtgggctgagagggagtggacatgggggggatgcgtgggctgggaggagtgggtgtggagggatgtggaggctgggatggggggaggggtgggggctgtgtagggttggggtcgggggtgggaggctgtgcggggctgcggtgggtgtaggaagctgtgcggagctggggtgggggtgggaggctgtgcgcggctggggtgggggtgggggactgcgtgggtc

SEQ ID NO: 35969 - DNA, 1915 bp, Artificial sequence
  DNA replication origin
ggtcctgtctttcttgaccttctctgcatgggctcttcccagaacaaatgtgggcttccgggcccttccccacccaacctaggatgcccccagggaagggcctactggggtttggtcaccttctttgacatctgatgcctttgtgtttgtgttttatgcagaacacccttttaacgtgtgtattacagttttacagattttgtcaaattccccttcaaaaagactagcaatttatactgccatcattggggtatggaaagcactgttattcccacacaatattgaatatcgttagactttctaatttctgcttgtttgctcagtaaaaatggtatttttatttttctgacttgcaaagctgtcacatgtattcatgtgattattgtgtatgtgtgaaagagggagagagagagaatggctgatgtggttattctgtgtgtgtgagagagagggagagactggctgatgtggttattctgtgtgtgacagagagtgggagagagactggctgatgtggttattctgtgtgtgtgtgagagagagagactggctgatgtcattctgtgtgtgtgtgtgtgtgtgtgtgagagagaaggagagagactggctgatgtggttattctgtgtgtgtgagagagagagtctggctgatgtggttattctgtgtgtgacagagagtgggagagagactggctgatgtggttattctgtgtgtgtgtgtgagagagagagagactggctgatgtggtcattctgtgtgtgtgtgtgtgtgagagagagaaggagagagactggctgatgtggttattctgtgtgtgtgagagagagagtctggctgatgtggttattctgtgtgtgacagagggggagagagactggctgatgtggttattctgtgtgagagagacggggagagagactggctgaagtggttattctgtgtgtgagagagacggggagactggctgatgtggttattctgtgtgtgagagagagagagagtctggctgatgtggttattctgtgtgtgtgagagagagagagtctggctgatgtggttattctgtgtgtgacagagggggagagagactggctgatgtggttattctgtgtgtgacagagagggggagagagactggctgatgtggttattctgtgtgtgacagagagggggagagagactggctgatgtggttattctgtgtgtgacagagagggggagagagactggctgatgtggttattctgtgtgtgacagagagggggagagagactggctgatgtggttattctgtgtgtgacagagacggggagagagactggctgatgtggttattctgtgtgtgtgagagagagagagtctggctgatgtggttattctgtgtgtgtgagagagagagtctggctgatgtggttattctgtgtgtgacagagggggagagagactggctgatgtggttattctgtgtgtgacagagagggggagagagactggctgatgtggttattctgtgtgtgagagagacggggagagagactggctgatgtggttattctgtgtgtgagagagacggggagagagactggctgatgtggttatcctgtgtgtgtgagagaaggagagagactggctgatgtggttattctgtgtgtgtgtgtgtgagagagagagagagagagggagagactggctgatgtggctattctgtgagagagagagagggggagagactggctgaggtggttattctgtgagagagaggaggggagagactggctgaggtggttattctgtgagagaggaggggagagactggctgaggtggttattctgtgtgtgtgagagagggagagtgactggctgatggggttattctgtgtgtgtgagagagggggagagagactgactcatgtg

SEQ ID NO: 35970 - DNA, 1038 bp, Artificial sequence
  DNA replication origin
gcgatcacaccactgcaccctagcctgggtgacagagtaagaccctgtcttaaaaaaggaaaaaaagaaatagtacatattaaagttttgaaagctaaaacaaacaaagaacaagagtcaaaatgaaggaaataaagcatgcttatatacctgctgtctaatgacctagctgcgtgtgtccactttataaaacactaatgctctgcacttattcctcttatgttctttctttcctaggatgaaaaacctccattatgtgagaaacctccaccctccccaggtatttgccttttgaattatattatgattgaaaagcttgttttggagaatatccagattaattttatctgaaaataaagattacattttctttttcttgtattagttgttgaactttcacccttgcctcaaaagagagggtccaaacactaggtagtggacgtatgtccatacaggatgtgcttgggtcctgggagggtgggggttggacctggggggacgtggacctgtgggatatgctgggatcctgggggaagggaggtggacctgtgggatgtaatgggatcctgggggtggaaggaggacctgtgggatgtgctgggatcccagtgggaggagtggacccatgatgtactgggatccgtactgggaaggcaggtgcagttatgggctctgctctgaggctgaaggcagagggagaggtctagagatgctttatgggttatgccccctgaacagtttggggagcttcagtggcttccaaaatggaggttataatttttgctgttaggtcccacattgttacaagatctttggggtgtcgcttttctggtcggaaatgtctgtggtgccagtgtgcctttgcctgagttcttgtcctgcgtccaggaagaatgaggtaagcagacaagtggagggtgagcaagacgaagaggagctttactgcatgttagaacagttcagaggagacccacagtgggtagctcctctctgtaggcaggtcgtcccgttaagtgttcagctctcagcagagaggag

SEQ ID NO: 35971 - DNA, 899 bp, Artificial sequence
  DNA replication origin
cacccaggctggaatgcagtgagtggcgctatctcagctcactgcaagctccacctcctggttcatgccattctcctgcctcagcctcccaagtaactgggactacaggtgcccgccaccacgcccggctaattttttgtatttttagtagagacagggtttcaccatgttagccccgatggtctcaatctcctgaccttgtgatctgcccgccttggcctcccaaagtgctgggattacaggcgtgagccaccacgccccgccaagaaaggcttttcaaagaatgtgatggtacgcattgcaggagtgtgtgtgtgtgtgtgtgtgtgtgtttgtgtgtgtgtagagatctgggccaagaaaagcttttcaaagaatgtgatggtacgcattgcaggagtgtgtgtgtgtgtgtgtgtgtgtgtgtgtgtgtgtgtgtagagatctgggaggcaagggtgcctggaggagagagggaatgggatccaggcacacagaagggcttggtcttgggggacggatgccatgaagtatacggcagggatgtcaggagggtgcgtgagtggcttcaggaggagagcgaagataagaaacaagtatacaggagaaaaggaaatgaaattactagggacacacagaagtgccaggaaatgggtgcctattagaggtttggggtcaggttagaattccaagggaagccttggtgagtgtcctccagcaacgcacaacctttcagatacaggccctaggggaggcagagggtggagatgagcgagtgggggcagatggaagagaactgagggtatttataaggcagtggttttgatacacaatggactttgagcagctgagggttgggaaatgctttcaggcctcacatctgtctccaggattattcg

SEQ ID NO: 35972 - DNA, 1394 bp, Artificial sequence
  DNA replication origin
atgatcacagctcactgcagcctcaaccttctgggctcaagctgtcctcccgcctcagcctccacaggtgtgtaccaccatagtaggctaatttttttttttttttgagatggagtctcgctctgttgcctcctgggttcaagcgattctcctgcctcagcctccctagtagctgagattacaggcacgcacccccatgcccagctaatttttgtatttttaatagagagggggttcaccatgttgtccaggctgttctcaaactcctgacctcaagtgatccgcccactcggcctccaaaagtgctgggattacagacatgagccaccacacctgactggcattcggctaattttaaaaatttttttgtagagactgggtctccctatgatgctcaggctggtctcaaactccagggctcaagcaatcctcgtgcctaggcctcccagagtgctgcgatgacagctgtgagccaccatgcctatttatttattttttgagaggaggtctcactctgttgcccacactgagtgtagcagtgcaatcctagtgtgtccggaattggtgggttcttggtctcactgacttcaagaatgaagcgacggaccctcgcggtgttacagtgcttaaatgcagcgtgtctggagtttgttccctctgatgttcggatgtgtttggagtttcttccttctggtgggtttgtggtctcgctggctcaggagcgaagctgcagacctctgcggtgagtgttacagctcttaaggcggcacgtctggagttgttcgtctggagttgttccttcctcccggtgggtttgtggtctcgctggcttcaggagtgaagctgcagaccttcgcagtgagtgttacagctcataaaggcagtgtggacccaaagagtgagcagcagcaagatttattgcaaagagtgaaagaacaaagcttccacagtgtggaaagggaccagagcaggttgctactgctggctcaggcagcctgcttttattctcttaactggccccacccacatcctgctgattggtagagcccagtggtctgttttgacagggtgctgattggtgcatttacagtccctgagctagacacaaaggttctccatgtccccaccagatgagctagatacagattgtcaacacaaaggttctccaagtcaccaccagagtagctagatacagtgttgattggtgcattcacaaaccctgagctagacacagggtgctgattggtgtgtttacaaaccttgagctagatacagagtgccgatcggtgtatttacaatcccttagctagacataaaggttctccacgtccccaccagactcaggagcccagctggcttcacccagtggatcccacaccagggccgcaggtgga

SEQ ID NO: 35973 - DNA, 1105 bp, Artificial sequence
  DNA replication origin
ggcggggaagggcggggacaggggcggggccgcacgtcctctcgggccagcctcagccgccgcgcctcagtccgccgtccgccctccgcgcccgcgccgctagcatgaccgacgcgctgttgcccgcggccccccagccgctggagaaggagaacgacggctactttcggaaggtgggcggcttcgggcgggcgggcggggacctgcgggctccagacctcctttcccccgggccctgcaggggccgtgggagcgcgcagtcggggtccactaggccgggagggggagggggcgcactgggccggcgctggccggacggaggctggcggggaggagtgggggcggcgatgtccccggcgtcccgggcaggtggcatccgggactgggcggggagtaggggaggcgcatgtggccgctccgcgcaggtgcgggcggaggacctggaggggtgcttgggtctcccccctcccaccccccgccacccctcgcttgcgatccctggtgcctggggaaaggacccgttcctggctgcgctggcgcccttggcctctgggcgcgttgcaagagcgcttggtgggagcgcgggtggagacagaccatcccaggcgtgttggcggtctcatatttattttaggcgctctgtcgcccaggctggagtagagtggcgcgattatagctcactgcagcctcgacttcctggcctccagcgatcctcccgccccagcctcccgagtaactgggactgcaggcgcgccacctcgccacgctaattttttgtagaactggggtatcgctgtgttgcccagactggtcgcgaactcttgggctcaagggatcctcccgccccggtctctcaaagtgctgggattacaggcgtgagccactgcgcccggccggcggtctctttttgcctccaaaatgcttccaaagtccgcctgtgggacttttcagggagcaggggagagctgctggtgggagggagcctccggcgttgcaccctcctccgctccgggtcgtccaggagggcgtgagcaccgcaggtgaggcccacggtcttgtgcgtctcactgtgtgccaaagcggatttgtcttgttgtccgggaga

SEQ ID NO: 35974 - DNA, 1318 bp, Artificial sequence
  DNA replication origin
cagcggccgggaggagcatggcccgcgggctgggtgtccctgcttaggtggcaaggtcctggcttcacgtgctgccaggcgtctgcccacagagtctagcagccagcaggaggttggtggcagactgatacaaaccctgtccccatgggtcaccctttccctcctaaactaagttcatccctactttccaacactcacttttgtcctactgccctccatcagcccgagaaaaaaagaatccaagaataataaaagagccccattttgcagcctagaaaacggaggtggttaagaaccgtgctccacggccgggtgcggtggctcacgcctgtaatcccagcactttgggaggctgaggcgggcagatcacgaggtcaggagatcgagaccatcctggaaaacactgtgaaaccccgtctctactaaaaatacaaaaaaattagccgggcgtggtagccggcgcctgtagtcccagctgctcgggaggctgaggcaggagaatggcatgaacccggggggcggagcttgcagtaagccgagatcgcgccattgcacttcagcctgggcgacagagcgagacgagtgaggatcacttaaggtcgggagttcgaggccagccttgatatcatggtgagaccccgcatctatttaaaaacaaaacaaaacaaaacaaaacaaaagctgtaatcccagcactttgggaggcaggccgaggtgggcagatcacaaggtcaggagttcaagacaagcctagccaacaaggtgaaactgtctctactgaagattagctgggtgtggtggtggacgcctgtagtctcagctactcgggaggctgaggcaggagaatcgcttgaacccgggaggcggaagttgcagtgagccgagatcgcgccattgcactccagcctgggcgacagggcgagactccgtctcaaataaaaaaataaaaaaaataaataaaaaggccgggcgcgttggcccgcgcctgcagcccctgctacttgggaggctgaggctggagcatcgcttgatcctgggaggtcgaggctgcaaagagtcgagatcgcaacactgctctccagcctgggcgacagagcgaggtcccatctcttaaaaaaaagaactgtgctcaaggacatctgccgtgtctggggcgcaaaacccctcctggtcccctctctcagggcagtccgcgagcccagcggatcccactcgtctttgcagcgcggacagggaatcggctgagttgatcccatgccaacaagcccgagtagtccgggcaaggcgctcggcggggcagtcaacgctccctccgcca

SEQ ID NO: 35975 - DNA, 916 bp, Artificial sequence
  DNA replication origin
tcgcggggctaggatgggatgtcgtggctgccaaatcctccgaggcaactcctgcctgggacggcctaccacaggatgggcctgagaatccggagcgcaggctcgggccgctaggacaccttcccccgcccgcggacccagccttccagcatcaccggggttcgcggaggagaaagaggaaaggcgtttggcctgccaaggccgccgtagcgagggggcggggcccggaagagcaggatggcggcgcgggacagtgacagcgaagaagatctggtcagctatgggaccgggctggagcctctggaagaaggtgcgggccgcgtgggccggcggagcctgtggaaaacaggccaagggcccaggattcgggccacaaaagcacaagtcggtgctggaccattgttagatcgttcccagcgctgggaacacggcgacgagggaggcgttagccgcgctctcggggtgctcaccttctgcagcgacagagagaggtttacagggacgggagacacaagcgtggccgaacaagggggcggcgagatagaaacaagaaaatgacggaatagctagtgtgagagcggggggtgctcaggcagtgtcttccccgagagaggacgtttgagctcagacttgaaaccgaggaagaaaacaaccatgagcaaatctggagggaaagcatttcaggcagaaggaacataaagtggcaaaggccctgaagtgggagccagtttaggaaattgaggggcaggcaggacgggtatggttgcagcagatgacagcgggggagacaggtagaaaagaatgtcagaggggctgacaggggctggatcttacttggtagggtaaagagtttggatcttgtactaagtgcaggattagggttagggttagggtcatgggaaattacacagggagg

SEQ ID NO: 35976 - DNA, 936 bp, Artificial sequence
  DNA replication origin
agatagaaacaagaaaatgacggaatagctagtgtgagagcggggggtgctcaggcagtgtcttccccgagagaggacgtttgagctcagacttgaaaccgaggaagaaaacaaccatgagcaaatctggagggaaagcatttcaggcagaaggaacataaagtggcaaaggccctgaagtgggagccagtttaggaaattgaggggcaggcaggacgggtatggttgcagcagatgacagcgggggagacaggtagaaaagaatgtcagaggggctgacaggggctggatcttacttggtagggtaaagagtttggatcttgtactaagtgcaggattagggttagggttagggtcatgggaaattacacagggagggatatatatatgatttttagagacagggttttgctctgtttcccaggctggtcttgaactcctgacttcaagtgatcctctcgcttctgcctcccaaagtgcagggattacaggcttgagccactgtgctcggccaatttttaatgttattctatctttgatgttgagaatacactggttggggatgggtaagagtgaagcagggagattagcaaaaagaggtcaggagatgatggtggcatggatgggacagcagtggtggtggtgtgtagtggtctgggtggagatatattttgaaagcagagctgaccatacttgctggtggaatgtgggggtgaggggcaagatgaatcaaggttctctcctgtgtttctggtctgttccacttaacgacttgacttgttcagcaagttatgtattgagtgtccagtaagggctgttggctgtgctagccctgtagggaaggcagaggaagaatggtggaatcattgggccacaatttatttgcagacctcctgttggtgggggtcccctcccttttttcaccctgaccacatc

SEQ ID NO: 35977 - DNA, 841 bp, Artificial sequence
  DNA replication origin
aattttttatttttagtagagacagggtttcactgtgttggccaggatggtatcaaactcctggcctcaagtgatctacctgcttcggcctcccaaattgttgggattataggtgtgagccactgtgcccggccaccccacacacctgtcagagaacggaagtcctggctgtgtttggggcctaggatgtcatctctctgggtctccttctcatctggaaaactgagctccatccacagagactggatggccaggtctgtgtggtcacagaggacagaaaggtgtccaggcctgggacctgttcatgaggggtggttggaagaggcaggcctgggtgcagatcagcaccccaaggtgcagcaggcaggggcaccggggatggggctgtgaggttcacatgaggttgcagaggtggctcctggagcccttctggggactgcagggcatggccagcaggcccaggcagtgcagatcactcaggagggctggggaggagcagggctgggggaaggcagtggccatgaggccaggctgcagaaggctgtgtggctggggctgggactcatgggagaggacggtcagttgtgagttttgcagcatctggcttcagggacaggagtggagggagttgaggctggttcctgggttctggtttgggtaacggggaagaggatagcccctcaccctacagacgacctcaagggaatgttttctctggtatttcctgctagggggacagatactcgcatgaagatcggaaataaagacatcagttgagtggttcttaggatggtacaggcaaaaggatttaagggtttggaacagaggatttttttgagac

SEQ ID NO: 35978 - DNA, 1123 bp, Artificial sequence
  DNA replication origin
cctttctccatcttcaagagtgacacctcttctgaaatgttcacccaatgcgtgttctgccggatagatacaaggggcttgccagcagatacttcatcgtcatcatcatcatcggaaagggagaactcaccgccgccaaggggaagcaaggatgactgacagccacaggcccctttgagtgactccagcacaggctacctagcatgtaggtttcggggctttgcaggggctttctcttgggcccctcccaggctcagcaggcctgtcagactggggcaggacccaagccctggctggactcagcacagtgccacctcctcagctctcagcttggggagtgaacactttccgttttcatgcagaataaatctaattcctttggaaaacaagcgtgcatgtgcatctgaaaagcagtcttgctatttctaagctttatgtcttggtgctcatcctgtttgattcttggaacacatattagactcacattgtggagtctggagttgccctgtaaggtgacctgtgggggctggcaccagcagttctggagagtttgtcaaatgagtatgacaaggtgtggggccccctctgtggacgtgatggcaagacacaatgagtgcctccctggctaatgctcccagatggccacttgcccggagcagaggacggtttggttaggcaagggggtggcggtggcattgccatcacgggatgtctcacgctttctcctctagacgtcttaatttccagaaccccttgcttatgtgcagccctcttcctgctgccacggcattttgcacagcgtgcatcaatccagaaataggctgagataggagcttagtttcctattgcacaccatgctgggtgaacctttctgtgcatgctgcagggatgctgggtggatgggttggcagtgttcggcttcgtagttgcccacaggccctctggaaagtgcggagaccagtggctggtgtagttgcgtgaggacacccagaaggggtcagtgagaaactagggaggggagggccttgcctgctctggcagcagaaacccctccatgtaaggtgttggtgctccacgccagcagcctgggaaccctgaagtccacgatccctcctgagccttc

SEQ ID NO: 35979 - DNA, 1198 bp, Artificial sequence
  DNA replication origin
cgaggcgtctttgtgcggtggcggtgcaggcccgtagggcgcgcgcggccacatcggccgcggcgtcacgggccctgcgggggctcagcggcggccgccagggaagacccccgcccgccgctgcccccgcgccccgggagccccgccgcggccggcctgggcccggggacccccggcgcgcccatgccccgcggcgcgcagcccgcccggccccggcgtccccgggccgccccgcgctgcgcccagcccgcccggccgggtgccgccggtagagcgtccgtgggtctgtcagtcctcccgcccggcccctcgcccgcgcccggagcctggaggccgcgctgcgccagccacgtgacgcgcccgccgagccgcagtggcgctggctgggcgggcggaggcggctggggcgggccgggggcgcacgccccgcctcggggtgctggacagctctgcgcaccagccccgccccgcccgcgccccccgccgcgctccccgcgctccagcccagtgctccaggcagccggtgctcgcctggcctcctcccgggcccacgaattgatccctcctggagccggctgtgctgaggaggaccggggagcgaggactgggaaaaggtgggagagagaggacggcttagggacctcataggggtggcacaaggctaaggcctgtcttcttcgcaaggtgtccctgttcctgcccctccgcttctttcatttgccacagtccaagtgccctgtcacgtctctaagaggaaccccctgtgccaagcaagacctgtcaggggacattggtgaacacaccagaggcctctggagatctcccagggccccctgagcccaccctgttacccactatcctcgtgaggctggggacttgggaggaggcctgcttcttaggctgggggtgccctctggagagctgcccaccaagaggttgagtccaatgaggcaagaaccaggagagacagggggaaggtttgagaaggccatttagggccaagacggatgtgaaatcagaggtccccaaaggctccatggcacagcgggcccaccaacctgagctgaggctcccaacccttttctaacacccccagaccctcatttgatattctccgtttatggagagaaggttgagagaaactgatggtccgttagtgaaagcgtagacagtcactcactcactcgcactgtgcagg

SEQ ID NO: 35980 - DNA, 1037 bp, Artificial sequence
  DNA replication origin
cgagccctagcccgagcccgagcccgagccgcagccagagccagagccggagccgcagccggaaccggagccggagccgcggggcaggaggcggcgcccgcgggcggccgggcccggcatggagaagcgcgcggccgcggggctggagggcgcgccgggcgcccgggcgcagctggccgtcgtctgtctgggtgagtgggccgcgcgggccgggcaggtccgggtcccccgcatggcagtccgcgccgcgccctgaccgacctcctctccggccgcggcatcccgagccccccaccgcggtggctcccgcgcggagacccagagaggggccagcaccgcttgcccgcctggccccgggcctgggagggcgactctggtggcgcagccccggctcccgccccgctcggagtagcgcccggagcccgggctgagcgctggcaggaggcccttcgtgcaggcggcagccttcaacccggcccgcccgcgctgagcctggagacgagggggccccgggagctggggacaaaggccaggccggctgtcccctgaagaagaaactgtttccggcccggagttggggtgggggctggtgtaagccgcagatggggactcggggtgcggggcagggctggaggagggtgccagtgtggaggcggcttccaggggactcctgttttccctttgtgtctctcagcccccaggcaggcctgttcagtttaggagggtgcttgggttgggccagggaccggtcaaggccaggcatggggtgggaggggctcccgccctgtccgggagtttttctgtccagctttccagcgctctgtgtaggcgagaggaggagttaaatccccaacccacatggctcctttatttactgtgatgaaggagggaggccattataagaactgggggtcattaggggacaccctgtgatgtcaccagtgagggctctgtaacctgacaggtttgctgaagccactgaaatgacaaagtaatcacccccaggcctcagggagctccgaggctctggcaggccc

SEQ ID NO: 35981 - DNA, 1505 bp, Artificial sequence
  DNA replication origin
agttggggtgggggctggtgtaagccgcagatggggactcggggtgcggggcagggctggaggagggtgccagtgtggaggcggcttccaggggactcctgttttccctttgtgtctctcagcccccaggcaggcctgttcagtttaggagggtgcttgggttgggccagggaccggtcaaggccaggcatggggtgggaggggctcccgccctgtccgggagtttttctgtccagctttccagcgctctgtgtaggcgagaggaggagttaaatccccaacccacatggctcctttatttactgtgatgaaggagggaggccattataagaactgggggtcattaggggacaccctgtgatgtcaccagtgagggctctgtaacctgacaggtttgctgaagccactgaaatgacaaagtaatcacccccaggcctcagggagctccgaggctctggcaggcccttgccccagctgtgtgagcctggctcagtgggaatgtgccattggggagcattgagggtgtaaccccagcgcgcccaccccaacctcagtgcggggtcatgtgtgctgggctctgagctgctgggtgctggcatccctggtgagcagagcagggggacaggcgctccatgcttaggagctttggcctggctctgtccagggggcctgggtgtcctgggtgggggcagcggttcctgcttcctggccaggcgggatctgacacacatcctgaaccccgggaagttgggtttccccccaccccccgactctgggcccgtaaccccccgggccagagcagaaggtgaaagtaagggccaaaccccacggaggtgggtgcttgaggggtggctggggagttctgctttcctcctcaaagtcagcttggcacgggggaagaggatggttccgtcactagctgcgtgccctgtaaatggggattatcagaactgcctcccctcctgcctctgctgctgctgggcgagcaaagccccttggtagggggaagcccttcaaagttgtaggagcaggccagggtgcggtggcaggtgcctgtaatcccagcactttgggagaccaaggcaagagaattgctggaggccaggagtttaagaccagcctgagcaacacagtgagacctcatctctacaaaaataaaaaataaaaaaataaccaggcatagtggtgcacacctgtagttccagctacttgggaggctcaggtgggaggattgcttgagctcgggagtttgaagctgcagtgagctatgcactccagcctggataacagaacatggaggcagggaggtgggggtgaggtggtagggaccctcttgatgggcagtcttgggctgcgctctgggccttgccctgtaagaggaaggggaccagcgggccagccttgggtttagctgtggtgtccctcatgggctgctgctggtccccagcaggtatgtgggacccctgaccctttctttgtatctcccacagtgaacatctttctca

SEQ ID NO: 35982 - DNA, 939 bp, Artificial sequence
  DNA replication origin
gggccatgcatgagttccaggtggagaggtgctggcttgcacctcactgacctgggactgtcaagggtctgatggtgacgcagtggtggccagccttgctttaggaccaagagttctgttcttatccttgatgctctcacgagctgtccgtgggggttactggctccctatttgtcacagtcccgactcacctgggccttcatggtcctagtaggcccccaggggaaggggcttcagctctcagctcatggctccagctgcccagcaggtcctcagatggacccgtccactcagggacccacatctctggagcacctgccatgcattaggcactgtgcagggccctgggacatggcacggccctacctgcctgtgtgatgttcatccatcagtcccaacaacaaaagggaaatgctctgtggccgaggctggggggagggatggagggttggagctctgtgggggctatcccggagggcttccctgggaagggaccttggagctaggggtggaagctgaggagtccgtgaatgggataagaaggtggggatagcacccactagggaccaccagggcctccagggcaaagtcccctccaatgtgagagatcggagaggtccggggggctaggggttatgggagggatgaggcagagtgtggggcagggagggggctggcgctgctgtagtgaattgtggttttgtcctaagagcatgggaggcagccagagggctctccttcctttcctgcagctgggtgccagagagtcttgctgagaaccagagagaacttggcttgcaaggtcacggtgccaggggccagccatgggagagtgaggagagagtgtcactgggctcgggaaaggggtcgtccctcacctcagtttttccatctgcaaaatgggccctgccttcatctcaggctgttgtgagaatcaga

SEQ ID NO: 35983 - DNA, 745 bp, Artificial sequence
  DNA replication origin
gggatagcacccactagggaccaccagggcctccagggcaaagtcccctccaatgtgagagatcggagaggtccggggggctaggggttatgggagggatgaggcagagtgtggggcagggagggggctggcgctgctgtagtgaattgtggttttgtcctaagagcatgggaggcagccagagggctctccttcctttcctgcagctgggtgccagagagtcttgctgagaaccagagagaacttggcttgcaaggtcacggtgccaggggccagccatgggagagtgaggagagagtgtcactgggctcgggaaaggggtcgtccctcacctcagtttttccatctgcaaaatgggccctgccttcatctcaggctgttgtgagaatcagatggaccagcgtggggaagggtcagggtgctgtggggtgggaggtgtggtcaagtgcaggggccagccgcctggtcctgggagggtcagggcacagcggggcagggcaggctcaccacactgccctggatggtttagaagcagagagcatggagaatggatggattaaagcgaggcccatggggctgggcatggagggctcctcctttgagctggcgggcgtgatgctttgctcaacctgagcggtatacagttggcactccatgagtgcatgctggctcagtgctgcagcaagaagctgaggcccccagaggcctacagtgattcctgactctgcccctccctaactgtgtg

SEQ ID NO: 35984 - DNA, 1690 bp, Artificial sequence
  DNA replication origin
gtaggtgtgtgtgcatgcagatgtgtgtgtgtgaggtaggcgtgtgtaggtatttgagcaggtatgtggtgtgtgcatgcatgtgaacacatgtaagtaggtgtgtgtgcatatgtgtgtgtgtgcatgtatgtgaacacatgtgtgcttgtgtacatggaaaagcccatgtcggagaagacataaaggacacatgtgagagactgcatgtgtgagcacatgtatgtgcacgagccatgcctgcaaaggtgcagagagcgtgtatgtgcgcatgcatgtaagataacaggtgtaaccatgtgtgaaccgtaagcatgtatgtgcacatgtgaatgcatgcacgcaagtgtgtccagtgctctgggtctccacgggcctctgtggcgaggtgcccaagctggacctcttcctggtttgagcctcgttcatggggtgtggggggtctcagtcactcagctctgccaggaaggcagggccagcacacaggccactgggaacacagcctgggactggtgggcatggtctgatgtctctgaggtggcagaggtgtcctctctgtcctgcaggggtggctgggggccaggctggcactgagcccagagcatggtttctggagggggccttggggaggggagtgaatcaggcaaagcccgggtgcttgagctgcagggacatgcagagggaaagggggccaggcagtgagcggtggtcctggccaggggtggtcacagggacatttggctggggagtcactataggttccatctgccatagttttcctaaatgccagagcccaaaaagcgcaacccctgacttactccatagctgcaatgcgtgaggatgtgatgggcatgggcagggtctatcctagtctctgtgcctcagtttccccaagggccaggtggttcagggccagtgtatctccggagatgacaagctgtcaacctgctgcagccttagccagccccgtgggcagtctcaccctcacttcccatgcctgggactttgtgctgggcccatcccagtggtcccgaggtggagggttctgggcccttgggccactgcccttttggggagggtgtcggggcagggggctcttgacttcctgctccacttcggcttcgggctgggggtactgtgtgcactgatggagggaaggggagccgcagcagagctggaaatgacctgcgtggatgtcgcaattcttcatggagcctcccgtgcacacctggatggggacagtgtggggacagagtggctgggagtggaggaaccaggcagtctggaacatgaggagtgggggcagccggccgggacagggctggctgtcctggccgtggctccagcctgaccactccctgctggtcctcggccatggagatcccacctactgcctcatgtctgggtcctctccgcccccccgcagcttccgcaactttgacgtggaggagtcccaccagtgctccctggactggctcctgctgggcccagcagccccaccccgccaggaggccttccgcctctgtggctccgccatcccacctgccttcatctctgcccgcgaccatgtctggattttcttccactcagacgcctccagctccggccaggcccagggcttccgtctgtcttacatccgaggtgatggaggctgcagggcaggcaggacaccacggagcacaccgtgcat

SEQ ID NO: 35985 - DNA, 1265 bp, Artificial sequence
  DNA replication origin
aacagggcctcatcatcgctggcctccagcattggggagcaggggggcggggggttcctgcagacccccagtggctctggcgagtgggggcccagggtgctgctggcagtggagacctgggggtgcgggtcctgggctgagcagggctcccgaggtgcatctgcaggagctgggccgtctaccagtggctccctgcagacctttctgtccttgtccacgggcctgcactctgggtctcgcaggcccgagggcaagggtggccctgaaggtcccacctccggtgcacggccgggggcactggggggcctgtctccggccgccctggtgctgcctgtgtccatgagcggtgctggggggtcgggggcagcccctggagcaggctggaggaagccatcgcccagcacggtctgtgaggggcgtgctgcggtcagcagtgggatctggcctcggggcgcccgcggccggtgaaagagccggttccagaggcggccgaggcggcggcgggagggcccccggcgggaggcgtgccgacgcatctgtctccgcatggctgtgcgaagattctgcagcacagaggcctgtggggtggagcagggtaggggcggggggatgcggctgagggggcagacaggctgctcaggggcaggagacagcacacccccaagggacctgagacccgagagaccaccttgtccaccccccccacctggccatgggccctcaggtcaccctgcgcaggccttgcctcctgctcctgtgacccctggaccagcctcctccgcacactgtcccaagtggccccggaggggcctcacgccctccgggggctcacctgggacgcactgtagacaggaaagtcctccacgggtggaatgaggccctgggcgatgagctgaccataggatgggggtgcctcccgccgcacgaactcagcctccaggcgcgtcatctgggtctcgaaggccctagaagcagtgggcggagggcgacatgactgggctgcccgggacctgcagcaggaacaacaacaggattccaggacgaccctccacccagacaccccaagatatagggaccccagtgtgcaccagggcagcctccatgtagctagtccaggcccccgtttgcaaacccacagctacggggacagcaagcctgggtgatgaagaagcccggtcccctggctgcgggcacagcgcccacctgtattcctgcgtgcgcagtgagtagagcttgaaggcgcagcccagcgcgatgaccagcag

SEQ ID NO: 35986 - DNA, 1527 bp, Artificial sequence
  DNA replication origin
agcaccgctcatggacacaggcagcaccagggcggccggagacaggccccccagtgcccccggccgtgcaccggaggtgggaccttcagggccacccttgccctcgggcctgcgagacccagagtgcaggcccgtggacaaggacagaaaggtctgcagggagccactggtagacggcccagctcctgcagatgcacctcgggagccctgctcagcccaggacccgcacccccaggtctccactgccagcagcaccctgggcccccactcgccagagccactgggggtctgcaggaaccccccgcccccctgctccccaatgctggaggccagcgatgatgaggccctgttggtctgttgaccgctgggctcgctggtgaccgccacagccccgctttgtaaccagggaatacacagtcatttctaccctgcctctgcgtcctttcttatggagaggccctccggggaccccagcggaggggctggcccctaagccagctggctgcactggtgggcgggagctgtgggactgaacggcgggggggagaagagtggagtggtgagcccgtctgcagggtcccattgtacacaagcaccctggggtctcacttctctccccccactccattctgggaacccatttccagagaagcaggggaccagagcctttttgcttcatctgccctgcagtggcaacagctgcccctagagctgggagttgtcatgaggatggggccgggccatggggacgctgggtctcatccgtggtgactattttgctcacgcctcaccctcttcctgtccagcaaggcctctggaggacctgggttgggtggctcctgccaaaccctcatgcccctggccaggcaggcgccctttgccctccctgaaggtccaatctcctgggcaccgtggaagggctggggtgtgtgcctgctgtacatgaagcccctggagttccctgcaggcctcaaagcccccaggacatgctgctctgtgctttctggggacagagaggccgaggcaccaacagcagtggccacgtctgttccatcctatctcagggcctcggtttccccacctgtaagccagggtgagactgtgggctctgaagtcctgaccttcactctgtggtgatttacgggaagaaagacaatcccagcctggagcccctgagctctcctgggtggccgagctcagactggcatcgaggggcctggggtaggggcggactgagctgctaccccatcctcgacatccctttagggcagggggactctgggtgccatggtagggagcgcctgtgtcaagcagcaaagccccctaatgtcaagagcctcctccagggcctgccacggcatcttcctggccagcaacatgtgtgcacccaccgaggtacgccccagccactcccatctgtgcccatcagggactccccatagcacgagcgaacagccagccctgtttatttataggccttttcaggaagagctagcagggcagtgctaagacaggaaacccagtcca

SEQ ID NO: 35987 - DNA, 1180 bp, Artificial sequence
  DNA replication origin
cgaggggcacctgcccagcctgctggccatgatccacgtcagacactgcacccccatccccgccctcctcgtctgtgtaagttgggggacctgggccaggcagggcgtggaggcagggctacccggcaatgcaggaccttccgggtaatggcaggggtgagccattccagggtgggggttgggggtggggccagggctcatcctgcaggggcgtcaggaggcaggctaggggccagccgtcagccccaggtcctctcccagtgcggggccacagccgtcatcatgctcgtgggcgacacgtacacgctcatcaactatgtgtccttcatcaactacctctgctacggcgtcaccatcctgggcctgctgctgctgcgctggaggcggcctgcactccacaggcccatcaaggtgaggccctgggacagctggccctgtgccgggtgctgccagagccacccctgcatccacagtgggcaccaggggcaggtgggatgggaggtgccagcttttgtggagtgttgggccctgctcagggctctctgtgcactgaggcagccattcctcatagcagccccatgaggacagagctttgaatgctcccagtgtacagatggcgaaaatgaggctcaggactgggcacaggggctcatgcctattccagcactttgggaggccgaggtgggaggattgctggagcccaggagtttgagaccagcctgggcaacataacgagacttcctctctgcaaaaagttaaaaataaaagggttagcctggtgtggtggtgcgcacctgtggtcccagctacttgagaggctgaaatgggaggatcgcttgagcccgggaggttgaggctgcagtgagcggtgctagggccaccgtactccaacctgggtgacagagggagaccctgtctcaaaaaaaaaaaaaaattaaagaaaatgagactcaggaactgttcaaggtcacaaaggctgccaggatttcatgagcccacacaaaaacagaagaccatagcctgagctaaaagcaaagccccccatgtgtgtataaatccttaagtggagaagtgctcagtgcctgaaatgtgaaacaccaaaaaatcactgacctccagccaagtgcaagcctcaagtccacacgcaaccgctgtgtggagctcggtgccgctgagactt

SEQ ID NO: 35988 - DNA, 1071 bp, Artificial sequence
  DNA replication origin
aacctcaactcctcaggaaccaatccctgctcacccagcctcagccaggaccctccctggtctccagggctgcaggtggctgggcttcccagaggggtggacctctgcagaaccccagcccctcctcaccggggccctgaggagccatacaactgtgcaggggcttagctgttccccactacagttccatttacaggtgaggaaactgaggcaacctgccctggggtcagatgccctcggtgtgctccaggaccccaagggaagccccaactataatttcggggacctgtcagtcctgggcacactcatccatttattcaaccactacatactgaacggtgtcaggcactggcttacatgccagagacaccatgggggggtcaagacagacaaaatccatcttctggtgtgggagtcccgcaacaagatgaacaagctgaatgtgtgtattgttaagtgctaagaccagacagtccagccaggaaggaggatggagagagccagggtcggggattgcagcttggaaatgagctgagatctggggtggggttcagtgtgagcaaggcattgcaagctatgttaagggcattgccttttgctctctgtgaagcaggagccctgggctttgagcagagggatgatgggatggggcttacagggcccactatggagaagaggcagtgggggaagaagtgggaggaggaaggccggtcaggaggctacctgggtctccccgggcaagagaccacggtggctcagggcagggcggtggccatggtggtgtcagaggaggttccattccggatgagtttggaagatgagagccgaaggatttgtgatggaatagaggtcctgggggagaaagagaggaaccatgggtgactcaaggttgtggcccaagcaattgggaggacgttttgccatttattcatcagggaagatcgagaggagcattctgggggcaaggaggtaaaagtcgggaattccgttttgaacacggaaagtctgtgatgtccgcggctgagtggttcgttgcatatacagatttcatttagcagagcagtctatgct

SEQ ID NO: 35989 - DNA, 1908 bp, Artificial sequence
  DNA replication origin
tcccaggccgggactgggggagggggcgttccctttaagggaggtgggggagggggctgtgggccggccctccttccgcccctcccgggcccccgccgcccggggcccccagtcccgggcccggagccagcgcatgcgcccgcctgtgggcgctgtcccggctgcgagggccgtgagctcacggaccgacggaccgacgggcggccggccggacagacggggcagcgcagggagcggggacgcggcgggacagcgacatggccggccacacgcagcagccgagcgggcgcgggaaccccaggcctgcgccctcgccctccccagtcccagggaccgtccccggcgcctcggagcgggtggcgctcaagaaggagatcgggctgctgagcgcctgcaccatcatcatcggtgagcgggacccaggcgggcgggcgccgggcggaggccgaatgaggggcgcagccgctccgaacgaggggcgtcccctctccgggcgctcggacgggtctgcctggggaacctgcagtctggcctcagagagcgctatgaccgcggggaggtcaggggctgctggcccagggtgccaaagctccgtgttcccacctcccggccgcctgcacctgggggagttttgggtcccctccaccgctggactcttcctcctgactcgattttgctgcggggcttttgcaaggcagttaccctcagtttcctcatctgtgaaatggccatgactgcagtcctgcgattagcgcaggaacttgaccagtgtaggggctggtcaggctgcggcaggctgagctccccaagttctgtactgtgggtcagtctgagtacctactgtgtgcagggtccaggtgccacgcagtgcagtgactttattcttggaaagcaggagggcctatgagcagagtgagcaagcgcagcctgcgcagaagggacggaggttcagagcaggcaatgactgcagggtttggcagcaggacccaggagagggggcgggttagccagcaattgggggcagcagtgggcagacccagcctgcagaaggccagctgctccctgagctgggatcctggtgggcactggacactcgcctggtctggaggccctggactccaaagtccccacctgagaatgggtccatgtcctgcccccacataggggtttctgggcaggcagagagctcagaggtcatgggaatggcagtggtatttttccactctctgtcccaagtcatggatactgacttgtttctttgtctacacagagtgcctctgagcccctccagggagggacaggagaagtggtttggggggtgagtgactggggcctcgactgttctcaccttaccgccagccagtcttcccggtcccctgccagtgagagccacttgtgtcttcactgccttcccaccctcagacccctggagatggagaaagtttgggggctcagtagggcagacccagggtcttcacctcgtcctctcccacccccacattagcagctcttcacatccagagttgcccctgaacacagcccctggccaggtcactccgccatctcaccccctccccttagaatgctgtctcccagagcctggtcctgacctggccctgggagcttcttggcctaggatgcccctgcctgatggacggtctgctggaaggaagggctggttccagggatttggccagggtgctggttagagctttttcttggcccacaccctctccaggaactgtcctccagggaaggggaagctcacaccatgagtgggtcataggattgagaccatgcctagaaccagctacagtgccaggcaggtgcagaaagacacagctctgcctgggctcctcagctaagcccagcatccttgacctgtcttcctactctatcccctcccca

SEQ ID NO: 35990 - DNA, 1230 bp, Artificial sequence
  DNA replication origin
ggagaggggacgcccctcgttcggagcggctgcgcccctcattcggcctccgcccggcgcccgcccgcctgggtcccgctcaccgatgatgatggtgcaggcgctcagcagcccgatctccttcttgagcgccacccgctccgaggcgccggggacggtccctgggactggggagggcgagggcgcaggcctggggttcccgcgcccgctcggctgctgcgtgtggccggccatgtcgctgtcccgccgcgtccccgctccctgcgctgccccgtctgtccggccggccgcccgtcggtccgtcggtccgtgagctcacggccctcgcagccgggacagcgcccacaggcgggcgcatgcgctggctccgggcccgggactgggggccccgggcggcgggggcccgggaggggcggaaggagggccggcccacagccccctcccccacctcccttaaagggaacgccccctcccccagtcccggcctgggaaggaaggagaggacttggggcagatctaggaaggacttcccagttgggcgaaggaagggaccctccagttgcctgagttacatccattcttggggccgggttggggagcagagctccgagacaagacaatccctgctctcagggaggccgagggggacggcaagaataacagctggccgcgtgtggggatgcagtgtgtgctccctttagtactctatgcctgcacgatgtgtgtgtgtgtgtgtgtgtgtgtgtgtgtgtgtgtgtgtgtgtaggagacagctcccagggtgagtccattctacaggtggaagttgaagcccagagatcagtagcgatcgccgagcaagtgcagggctgagaccaaaccctttctcgtgcctcctgaggctcccaggcggacaacctcaggaggggtgggggttgaggtctggaactcctctgaggggtctgggtgtcctatgcaccctggatcaaaggcctgagggtcgaggtgaagatcccgggggctctcatcctcatcacggggacccaagacctgtgacgagtcctggacacggctcgcccaccctaccaggctctgggccacctctggcctgagatcttcactacaggctcctcgtcccaggtcagagtgagggctcagcggactagaactcgggtctctggtgcaggtcccgcgcgatccagcccggctcaagaaggccaggcgacctggaatgcccgggagacacggaga

SEQ ID NO: 35991 - DNA, 1345 bp, Artificial sequence
  DNA replication origin
tcagcggactagaactcgggtctctggtgcaggtcccgcgcgatccagcccggctcaagaaggccaggcgacctggaatgcccgggagacacggagaaggaggctgtggtcgcgggagagggtcgggagtgcggggatccgagggaggctgcctcctcccggaagccgtccggactgtgcagccgaggccggcggaaaagatccaggggggccgcgtcggggccaccggggcggcgggcggggcgagcctggcactgtgcggccggcggcggaacagcctttgtttcttcctggcggccgccgcgacgcgccgtcccctgcatgtggatgaggcctcgccgggcgccccgtccttccccccagtggcggcctccgggtttgctggggccctgccaggggtccgacggctgcagggtggaccggggtgggacggggcgggggcgggtccctggcaggggcgggtccctggcagcggcagggcctggaggtgggagcggggcggggccggcgtttgcaggcacacaggagcttcgaagttgggggcggggacttggggtaggagtaggagcgggaggatccagggtggacgtgctggtgggacgccgagggggaggccacccggcgaagctgcatccctctcgcttctgtcgtcggagaccggcattcttggcgccctccacctccagccccagagaccattcagaggccgactctcttaaaggagcctcgcgcagggtaggggcagccctggctccggagacccctgattgtcgcgggtgttaggggccagaggcctcgaccttctggtttgactctccccagccccccagttgccctcgcaattctagggtctgctgggagagggtctagccagggctggtgcaatcaggggcagcttgccaaggggcaggggctggcgcaagcctcgcagctctgaagcctgtggttttcgagggtgtctctctgggacctggaatgtggagtatgcgtttgtgggggaaaggtcggcctagggctttgcacaggatggagtttgtatgttgtcagccaggccccatagctcaggaggtccttttcgtggaattgaactagaacctgcaaatttcaatgggaacaaaaggttagtaggattggtttaccatccaaaaaccaatcagcatgattctccacattaatagagagaaaaaaggaaaacctcaacagatgcaaaaaacagtcatccgtgatgtaaacaaacaactcttagcaaatagaaacagaagagaacctccttaatctgataaaagtatctacctaaaaacaaatctccaagaaaccaagaaacaaacaaaaaccctacagctga

SEQ ID NO: 35992 - DNA, 974 bp, Artificial sequence
  DNA replication origin
ttgggtgcatgtgagtgtgtgagagtgtgtatgtggtcatgcatgtgggtgtgtaagtgtatggctgtgcatgtgtgtgagtgtgtggttgtgtgtggttgtacgtagttgtgtgtggttgtgtgtgtgtgtgtctgggcagcctggtgtcctggtacctgtctgcgctccttccctgtcctgctccttggtgagattttggggaggagattagaatgccctggaaatgccaggttggaaaagcgaggtggcgaaagggtgcccaggccagcccccagtcaggagcgtgctcacacccagggttctcgggcactgtcttagctcccaccccagtggatgacggccatgagaaccaggggagaccacgccccaggggcgggctgcagggccgggtgtgaatgagggctgcatcgtgggtgcagtttcatctctaacttggaaatatgtaggcctcccgggtgaggggcttgcatgtgtgtttgcgcccttggcccaccagtgcaagggttgaacatggttgttgttggggaggtccagggagggtgcagagaggaggcaggaaatgcagggcaaggccagagaaggtggggagagagaaggaggcaagcacgacagaaacaatgtccagggctgagaatccatgagacagaagcagaaaggaggccataaactagcaggtgcttgcagcttggagagggagtggtttggggtcaggatggtagaaaccaaggaaagactggggctgcctgaggagatacctgggctggacgtgggagtgtcaaagagaatggaagtggcgtaggagtgctgagtgagtttaacacccacgagggagtcagagcaggccgcagaccccctcccagcatgcagatcctgaccctcccaggaccctgcccaggccatgtgtaatgtcccatgtttgtcagagtgtaacctacacacacaaacatgcaccaatcatctagtgttcccct

SEQ ID NO: 35993 - DNA, 1366 bp, Artificial sequence
  DNA replication origin
agaggatccgagacagggagggttccatttgtacctcggagcagcagccctgggttggggaggagctgtttcagcccccaggacagggtgggggtgcagtgcacgggggagtggggaggtggtgaaaggcccaggtggggtggtcggagctctgggcgtggcaactgggatcccgaccccactcacaggagggatgggttggggctgggtgggatgtcacagcctgaaaattacagggaacaacaccctgtggtcattctagaagccccaccagctatgcaggccaggccaaccttagacctgggcaagggggtctctgctgtggaccccgtgccctggagagccaggacgtcaccagcagcaaatgcaaagaattttttttttaatttcagtctcgtaagagtgttttaaaggttgataactgaacaacagtgagttgtcggagaggacagatgcgaaaaaaagaccccacaggcccaaagatgtggggctgagtgttgagtgcgtgtgtggatgagtgtgtgagtggttgtgtgtgattgcaaatgtgtggtggtgtgagaggttctgtatggttgtgtgtagttgtgaatgtgcggttgtgtgtgtggttgtgtgtatgagtgtgtgagagtgtgtgagtatgcagttgtgtgtgtggttgtgagtgtgtagttgtgtgtggttgtgtgtatgtcactgtgtgagagtgaatatgagtggccgtgtaggtggttctgtgtggttgagtgcatatggttgtgtgtgtggttgagtgtgtggttgtgagcatgagtgtttaggagtgtgtggggttgtatgtggttgtatgtagtgtgtggttgtgtgcatgtgtgtgacagtgagtgtatatgtggtcatgcatctgggtatgtgagtgaatgtggttgtgcaggtgtgtgagtgtgtggttgtgtgtgtggttgtatgtaattgtgtgcatgtgagtgtgtgagactgtgtctgtgattatgtatgtgtggttgtgcatgtcagcgtgtgagagtgtgtgaggtatgagtgtgtgggtgtgtgcatgtcagtgagaatgtgtggttgtgcatgtgtgtgtggttgtgtacgtgtgagtgtgtgagagtatgcggttgcacgtgtgtgtgatagtgtgtggttgtgtgcatgtgagagcgagtgtgtggttgttcgtgtaagacagtgtgtgagatatgagtgtgtggttgggtgcatgtgagtgtgtgagagtgtgtatgtggtcatgcatgtgggtgtgtaagtgtatggctgtgcatgtgtgtgagtgtgtggttgtgtgtggttgtacgtagttgtgtgtggttgtgtgtgtgtgtgtctgggcagcctg

SEQ ID NO: 35994 - DNA, 1950 bp, Artificial sequence
  DNA replication origin
agcctggggaaggcgtctccatggcctggagcagatggtgggtcttggcccaggccagggcagccccgatgggccaggccccacacggtgtgggggccccttcatctgaactccctcattccaatccaggacatcagtgaggtggggcccgcaggccaccctaggccagcgtgaggggaatatggagagtcaaagacgagggcccccttcgtgcccacccagaccccagagggtgcagagggggacttggctctagagggggcaggaggttcctcagggcagccccaaggaggtgacaagccccatgctggaggcttcagggggccggcatccagctccccgtccatgaagccaccgcagccctgccccccgggaatcccctggaagtgctcgtttgccctgcacatctcctagggcaaagggaggggcacccagcccaggaagcctgcctggagctccagccttggccagcgggggctgacggggctgaggggtgggggaggggacgcatggctgaggacccttgcagggtggctgactgcgagtctatgtgggtttgtgcagccaacgaggaggcatggtccgtgagtataggtggacagggtcagggtggcgtgtgtgtctgcctgtgtgtgtctgtgtgtgtggtgtgtgtttgcttggtgtgtctattgagtgtggtgtgtgtgtttatctctgtctgtgagtgtggtgtgtgtgtctgtatctgtgtgtgtggtgtgagtgtggtgtctgtgtgtggggtgtgggtgtgtggtgtgtatcagtctctgtgtgtggcctgtgtctatctgtgtctgtgtggtgtctgtgtgaggtgtgtgtctatgagtgtagtgtgtgtttatatgtgtgtgttgtgtgtatgtgtggtgtgtttgtgtgtttggtgtctgtatgctgtgtgtgtgtctgatgtgtatctgtgtgtctgtgtgtgtctatgtctatgtgtatctgtctacatctgtctgtgtgtgcctctgtgtgtggtatgtgtggtgtgtgtatctgtgtctgtgtgtgtggtgtgtgtgtctgcgtctgtgtatggtatgtatgtggtgtgtatctgtgtatctgtgtgtgtggtgtgtgatgtatgcatgtgtgtctgtgtctgtgtatggtatgtatgtggtgtgtatctgtgtatctgtgtgtgtggtgtgtgatgtatgcatgtgtgtctatgtgtatctgtctatgcatgtctgtgtgtgcctctgtgtgtgtggtgtgtgtgtctatgtctgtgtgtgtctatgtctgtgtgtgttgtgtgtctgtgtgtggtatgtatgtggtgtgtatctgtgtgtgtgtggtgtgtgttatgtatctgtgtgtctgtgtgatatgtgtgtgaggtacatatctgtgtgtctatgtctggtgtgtgtgtggtgtgtatttgtgtggtttgtgtggtgtttggtgtgtgtgttgtgcatctgtgtgtctgtgtgatatatgtgtgaggtgtgtatctgtgtctctgtgtgtggtgtgtgcgtgtggtgtgtatctatgtgtgtgtgtgtggtgtatgtgtgaggtgtgtatctgtgtgtctgtgtgtggtgtgtgcatgtggtgtgtatctgtgtgtgtgtgagatgtgtgtgtgaggtgtgtatctgtgtgtctgtgtgtggtgtgtgcgtgtggtgtgtatctatgtgtgtgtgtggtgtgtgtgtgaggtgtgtatctgtgtgtctgtgtgtggtgtgtgcatgtggtgtgtatctgtgtgtgtgtgtgatgtgtgtgtgaggtgtgtatctgtgtgtctgtgtgtggtgtgtatctgtgtgtatctgtgcgtgtctgtgtgtgcctgtgtgttggagcatgggtcttcaggagcccccatctggggcgggggtgtggtgtgttgtgcacagcccagaccccctaggacag

SEQ ID NO: 35995 - DNA, 757 bp, Artificial sequence
  DNA replication origin
acttctctcctctatgccagctcagattgttttcctctgggcctctatattcccttcccctctgaaacacccacccctggctcagtggaaactcgtcagtgctttccacccaagcctcccatggctcactttccctggggagagtgccagaaagggtggatttctcagtcctcagaggctgttaacaggcttggctgcatccagtcagggcaggctgcaatgggtcctgagagctggcgtgcctcccactgccccaggaccaccctccatgcctcacacagagggtcagaaggccctgtgggtcggcctggggcacagcggggaatgagtgagccatctgctacggtcgtgtcaagctgccatcagtgcctgtattcccccggcccgtcctcccaggaaaagtcacaggcctccatctattggtccgtggcagcaggaaccctccacacacttcaagatccagggcatcctccgttgaccggagctagacagaacccaaccccactcagatccggggcaaaattcaggtcatctgcatggtgggggtggctgcatctgagaaccacatcatctggtccctgtctgttcctgaaatacaccaaacccattcccgccacagggccttggcactggtggctccctctgcctggtacactcttccccttctagactcttggtcagctccttcttgtcctttacatcttcgctgaagtatcaccccaccccacccccaccagggatccttttcctgacctcc

SEQ ID NO: 35996 - DNA, 1230 bp, Artificial sequence
  DNA replication origin
aaccgtgggaaggtgaagttcggaaagcagcccgatcatgtggtcatttaataatacgaccattctgggccgggcacggtggctcacgcctgtaatcccagcactttgggaggccaaggcgggcagatcacgaggtcaggagatcgagaccatcccggctaacacagtgaaaccccatctccactaaaaatacaaaaaattagccgggggtggtggcgggcacctgtagtcccagctactcgggaggctgaggcaggagaatggcgtgaacctgggaggcggagcttgcagtgagctgacactgcaccactgcactccagcctgggcgacagagcaagactccatctcaaaaaaataaaataaaataaaataataataataatatggccactctgttggctaagagcctggatgaggccagagctgccatcccatgaagagagatggtggctggggacgtggggcggcaggggaagacgtggacaggtgcgggcatgcagaggcaatggaagggtgacaggcaaggcctggcgacggctcaggtgtcaagggccaggaggtgtacatgctgtgtgtgcacacgtgtgcacgtgagcctgtacaaacgcctgccaggagctcaggccaggccctctctcctctccctctcccctctccaatctcttgcccgtgtcccccacagcctcgccgcggacatgacagtgacggtaagaaggactcagtgttgcaactgcatttcctctcgaacccagggccgccagagattagctgagagccccgtgtgcactgggcgataacacccccaccactccccccgcttcctaatctctgattcatttccaactgataacagcatgagggcccatgggcgacgaagaaacaccccagtgggtcctaccaaggccactgtcaagccacgtgcagggactccggggagcagagacagggagggcgaagaccaggggtgattgcagaggcagagacagagagaggaagaaagagaatgagaagagagagagaaaatgaaaatggggagagaatgagagagggggagaaagagagggaggggagggcagcgggaatggtcgacgggtgcaaaaatatggttaggtagaatgactaagatccaggattgatgcatgcaggccttaatacccaggtgatgggttgatctgtgcagcaaaccaccatggcacgcgttgacctatgtaacaaatctgcacgtcctgc

SEQ ID NO: 35997 - DNA, 1837 bp, Artificial sequence
  DNA replication origin
gcgcgcccgcgggccccggcggcgccgtcatgcccgggggagcgcacgggcccccgcccggctacggctgcgcggccgccggctacctggacggcaggctggagcccctgtacgagcgcgtcggggcgccggcgctgcggccgctggtgatcaagcaggagccccgcgaggaggatgaagccaagcagctggcgctggccggcctcttcccttaccagccgccgccgccgccgccgccctcgcacccgcacccgcacccgccgcccgcgcacctggccgccccgcacctgcagttccagatcgcgcactgcggccagaccaccatgcacctgcagcccggtcaccccacgccgccgcccacgcccgtgcccagcccgcaccccgcgcccgcgctcggtgccgccggcctgccgggccctggcagcgcgctcaaggggctgggcgccgcgcaccccgacctccgcgcgagtggcggcagcggcgcgggcaaggccaagaagtcggtggacaagaacagcaacgagtaccgggtgcggcgcgagcgcaacaacatcgcggtgcgcaagagccgcgacaaggccaagcagcgcaacgtggagacgcagcagaaggtgctggagctgaccagtgacaatgaccgcctgcgcaagcgggtggaacagctgagccgcgaactggacacgctgcggggcatcttccgccagctgccagagagctccttggtcaaggccatgggcaactgcgcgtgaggcgcgcggctgtgggaccgccctgggccagcctccggcggggacccagggagtggtttggggtcgccggatctcgaggcttgcccgagccgtgcgagccaggactaggagattccggtgcctcctgaaagcctggcctgctccgcgtgtcccctcccttcctctgcgccggacttggtgcgtctaagatgagggggccaggcggtggcttctccctgcgaggaggggagaattcttggggctgagctgggagcccggcaactctagtatttaggataaccttgtgccttggaaatgcaaactcaccgctccaatgcctactgagtagggggagcaaatcgtgccttgtcattttatttggaggtttcctgcctccttcccgaggctacagcagacccccatgagagaaggaggggagcaggcccgtggcaggaggagggctcagggagctgagatcccgacaagcccgccagccccagccgctcctccacgcctgtccttagaaaggggtggaaacatagggacttggggcttggaacctaaggttgttcccctagttctacatgaaggtggagggtctctagttccacgcctctcccacctccctccgcacacaccccaccccagcctgctataggctgggcttccccttggggcggaactcactgcgatgggggtcaccaggtgaccagtgggagcccccaccccgagtcacaccagaaagctaggtcgtgggtcagctctgaggatgtatacccctggtgggagagggagacctagagatctggctgtggggcgggcatggggggtgaagggccactgggaccctcagccttgtttgtactgtatgccttcagcattgcctaggaacacgaagcacgatcagtccatcccagagggaccggagttatgacaagctttccaaatattttgctttatcagccgatatcaacacttgtatctggcctctgtgccccagcagtgccttgtgcaatgtgaatgtgcgcgtctctgctaaaccaccattttatttggtttttgttttgttttggttttgctcggatacttgccaaaatgagactctccgt

SEQ ID NO: 35998 - DNA, 917 bp, Artificial sequence
  DNA replication origin
gggccgcagccctcgaggcccgaagccaccgcttcctcccccgcctccccattcaggtgggcgccaacggcgggagcgagggtgtccaggccgccgggctgccaggtccgagcacgcacagggagaactctgcccagtggttcgccgggcgctgtagtccccgggatcctagggaccgaggcggccaggccctggggccccttgagtgcggcagctaatgctctcaccgcggcgggggaaggagcttgccaccgagacccccagccacgtgcgtccctcgcattctttaccggggccggggtggcggctacggaccgtcagctgggcccagatggagtcttgggagccctcaagtgtctcctgtccttgcccgcgccgcccctcgccactggcgctgaggcctgacgccgcctgcgtcccggctagaggcgcgcttgcctacaggtgagggaagacccccttcaccgacagtggccttaggcctggcaaggcgccacgacccgcccaggagccccggagggggcacagctaaaaacaccgctggagagccccgagcttccacgacgatcgcagtaaagaagcagtttcatctgggcaacgcacactgcgctttaatcaagttcctattcaacatagtcccagtgattaatagcccaactgcttcgttttcggtccagagctcataaacaagatatttttagcttgacgcttttggacgggagggagtaaaaaccagatacgttaaataaatatcccgatgtgagccggagagctgcttgctgagccaaatgcaggacccattcatatagcattcacctgtggagggagacctggacggaaatcaaaaagcaccaagagcgatttgcgtttttttctgcggtgctaaaactaatggcttttcctacctaggaacaaag

SEQ ID NO: 35999 - DNA, 1170 bp, Artificial sequence
  DNA replication origin
cacgacccgcccaggagccccggagggggcacagctaaaaacaccgctggagagccccgagcttccacgacgatcgcagtaaagaagcagtttcatctgggcaacgcacactgcgctttaatcaagttcctattcaacatagtcccagtgattaatagcccaactgcttcgttttcggtccagagctcataaacaagatatttttagcttgacgcttttggacgggagggagtaaaaaccagatacgttaaataaatatcccgatgtgagccggagagctgcttgctgagccaaatgcaggacccattcatatagcattcacctgtggagggagacctggacggaaatcaaaaagcaccaagagcgatttgcgtttttttctgcggtgctaaaactaatggcttttcctacctaggaacaaagaaacgccactgtacatgcacggttcccggcctgtggagttgtgggaggaaggcgatgtctggccttttttgcacagctgctgttgcctgcccagagatcgggaactctgccccgtaggactggaagaaacctcagtaatgggaataagactttgtccaatagggggctgatgaatgtgtgggggcgacaatggcaaggagtgggactcccggcccggggttcgccaaccccaggggccacaggtcctcctacaattgaaccagaattcacccacccgggcctgccctgtgcagggtgccgagagcccagggatgcatgagagggtggctcctgcctctgggaactgggacagtgggagagacggataagttgtcacacagaggctgctgggaggaaggaggagacagaaggagtaggggatgggacttcattcattcatcaaatgcacacgaggcacaaatgggaatcaagggtggatgtgctgtgatgaagagaagtcctgccctgaacaaggtggcgctgtggaggaggcagagatcagatttgtctgcggaggtgttatggactgaactgtgtccctgccccaaattcctatgttgaaggcctaacccccatgtgactgtatttggagataaggcttttaggaagtcattaaagtgagatgatgtcatatgggtagggtcctaatttgataggattggtggccttatcagaagaacaatgtcatgggcatgcacagaaaggagg

SEQ ID NO: 36000 - DNA, 1211 bp, Artificial sequence
  DNA replication origin
agaaggagtaggggatgggacttcattcattcatcaaatgcacacgaggcacaaatgggaatcaagggtggatgtgctgtgatgaagagaagtcctgccctgaacaaggtggcgctgtggaggaggcagagatcagatttgtctgcggaggtgttatggactgaactgtgtccctgccccaaattcctatgttgaaggcctaacccccatgtgactgtatttggagataaggcttttaggaagtcattaaagtgagatgatgtcatatgggtagggtcctaatttgataggattggtggccttatcagaagaacaatgtcatgggcatgcacagaaaggaggtggccgtctgcaagcagggaagaggcccctcaccagaacctgagggtgctggcagcttggctttggccttgggcatccagcctccagaaccatgagaaataaatgtttatggtaggtctatgatggcagcctgcttggactgaaccggcggtgagacagggcttcatgcaggagcagacctttgagctgggccttgaaagttgagcaggaatttgctggaaggataagggaggaaggctcttctaggaggagggaatggtaagtgcaaaggtggagagcctgccagtgcatgtgttctggtaacaaagaacgagatggttggccggctggagagtggggtgagggagggtggggcctagataaggctggatccgcagacagggctgggctgatggccaaggccactgcaggtgaagggggaacccttatctcccaggcttttgacctccagattttagcaggggagcttcgttgtcggatttgggttcctgagaatctactctggccaagacggagagggggtgttgaccagatgggaaaggatggagacttgtattgccccagtaatgagcgggcagggtagattagaacaagatgtcaggacttgggggctgaatgccaggcttctggctgggattaccaccccctgacacatataatgcccaggaaattggaggcccctctccaagcccccaggaggccactggggactcattccaggatactcacctgcctgctttgtggttttggaggggaagaccttggagcagttgcgaagatccatctaccatgttctggtttttccttggaagcctaaaagtgtacctcgggatgaggaggaaatggttttgagggcaagtggtaggtct

SEQ ID NO: 36001 - DNA, 1112 bp, Artificial sequence
  DNA replication origin
ggtttcgtaaccgtcgctcctcctcgctgactcgcgggctgtgaggcctgggtcggctcgggccgcaccgcgcggggccgctcggagtggaggccgcctgggggcaggcgggctagaggagcaggtaaggaggctgcggcgggcgccctgagaacggggaggaggaggccgcggcgacgccggccgctcgactgggtgcgggcccggctcggggaaacccagccccggccccagacggcccgctggcccgggaaggccacgcgaggctggaggcgcgggcggcggcgccgcgcggcgtctgatgcaacctgccggcaacacccggcggggacgctgagctcattcctggccgcggcccagcgctgcggcgccgcccgtcgacccccgcgctgcccggggcgcccctcgcggcgggccgggagcgcgcgaacggccggggaatgccccctgcggagcccggccccctctcggtgaaacgggcgctgtgacccgccaggctcgcattggcccctggggatgaagggtgttcccagaatagcagaaggtggaccgagtcgagctttagaatcctgatcttctagaagggctcagcttgcggtgatcgaaaatctgttcagaagttcaaagactgatcaataaaatagggaaagcaactggtttttaaatgcatgactttgcagagataatattttgcttctttgtggagctgttggaatgtcctgcactttactgttgaacgtagtttagaagaacacgcaacacctacgggtcgaatagagaagaaatgaagcacttcgcaggcatagttggagggagcggagcagggccgacagccagcggaggtgaccagatgcgaaggatggaaatgcatgtgtcgcggggggaggagagtgttttccagggcagctggtgtgttgcttctcttccgcaggtttacgtgttgggttttcctcttgtttgaagtttatactgtaatctggcatcctgaaatgtataagatttagaaaggtctcaatgttgatgggtgacaccaaaattggtagttgtgtcagaattgactgcttatatgaataggttgtcacttaaggcagacttctcccaaagaaatgtga

SEQ ID NO: 36002 - DNA, 905 bp, Artificial sequence
  DNA replication origin
acgcctgagggacagtggtagagccgctccctgcaggggcccctgtctgcgccccacactgccccagtgcacacccagcctggccttgtccactcacaggcacagctgagggggcctcagcttggctgagggcagcgggtgctctgggaattacaggagagctcctgctcgcctcaggtccccggggcaccatccggccggcggccagggcctctgagccagtgggcacgagtatgctttctggtcaggggatgagcctgccctgcccggctgcactccctccccaggaagcccagctgctggagcgggagctgtcatttctgactgtttgggggccaagaacatcagactccaattagcagttcacgtaaggtaaccagaaacaggctggctcggcctccacgctgggcacggccagagaggctgtgactgattccacggagggcagggacagccacgctgacctggagagagcaggccaggcgggaggcgatgaggagacaccacagcctggctggtgtggccccggccccacaacacttgcctctgggccgctgaccgggagctgaggccggagggcagggatgccccgtggctgaggaaccgtatggagtgacagtccctctgcgcaggtgagaggtgcatgtggaccgagctggggcctgtctcctgcccagaagctgctgggggtcccagggtctctgctccaggaccttcccgtccctgtcatccgaagcctgtgctgggctcccccaccccaccgccgcccatccctctccttcatgctattcctgaagtgtccgtccctgtctccacccacagcaatcgaagccaggggcctgggggaagcaagggcctgccaacgtcaggtttccttccttccagtcacccctccatccccatgg

SEQ ID NO: 36003 - DNA, 917 bp, Artificial sequence
  DNA replication origin
aaatccaactcatctctgccgcatgtttgtggggcaaaggccaccaaagagagaacttcctaagcacagagctttgggggccacacaggctctgtggggctctggagcatggccgctaggaaggaggcccttagagagctctccacgtagagcctcagcagcccacgggtgcgcccgtcccatccccggactctgtggaatcccagcatcagcctctcctcatggtagcttccactgctggacttggcttgagcaccagataaggactcgaggccggtgaggcctcctgccctggccccatgggggctgggtttgggcaggccacgtgctggcagaggccggggccccaggacactctggccaggcacgtggcggggggcccctatcaatgtgcagctcactggctggagagggcgcccagcaagtccctgcggcacctcctggagaggtccagccccaccaggcggagtgaccttggctcccgagggcctccctgccaggcttgccttggcgcagagccagagcctgctctgcatggtcccgatcactgctgtgggaggggccggggagaccctgagctggcgagggctgggctgtgagaagcagggttctgaacctctgtggctggcggagggcagatgatgggctcggctggcgaacagggatgagagtccacactgggacacaggccatcacccccgacacactgggcacaagtccttcatgttgggacccctttaagtgccagagttggccactgtggtgctggggtctcaggcgggctgggggtgcacggctttgggcaggcagtatggctgttgcccgccattcacagcacagcgccccagccacggcagcagcctaagggtggcaggggtggagatgcccagacctgcccccaccccccacacagagca

SEQ ID NO: 36004 - DNA, 1390 bp, Artificial sequence
  DNA replication origin
agggtgggaggagcctgagagtgggcccaggccagcaagggaaccctcaagttggtgcccaccctgccagcctagtgcaaggacagtgaccctcacacactccaggggcccccgcccaggcggtgggtgtcgtaaccaccatccgggccagaggctggggccaagttgctggaggttgaatcactgtcacaaccctaaccacacacaggcagaaactccctgctcccggccaagagagctgtgtgcaaggccttccccgagggtgcacaggcaaggaagaccagcggcgccaaggggacccccgggccggcacatctgggcggcgccgggcctgcccccgggaagggccaccgcagagcatgatttatacctgattcccgccctctgcggaggctgggccaagaacgtagcccactgctgaagttagcctggttggaaagctggctgcacttcccggggctcccctttggtgaccagagaagggcgcgtccgagaggaagcagttgagctgggcttggggcacgagccactcacaggaggcctcccagccccatgtgccaactttgcaggctgttgggagacctgaggggcactcactttatgccaggcccagcggtgccctcgggagacccccaccctcggagtgagacatgagaagcaaacgagcagatccgtccaggggacggctgcaggctggatggaccgtgcaaggagaaatcaccaggcctgggacagcaaggcaggaaggtctcctctgagaggggacagcttttatgcagagaccccttggatgaggcatcacaggtcaaggcctggcacaggccatagcaaagggcctgaggtaaaacggcctgtgtgccttggggtggtctggcctctggaggatgcagcagcagagaggaagggcgaggtgggccaggattgtccgggctgggttctcagagaagagcagcagcagaggctgggcaggcttggcgcacacccccaggaacaagtgaatgtcaagtgtggaaccagggctggctggtcatgcgcgatggaggaatggtggccaatgccactgtccggggtgctgcctccagcccccaggtgacacagaggctctgagagcaaccccccggggcctgccttgtggctgtttgtttgtttgaccagcggcagctgaggctcacggaggtggggctgtttgaccagcggcagctgaggctcacggaggcgggggagcggccaagtgggctgcagttatccaggtgtccttttccgggatgttgtgcccctcagaaaagccaggggtgcgggctgggccagccaggggtgtgtgtgcccagggctgccccagatacagggcagctgcagccagagttgccccaggtctgcccgggctctcccc

SEQ ID NO: 36005 - DNA, 947 bp, Artificial sequence
  DNA replication origin
gtacacagaggagtgggggatggggcacaacactggctgcaggagagccatgagagaagctggggctcctctccttccaggcgtttaccaagcatccgcagcatgccaggcacagagcagagtacgggcaccacccttgcaaggcccagaggtcataaccaggcccagctgtgctgtgtgttccgtgaattctcaaagtacaggaaggggtaatcagagagggcttcctggaggaggagcctcaccacagaggcccacaggaggaatgggagcacatctgggaaaacgggcttggaggaggtggccccagctaaggaaacagcaggtagggagggccagttcttgggacccgtggccttggtccagccaccccacccaggagtgggtgagggagaggctggagaccaggccaagctgagaacctgggcttcgtccggggccgggaatggccctgtttgccccgttcgttctaaagagatggcccaggcatccaaggggtgtgcagcggaggagggagccaggcagactccaggaggggtggggcaggtgcaggggtgcttcgggaaagccagaatgaggtttggtgcttgctgggggttggggcacgcagggcagctggtgcccaatttctgctgtgtgattctcagtgtggcatctgggtataggctggctaggggccgggggtgccttccagcctggactagagagcttgacggtgtctccaggctgccagggtgggaggagcctgagagtgggcccaggccagcaagggaaccctcaagttggtgcccaccctgccagcctagtgcaaggacagtgaccctcacacactccaggggcccccgcccaggcggtgggtgtcgtaaccaccatccgggccagaggctggggccaagttgctggaggttgaatcactgtcacaaccctaaccacacacaggcagaaac

SEQ ID NO: 36006 - DNA, 1151 bp, Artificial sequence
  DNA replication origin
actgtcttcagtgtgggcaccatgtccacccctcctgccggccgcaatggtgagccagttccttggcctcttcttactcctcggggcactctgccagggtgtgggggaggagactcgaggagcagcctgggccaacacagcaccctgctctcacgcagggtgagtgggtccccagaatttctggcagcagatggggttcttctactcacgtcccgtgcagggtggggtgagctggaggtcctcagccccgtgccagctcagccagccctcagggcctgccctgggaccccggccggagcctgctgtcctacacccctagagcctggctcacacccatccatcccgagggccatgttccacagatgaagtgcgctctttgtctggaggcagctctgaggatgctgcctttgtagctcggtcaggcccgggagccccctggggctgtcacactccgggtaggaggcctcggggctgtgatggatgctttgaggctccaaggagctggcctgggccctaggcccagcaggagcgggtgctgcctgaggagaccaagtggacccagaagaccactcaggggctacgctggccacacctggggcctgggtggcaggagcagcggggcttgttcctctgagccctgccatttcatgaggcgcatgatgggacactaacctagaggccaccctgcccgttctagggtctgagtacacagaggagtgggggatggggcacaacactggctgcaggagagccatgagagaagctggggctcctctccttccaggcgtttaccaagcatccgcagcatgccaggcacagagcagagtacgggcaccacccttgcaaggcccagaggtcataaccaggcccagctgtgctgtgtgttccgtgaattctcaaagtacaggaaggggtaatcagagagggcttcctggaggaggagcctcaccacagaggcccacaggaggaatgggagcacatctgggaaaacgggcttggaggaggtggccccagctaaggaaacagcaggtagggagggccagttcttgggacccgtggccttggtccagccaccccacccaggagtgggtgagggagaggctggagaccaggccaagctgagaacctgggcttcgtccggggccgggaat

SEQ ID NO: 36007 - DNA, 1389 bp, Artificial sequence
  DNA replication origin
gtcttttttatttacttattttgagatggagtctcgctctgttgcccaggctggaatgcagaggctcactgcaacctccacctcccaggttcaagtgattctcctgcctcagcctcccaagtagctgggactacaggcgcccgacacctagcccagctaattttttgtatttttagtagagacgcggtttcaccgcgttagccaggatggtctcgatctcctgactttgtgatctgcctgtctcggcctcccaaagtgctggaattacaggcatgagccaccacacccaacacccaaccagtttctagtcttaaaacaagaaaacaaacaaacaagcaaacaaaaagagaaaaaaatctgtcctgtttaacaagaatgcagcaaggattttgcaacctgctcccaggctggattcacggagagctccaaccccgcccccagcaccctcggctcgggtggctctgtatgggttggggggcgggtatgtatgtggtatgtcaatgggtgtggtacataccgtgtatgtgaggcatgtggtgggtggcgtgtgtatggtgtgtagtgtgtgtatggggatggtgggtacatgttgtgtgtggtgtgtagcatatgtggtatgtatggtgtggtgtgtgcatatggctgtggtgcatgtgtgtggtgtgaatgtgtatggctgtggtgtgtgcagggtattggtgtatgtggtgtgtggctgtatgtggcatgcgatgtgtggtgtgtaggtgaatgtggcatcagatgtgtggtgagtgtggtgtgtaggtgcatgtggcatgcgatgtgtggtgtgtgtggtgtgtaggtgcatgtggcatgagacgtgtggtatgtaggtgtgtgtggcaagtgatgtatggtgtgtgtggtgtgtatggcgtgtcatatgtatgcagtatgtggtatatgtgtggtgtgtgtatggtatgtggtatgtgggggttgtgtgtggaggtgtgtatgtgtggcgtacatggcgcatgatgtgtatgtgtggtgtgtgtgtggtgtggggtgtgtgtgtggtatgtggaacgagtgtggtgtgtgtgtggtgagtatggtgtgggcggtgtgtatgtgtgatgtgtgtggcgtgtgtgttgtgtgtggtatgtggcatgtgtggtgtgtatggtggaggtctgtggtgtgtggtgtgtggtatgtggcatgtgtatgtgctatgcagcatgtgtgttgtgtgaggtgtacgtagtgtgtatggtatgtgtgggggtgtgtgaggtgtgtgtggtatagggcatgtgtgtggtgtatgtggagtgcgcaggatgtgtggtatgtggtgtgtatggtgtggcgtgtgtgtcatgtgtgtggcatctggggcatgtgtctggttgg

SEQ ID NO: 36008 - DNA, 1965 bp, Artificial sequence
  DNA replication origin
gtgagacttcaggcccagagtgccctacggataattggttaagccagcacacagcagacgtctatttaagcatagattcaattgggccaggccaaagcccagccaggctggtttcatcagagaactgcctttgtagaataatttgccctggttcagtttgattttttttttccacttcccccaaagtaagattagaaaagcaagtaggtccctgggcctcgatggcagagatgattatcacctctgctgggaggaggatgtggtcctttctcctttggcagattacgacctcttcctgctcatcaccataggaggatgccccagctgcagtgggaggcagagtggagagcctgggagtgtgggctcctgtggtccaccctgggctgctcttcctacctgtgggactgggacgaggcagtggcagagggattttgggctgctggagcctgaggaggctttgcccctgctgtgcccggtttggcaacatcccatgctgccatggggtggggaaggttgggtggagaggcctccttttctctttgaaatgaggccatcagctctccttgttggaaatgagctgttgtctggcttcggtggaaggacaggtagctttgatgacacatagttactgtgtgtctgtgccggtgctgggaccctgtcttccaggactatatatggcctttcagaagagacttaaattaaaagaattctaagtgttagaggtttctgaggattcgtctagactacccagggaacacagagaagggatttagcccagggtgggagggtagaagggggtcgtctccgacccctagaaaagtgtgtttcgggtgggtgctagaggtgggcaggaacaagttccaggcagaggagggaggaggctgggagagcacatggggtgagtggtggagatggcctgcacctacgtgagttgtgctctactagaggtttaccttcatcctgaggccactggaaacctaaaggccactggaaacgaggggaagcctgataaggtttgcatttcctaaagatccccagctgctatcagggcaggtgggctggaggcctagaggctggagggcttgtccaggccagagaggctggggctggatagagagaaatgggggggcctgagggaggtcgtggagggggagtggcagcccttggccgtgaattggatgtgggaagcagcggatggatgtgatgggagagggcgtctaggatgacgcccgggtctctgctgaagcagcaggaagatggcagagcctcattgagatgggggcacggtgggggttctcgcacactgagctccagggcacccaggacccacaggtgggtgcagagggaaagcagggagaggcagagggaaccacgccttctgcgagaaggggaggggagggctggcagcatgatgggggtgaagagagaagcaaagaggggagaggagaggggaggagatggggaggaagttcaaaatagaacgcaaaagctgctttccctcctcccccaaggcaaggacggttagggcctggcaggcagcgtaggggaggcttgactggaagaggagaaggaggcaagtgaggggaggattcttcacttgtagaggaagctgtttcggtggccatggagcttctagcaggagctggtggaggttggagctgggatccccaggtgggcgtgtgagcttgggaagaggatgcaccttcccttaaaagggagggaggagaggacagatggggagtcctgggagtttggaggaggagaggtgagagtggacccatctgctggctgctgcgcgctccaagaagtaggagtggaattcattcatctgtggcggctcccgtggggggcagaagttgggggtagatatcttcggaaggtgcgggaagttgagaatagccctcctgcgggttcccctgcagctcacggcagagctggggcctcgctgaggtgactggggcttgc

SEQ ID NO: 36009 - DNA, 1103 bp, Artificial sequence
  DNA replication origin
aagactgtccacagggaagcggctgggagcagctggaggcaaaggctggggccccatgtcaaggcccacggcatgcagggtagggggcaccagccagagctcctgcctcagtgaaacagccctggtggcagtgaggtggaaggccccgaggggagagacatgggtggatggccccctgcaggggacaaggaagggagggaggagaacaagcaggccagagatggccacgagggttctcacccgctgcgcattgcaacagccaagtcagagactcggccagcagcccaaggcgtaggtgcggaaactgacgcaccagcacccggggtggggggcagtgtctcagcccagcccccagctgaggggccgggtgagcaccccccagtcagccccagcctggcctggatcagagattggagaggtaccagcccggtgcctggggagatggtgcaaaagtaaggcagtccctggctctccaaaaagtgtcccagtggtgacagggtggggtggggagtttgcagagcacaggctcctctgggctcttggcagaggccacagggactggggggcaacaggtgacagagactgggatgagaggtcacacctaggaatcctcctggggggtagaacgagacctttgcttcctgacactcactgacagtgatgagggccctggggaagcccagggccccacctgccttcctcggggaacctcaaggagcagctggcagagctctgcttcagaggccacatcttgagctcctggctgggaaccacacccaccacacagctgccagacgtggtccaggggggctcagcattctctctagaggaggagcaagcaaagctctcaccgctgagaaggccctcgactcactgacatctgggaaactgggaattggtgatcctggagcccacctggcccaccacgcagatggggagactgaggcacagaggagcaatgggatttgctggggtttgcatgcgggcaactgtcactgagcaccagctctgtgccaggctccaggtgagcatgatctcctccagtgcccaccacaagcccaggcagcaccaggttacacgtggaggagctgagggtccccctg

SEQ ID NO: 36010 - DNA, 826 bp, Artificial sequence
  DNA replication origin
gaaaaagcaaacctactacccgcccctccacccgccccactgctcttagcatagggggaggtgggaggtgatacatattcatgagctcataatccctcatcacccctacatcacacacagagattccagcagcttgggctcatacataattataaggcggttcctccatcactgccttggtccaccagaggacaacagaagacatgggggctgtaggggatgcatgataggggaggggctggggatccaggtcccaaagttggggctgggagctgcccactgtccacgtgcagcagcctcgagcgcaggggccttgtctgctatggcatcagccagcaatgcaggccacagacccccagggccagtcaccagccagtccagggacccaagcacatccagtgggcagggctctcccgccctctccaggctctcccgggggctgtgggtgaggggtgacaagcaggggaggggcgtctttccctgtgcccaaggtctgtcctcctgcctggagagaaaaggggaaccgcttcccaagcagggtttggaggctcagcctggcgcttggttaagagtgagaagaggttaaagggatcctgcctgggattaggacagcaggggacacaggggagctgctgagagccgggttggaaggggttaatggctgggactaagagagggggcttgggacaggcacggtgtctcacatctgtaatcccagcagtgtgggaagctgaggtgggtggatgacctgaggtcacgagttcgagacaagcctggccaacatggcaaaaccccatctctactgaaaatacaaaaattagccggg

SEQ ID NO: 36011 - DNA, 987 bp, Artificial sequence
  DNA replication origin
tggctgcttggagccagggatctgtgtggtgcctggaagcagggcggtgcggtgggaagcgagccaggtgtaggtttatcctctctgcccctcgatggctgtgtggctttcagaagtccttcaaccaggggaagctgggtttcttcacctgcagggtgagggcagcgcccacgtcgcctgttctaatgatctgcttgataaatgtgcactgtcattatgaaggaatggtggcatgtcatcttcattaggcttagtggtgcctctaaagtgggtttttctttccgaccttctagattgccagcgtcctgacgtcacagaagccctctgtcctcctcactttggtaagtggctggtgtccaggggtggggcagtgcttggctctggggagggtttttatgggggccacctctcctgcagaggtcgggcccataggggaggattaaaaaacggagaggggttgggtccaggggctcacgcctgttatccaagtgccttgagaggcaaggtgggaggatcgcttggagccaggagttccaggccagcctgggcaacatggcaagaccctgtctttacaacaaattaaaaagttagccaggcctggtggcatgtgcttgtggtcccagctacttgggaggctgaggtgggaggcgtgcttgagcccaggagtttgaggctgcagtgaggtatgatcgcgccactgtgctccagtctgggccacagacaggaccctgtctcaaaaaaagaaaaaaataaaccaagaggaatggtcatcagtgataagtagcgatacctgctcagtctgaatagctgtttatgggaccccatccttgagtctccctgggacctgctgtgtcctgtcgtgaggatgtgggcctggcgccacacccactcctaaggttaaacctggctagaagatgtatttgtgtcaggctgagctcctggaatttgtggatgtagaaagtcagtttaatgggtaccaaaatatag

SEQ ID NO: 36012 - DNA, 1376 bp, Artificial sequence
  DNA replication origin
gtgaagcatgtaatttcatatgatccaaatgtcattacagatctctgtttttatgagcaaagctaaaatgtctctggagataggattgtacgtgcattttatctttttatagttttcaatacgttccaggttttcttgggaggcatctcagtattaaaaaaggtatatgtatacatatgtcaaaacttatcaaaatgtctatgttaaatacaggcagcatagagtatgtcagtgatcactcaatcaagctgttaaaacaacaacaagttctcctcactctccccctgcgtttcgggtgtaaagagttaggataggggtgtggggagaggcgagggctgtggagatgagactgttctctgcccagggggtgctcagaaacaagagggtctgcagtagccaagatgcaggccagactgaggaggaggggctggcagaggaagaaattgctcccagcaggctggttggcacatggcactttgctgggggaatggtgactgtcagtggggcagtagaggagggagtgaacgaacctgcccagggggctggggctttcatcctgagtgcacattgatgaggcactaagatgggaagaaggcactcagggagagataagagctggagcagaggcgtggagagaggagctggcccggcatgcagatgcaagggcttgggccgggaagtaactggcttgcagtggcaggaggtccaagtgggtcatggtggagggacagagagtgggctgtggggtgggggccagagggtgggattggggaaggccaactcccttgggtctaggggttgaatggggagcagggagggagtcttctgccctaggaaccagaggctggtaggcctggagcctaaagggttcccgggggacgggtctttgagcagggactttgcagatgggcagaggggctggccttggagggtgggtagggctggctgcttggagccagggatctgtgtggtgcctggaagcagggcggtgcggtgggaagcgagccaggtgtaggtttatcctctctgcccctcgatggctgtgtggctttcagaagtccttcaaccaggggaagctgggtttcttcacctgcagggtgagggcagcgcccacgtcgcctgttctaatgatctgcttgataaatgtgcactgtcattatgaaggaatggtggcatgtcatcttcattaggcttagtggtgcctctaaagtgggtttttctttccgaccttctagattgccagcgtcctgacgtcacagaagccctctgtcctcctcactttggtaagtggctggtgtccaggggtggggcagtgcttggctctggggagggtttttatgggggccacctctcctgcagaggtcgggcccataggg

SEQ ID NO: 36013 - DNA, 2000 bp, Artificial sequence
  DNA replication origin
ttcctgtggaaacggtcttgctgttgtcagggttgcagacgccaggggccgtgggcagcctgaagccggcccactcctcaccccaggcctgttctgggatggggagggtggtagctctgaatgcatttttattcagagtctctgctaacaatagtgtgtggtgtctttttgatgtgagagcatttcccatcatttttcatcggagttgggcttagtggagggtggctttggctgtgggcctctgtgagtcagcgccccaggcagcttcggagcccagagttggggagccagtttgaccaggtcgggggaccctcctggaacctttgtaacgcattccgtccccggctctgggtatgcagggaggggcgctcagccttcccagggccatacccacatcttgtgtgagagatggatgcgggtatggtgggagggtttgcacatgcatggtgtatgtgtggggggctgtgtgtgcatatggagtgcacacctgtgtgtggtgtggtgcatgtggaggggtgggtacgtatggatgtgatgtggagaggacatatgttgggggtgtgtgatgcatgtagagtatgttgtgtggggggggcatgtgctgtgtttgtggtgtgtagggtgtttgtgatgggggtgtgtggtgtgtagggtgtttatgaggaggggtgaatgtgggtgtgcgtgtgctgtgttttgtgtgtgtggtgtgtagggtgtttgtgatggggtgtgtgtgtggtgtgtaggttttttgtgatgggtgtgtgtgtggtgtgtggtatgtaggttgtgatgggagtgtgtgtgtgctgtgttgtgtgtgggtgtgtgaggtgtgtagggtgcatgtgagggagtgtgtgtgggcatgtgtgtgctgtgttgtgagtgggcatgtgtggtgtgtagggtgtttgtgatgggagtgtgtgtggtgtgtaggttgtgatggaagtgtgtgtgtgctgtgtgtgtggtgtgtagggtgcatgtgagggtgtgtatgggtgtgtgtgggtgtgtgttgtgtagggtgtttgtgatggggtgtggtgggtgtgagtgtgttgtgtgtgggtgtgtgtagtgtgtagggtgtgatgagggtgtgtgtgtgagtggtgtgtaaggtgtttgtgatggggtgtggtgggtgtgagtgtcctgtgttgtgtgtgggtgtgtgtgtagtgtgtagggtgtgatgagagtgggtgtgtgagtagtgtgtagggtttttgtgatggggtgtagtgggtgtgagtgtgctgtcttgtgtgtgggtgtgtgtgtagtgtgtagggtgtttgtgatgagagtgtgtgggtgtgtgagtgttgtgtagggtgtggtgggtgtgaatgtgctgtgttgtgtgtggatgtgtgtgtagggtgtaatgagggtgtgtgtgggtgtctgaggggtgtgtaaggtgtttgcgatgggggtgtggtgggtgggagtgtgctgtgttgtgtgtgtagtgtgtagggtatgatgagggtgtgtgagtgatgtgtaaggtgtttgtgatggggtgtgggtgtgagtgtggtgtattgggtgtgtgtgtagtgtgtagggtgtttgtgatgagggtatgtgtgggtgtgtaagtagtgtgtagggtgtttgtgatggggtgtggtgggtgtgagtatgctgtgttgtgtgtgggtgtgtgtagtgtgtagggtgtttgtgatgagggtgtatgtgggtgtgtgggtgtgtgagtaaataatgtgtagggtgtttgtgatggggtgtggtgggtgtgagtgtgccgtgttgtgtgcaggtgtgtgtgttgtgtagggtgtttgtgatgagggtgtgttgtgtgttgtgtgttgtgtgtttttcccagctctgccccactaagtgtccccaggatcgaggcttccccagcctctctggtgcctccctcccacgctccttgtgattggcagggtgtcgggggccctctttgccgtgcaggcctctgagaaggg

SEQ ID NO: 36014 - DNA, 910 bp, Artificial sequence
  DNA replication origin
tggtcctttgagctgaaggactgggtaagctcagctgagctgagggagggagccagttagggaagaggccccagggttgggccaagctggcctctagcagggaggttgagccgggagccaggggcctgcctggtagggagcctggaccggctgctgttggagaaggtttccgcagagagagtggcccccagggtcatgggcaccaagtggccagtgaggactggggacctgctgcagattcgggagcgtggggtcactgtggcctgctgtgcagttggttggggggcagaggagcaggggggtggagtcaggacagcatgggtggtggaggggagacaagcccctgtggtcctcagggggatcagtgaggggctgtttctgggtcataagtaggtggagcttgggcagcttgccccgtgctgatgggggtcccacggcaggctcgggcctccggtcaccccgacctcaggtgtgggcatgcttggagatgctaacagaggcctgtgtggcggtgtgtgctcttgcctctgcagaccctcgttttggctggggaatgaaaccctgaaggtgccgctggcgctctttgccttgaaccggcagcgcctgtgtgagcggctgcggaagaaccctgctgtgcaggccggctccatcgtggtcctgcagggcggggaggagactcagcgctactgcaccgacaccggggtcctcttccgccaggtgagcctccccgcttggccacaagtgagcaggtgtgtgatggtgctgctgtcctgagcaggagttggaggccccagcttggccagtgctgccccttgtggccctccctgagcctctgtttcctcgcctgggaagtggtccaggggctccttgaagatgtagaacttgaagatgtggggcagcgggtggccca

SEQ ID NO: 36015 - DNA, 1511 bp, Artificial sequence
  DNA replication origin
tgctcatgtgaccctggcaggagggtcagggcctctgagggtcccatgtgaggtgagtgtgaggtgccccagaccacttcaccgtgctgtgctgtgagggcaggtttcatccacagcttcactgcagtccccaggcagagctctctgctcgcaccagctctgggatgtccctgcctccttgacctccgtgcccacccactgccccctggctggagagccgcaggggctccctcctgcacaccctgcccctgcttactcctcctccacctcatccccattatctctccacacccggcctccagcctgcttgctgggaccaccatccgttttttcattcattccatagataccgacacctgctctgtccctgccctcagggagcttacatgttacctggagggccagcaaacaaataaatgaagagtgatgggggctctagagagacacgaagagagctgggggatggggtgggtaggaaaggggcatttctgcagaggctggggtgggtaggaaaggggcatttctgcagaggctgggtaaaagggcatgggatgcccttgggaagagcattccccacagggcgccgcagcggcaaaggctggagtgttctgggggtttagggaagagcgaggatgcccgtgccacagtagaggaagccaagggtgaactgggggtctggatcccttgtggctggggagtgaagtctgcactcagagaagccagctggcacggggttgggcagggagtgtgtgctgggattggcattttgaaagggcccttctggcagaaggtgcagaccaggccacggggaagttgcggccaagagcaccgttgagagttgcctgcagttgtccagacgggacatggggaggtggccctggggatggggatgtgcaatgagggtagaccttgctggtggccaggaggtgggatgagataggaggccaggatggcctttgggactgtccaggtgcaggtgctttgtgtcgggggaggctggggaggagcgactttggttcaggtgcatcttctgcctgctgagggtggctgatgggtctgtgagtctggagctggacatcatcagtctgcagatgcagatggtcctttgagctgaaggactgggtaagctcagctgagctgagggagggagccagttagggaagaggccccagggttgggccaagctggcctctagcagggaggttgagccgggagccaggggcctgcctggtagggagcctggaccggctgctgttggagaaggtttccgcagagagagtggcccccagggtcatgggcaccaagtggccagtgaggactggggacctgctgcagattcgggagcgtggggtcactgtggcctgctgtgcagttggttggggggcagaggagcaggggggtggagtcaggacagcatgggtggtggaggggagacaagcccctgtggtcctcagggggatcagtgaggggctgtttctgggtcataagtaggtggagcttgggcagcttgc

SEQ ID NO: 36016 - DNA, 949 bp, Artificial sequence
  DNA replication origin
aggcaacctggagctccatctcccagtgtttccacccgaggcggcgggccggagaacaccaggaagcaccaggcagcacccgctgcgtttaggttggaaggtgctgtgtgctaagtgttgtgttagccagggacctggccccacgttaggagtttactccagggggccactaaggagagttgagagaggggacgatacacagagctgtgcgaacgttaagggaaggcaggcacatgaggctaggggcaggaggagagggaggaagacagtggaaagaagagtggggaacctggtcagaaacccagcaggggctgtgctgtggggcagggcgctgtcatcagagcagcggccctggatggaggggtgcccccagccatttagttccagggtccccagggagggagccaggggagtggatccactgtcttcctccctctcctcctgaccccagcctcatgtgcctgtcgttggctcagtgcgcctggagacaggaggcagcgtgcatgctgaggaggtcgggtaggttggcctctgggcacagtgcaggggggtgtatctggagggcaagtggggaaacctcaggccagggactagtaggggattgggcaaggagaagagctgcaggttcaaagagggaggccggggaagaccatccggaaaaggtcgtattggagccaagatgtgcaggaggtgtgacctgctcatgtgaccctggcaggagggtcagggcctctgagggtcccatgtgaggtgagtgtgaggtgccccagaccacttcaccgtgctgtgctgtgagggcaggtttcatccacagcttcactgcagtccccaggcagagctctctgctcgcaccagctctgggatgtccctgcctccttgacctccgtgcccacccactgccccctggctggagagccgcaggggctccctcctgcacaccctgcccctg

SEQ ID NO: 36017 - DNA, 1084 bp, Artificial sequence
  DNA replication origin
gcaggctggtggctgaggatgggcattttcggccggtcatgctattcgacgactgtggctgaggctgtccatagcagggtctcggtgtcattgcccctaagctgttggggattctgcagagacgagttttgcctctgtgcccatcccaccatgggctttcctgagtgaagggaaagggcgtgggaggccatgggggatatccgagcacaaggtgctggtgactgcacttttagctcctgacagcatggccatctgggatgtggtcatgtttacgaactctcaccgacttccctctgccctttcatcccaatggctgagcgtggcagaaaagcagccccagcccagaggaagctctggccgctggtgtccacccagccacctgctcaccctcctgggagggtaggaagggcacgtgggggagcgggcggggctctagtcatgtcagcatgtgcggctgcttctgaccctccacccttcctgggcaggctgggactccagggctgcttcctgccctgctgcggctgatgtggcatcttctcatcccacagctgtgtgtgtggccccgtgtgtcattcagcagatatgtgttgagcgtttgctgtgtgtcaggcaaggcaccaggcgagggcacggcagtgaccgaggcaacctggagctccatctcccagtgtttccacccgaggcggcgggccggagaacaccaggaagcaccaggcagcacccgctgcgtttaggttggaaggtgctgtgtgctaagtgttgtgttagccagggacctggccccacgttaggagtttactccagggggccactaaggagagttgagagaggggacgatacacagagctgtgcgaacgttaagggaaggcaggcacatgaggctaggggcaggaggagagggaggaagacagtggaaagaagagtggggaacctggtcagaaacccagcaggggctgtgctgtggggcagggcgctgtcatcagagcagcggccctggatggaggggtgcccccagccatttagttccagggtccccagggagggagccaggggagtggatccactgtcttcctccctctcctcc

SEQ ID NO: 36018 - DNA, 878 bp, Artificial sequence
  DNA replication origin
gagtcagggtcagcgcgggggccgcagctcctctccaccctcctggctggctccggccccacctgcccgcgtctggcggccccaccgtgtgcggctgcggtgggggctggggtcgacacgcatgttcgctgccaagacccccgggtaggagggcggcgttgcgaggaccccagggacccgggcgcttcccggaggaggcggtattcgagacggacttggaattcccttttcccagcagggcacttccccatttctttcaggggccaaatgtcaccccctcagggaatccttctctaaccatctatcccactttttgtgccctcatcatcacctgataaactatatagagcattgtttgtacttgttctttatcttctctgcatttagagtgcaagggcaggtatgttacctgcttctcagtagcccggtgccttgcacacagtaggtgctccatactgggctaaatgaaagaaagctgagtggtcgtagtgggaggaagggtggacagatgggttcaccagagcgttgggcggaatctcccagatagggagcatctgagcccagggtaagggacaaaggttgagagttcagagtgttctggggacaggggtgcatgcctggggctggttggaaggtgtggtgttccaggtggcggcttcagactttgccctgatgggctggaagggttttgttacaagctgcttgatctgttttttaaagattaggctcccctgagctatgtgtgagttcaatgggagaaggtgtgggtctggtggtacagtggggtagagggggcatggtgtaggagggagcagtattccagatgccaggttggaaactgaggtcagaatgggggatctagtggactgaatgcatct

SEQ ID NO: 36019 - DNA, 1180 bp, Artificial sequence
  DNA replication origin
cgccagacgcgggcaggtggggccggagccagccaggagggtggagaggagctgcggcccccgcgctgaccctgactcggagcgtgcagctcgccgaccggcgctgggactccgggccaacgggaagaggcgcctacccgcggcattcagcgaccccggctgacgctctcacccgcggtccggccgggacacccatgcccctctccacgccagcgggaaagagcgagggaggcgcagcactcacccggtggccgccgccatgttcgcccggcaccggcgtcacgtgaagtgcggcgtcagctgagcccctccgggtgccaatgcatggggcggggtaagggcggggcagggggcggggcatggagtccttgacccacctcctccagagccaaattccacgggacgggaaggggcggtacctggggaagggcggagccccgatggggcggggctcccggagattgggggcccaagagctcggccaggataaatgagcgggctgccggctgcagacagtaggtcgggttagcgggcagcatctgcagccttttcgtggtgggagggaggtcctgaagcagaggacatcttgattctggttcagtccccgatctggcgtaccagcccacccgggagaagaacacataggaataaagaaaccacgtgggaggagaggagggagactgacccaggctagggtcggggcagaggtggcgatttttgtttaagaagggaaagggcttgagcaaaggccgtggggcaactggaggactctaaatgtgcagcgtccaggagaatgtgcgcgagagaggggcagcctaagggaagcaagggccagaccctgcggggcctccactgtggggcctatgagttaagtctggtaggatcttttctaggtttcctgggctgcagaatggagaagctggaggaagggaagccagggaggagggcaggcgagaagtgggcacagccgagaagggtttaggagggagagtctgccagaaggcttactcctctgccccactgggcactggtactgggtgcagagtcctgcagagaaggtgtagggaccctgcagcagacgctgccctccctactgccaacagagtcagggcattacaagcacggcccaaatgcgttgcacatgtgagctcatagaaacctcaccacagccctatgaggt

SEQ ID NO: 36020 - DNA, 1073 bp, Artificial sequence
  DNA replication origin
tccaggagaatgtgcgcgagagaggggcagcctaagggaagcaagggccagaccctgcggggcctccactgtggggcctatgagttaagtctggtaggatcttttctaggtttcctgggctgcagaatggagaagctggaggaagggaagccagggaggagggcaggcgagaagtgggcacagccgagaagggtttaggagggagagtctgccagaaggcttactcctctgccccactgggcactggtactgggtgcagagtcctgcagagaaggtgtagggaccctgcagcagacgctgccctccctactgccaacagagtcagggcattacaagcacggcccaaatgcgttgcacatgtgagctcatagaaacctcaccacagccctatgaggtcgagactatctttaagtctattatacagatgaggaaactgaggccagagagtgctcacacagaggctgagctcatgaagccataccctgaggagtgacctcactgcccctgtgaaggaagggggccccacactgttgggggagggcgtccctggcgccaagggtgtacagatgtgtgtggtgtacagatgtgtgtggacaggtggatgggtggcccaggataggcgtgtggggctcctgaccccaccctgcagctgtcccacagctggaagtggcttctgatcaaaggttgtgggttgggggatgcttcttgtttctttatcgaaacaaggatgtgggtcaccatggccaggctggtgggagccaggggctatgactggagaagcagcttctgtttgtccccatgaagcagggaggagaataggccccttaaataggagcaagggagccagccataagcagggtagtgaagggcacgtggcacagttacctggaagcccagtaccatccctgctgtcctcatctgtcaggagagagctaatggggccacctcacagggctgctagagggttttacactcaaacctgcaggcacagccagagaccaaagctgccaggaggaatgtggcccctccagacagcccctcccacctcccggtcccagataaggaaaacgaga

SEQ ID NO: 36021 - DNA, 1133 bp, Artificial sequence
  DNA replication origin
tcagcaggatggaggctgatgcagggatgtccttggtcccttccctgaactgtcctcctcacagtccactgaatgtcagaacccagggcttggattctgggaccaggtcttgggatttgggatgtagtaggggtcaaggtcagggacagggtcaggatttgagacagctcttctcacccaacatgacccaatgggatgacctcccctgggccatccagaaggagggtgggatttgtcaggcccccagcgagtccccagcaagtcctctggtgcccagcctcagggtctctgggagcaggggacggggccagcggacctgtggggtccgtcctggagcagcttctccaccaccctcccctagatggctgggcccttcccctccctcccctccccctcacttcggggctcaggtgctggaaggaaatctctgaatccatggaaaccacacaggaggctggaaaccaggaaggaggagggggctgggcgctgccttgcaagtcctgggagggggagggggatattcccttccttgatgagtaaaagcctcaaataccattttctttctcaccagcagccacctcaccaaaggatgggttcccaattctctccagagctgagcagatgaggtgggaggagctagcagaccctggggtgggaagcaaggggcagggcagggggagaggcagggggatgagagtcagaggtagtggttggtgtggtggaggtggggctccggggtcaagctggggttgagcataggggctctggggccaggaggtggaggttggaagatggggtcagtagcaggaagagatggagtttggatggtggggttggagtgaggcaggcaggggtggtggggccagggtggggaattggggcgcggcacgcggggtctgaactcccatcagccatggcagcccctggtcctcacagaccccaagtgtccccttggtcccacccctggagagctctgtctgtgattcttataaatcacaaccaggccttttcctgcaaaacacaaagcaaccaacctcccctccccagacagtttaccgtgtcactctgcaaccagaagctgggacaggacagcagtggtgatgggctgggtgggggtgaggtaggggtgtctg

SEQ ID NO: 36022 - DNA, 1446 bp, Artificial sequence
  DNA replication origin
ccgccgcctcgtcctctctcctccccgcagcactgccggatccggcttgcgcgccgggaaggctcccagcgaagtgagagcgaagcctccggcgaggctggaaatagcgccgcgcccgcccggcgccccgcccccggcccgtgccccgccccgccgtggtggcggctacggcggtggccgggccgggcggggatcgctccagcgatgcactcggccctcccgggggctcgcgggcgccgcgcccacgcgcgctctgcggctcccgcggcccctctggcagcgctctcagaaagagtcgctgctgggcgcggtccggcggccgcgggggtgggagcggtcgtggctggggctgcgccggtctcccggttcaggagagccggactccggcctgacgctaggctccagaccgcggccagtgctgccactgcctcggtgggtcgcacgcggcgccaacccgggaaaaggaccaggcgtcaccggggcgggccttgaccacagcggggcaggggcgcgcgcccaggacccgatgctgcgggggcgcagggccggtgaaaggcggaagattgatcctgaggaagattctgggatatccctgggcttcagctcgcgtggaattcggtcaaggccgcgagctgcctcaggcccgggtgtccgcatccatcctcaaatccctggggctctagattctgctgaaagtgccctgcgaacaggtgctcccttcaggacttcatcctggaagtttgtgtcgggtcaccagcctgagagcggggccaaccgaccctcttcatacacactcgggaaaacagcgtggagggtggaaccggcccacggccacacagcaccgggacagagtagggacaggaacacggggccctggattcgggtccttgttcttcctaagaagaggcagccccagcctgcaggggacaagcaggccttgggaaggggggcaactgctttctcacaggagctggaggaaactgtgcacacagtcacctgttagtcttgaagggacactcagtattttcaaacaacagcagagaagcctttaataaagtgaaagacccttactctctcctctctaatggtacctgctggctggttggcctgactcctaccagctgacctagagtgagtgatggaattggggagtgagctgggcccatgggtcttgactgaccagagtgggggacaccaggcggagagcagagccactcctggggacggccagggagcccctcagccccagggccatgaggcctccttaatgccccaggtaagctcagagcatccaaaaatagaccaggacagataagaagataaatagaagcatgacaaagagatcatggtcttcctttaattcttgcagcaacagagtagacattatcactcccgtattacagatgagcgaattgagatgcaaaaatgccaccattttgctggact

SEQ ID NO: 36023 - DNA, 1773 bp, Artificial sequence
  DNA replication origin
actggaggcgcccgcggcctcgggtgcgtccgctgcgccaggtaagtggctgcgcccctgccccacccctgttcccgccctgcgcaggctcctggcctgcagagacgccaggaaggggtcccgagcgggccccggactgcaccgctcgccatccccgccaccgcacgcgaatgggagtccgaagctgcgggcggaggtgggcgcgcggggctcgggtctggttgcactttggggaccggccccggtagcgggaactttaattagactttctctccttggatctcactcgctgccgcgcttctgggaactgccgtccctcgggccctcttggtccctgcggactcccgctccgcctcctggccctcggtgctgcccgcggggaggcggcgtcgggcgctgagcagcgagcgccgagggccaggcaggagcgctcggggcgctggggcttcctggcgcgctcggagccggggctccggacgggttgcggcgggcagagactatgggggaagtttaagtggccttggcttcctacccagcggctccgtcgcgcgcgtccccgacccgcaactctccagggcaccggcctgtgagtgctggaggcgagtgtgcgtgcgtcagcgatggtgtgaaggtgtgtgcgtgcgtgtgtcgggagtgcgggagtcggagcctggggcggctccagggggcggggaaatgatccgtttggccgcgggaccgagccgagctctgacggcggctgcaactccggctaccgactctgcagacccgctctggcctcgctggaggccagccgggccaggagggcgatcacgggttttggcagtgcccgatgctggggcttgggtctgatgtgaccccgattccttctccagtgcgggactcccgccgccctaactttcgcgtacatcttgtctccaggcccgcgaccccgacccggagttgaagcggctgcggcgccctcggctgtgggcgctgctgcccggctgtctgttttaacccagaagtaggcgccgatcctggggctctctgtcctgcagtcgtctccggcgtcccagaggactctgcgtccctgggccactcccgctggctcaggagccgtgatcagctccgttaaggggaacgcgcgtcccggcccctctccatctgcttggcgcgatctggcgcagcagcagagcacgtgggagaggcgttgggtgcagggaggtagtagctgctttggagtggatggtggagaggggcgggggacagaggggtaagaggcagatcaacccccttttatttcccaccgccgcccaaggcccccaggagctacaataccaagcccactttcctgggtaacctttctcttctgagttcaccttgacccttgcctacctgtggggaagtctttccctaagtcctgccctaggacagggcacccgtggagcaggtgtggcagagcccttaacattttccagctgtcatgacctttcctgcccaccctgtgccctgtcccaaaggcaaggcagacaggccacaggaaggacactcatcccagcaggagatcctcttttaattttaatcaggacaccccaagcacagaaggcggcgtgggagttcattcaggagcgttcagcagactggcctctgtgaagtgacccacgggaggaataacattggaaccctgaagagagggacctcttgagggtctgaatgttggttccagtgggactggctgatcaattatccaatagcatttgaacacagaaaaacctcaaagccggaacctga

SEQ ID NO: 36024 - DNA, 1638 bp, Artificial sequence
  DNA replication origin
gtgctctcggggaccctctctgggggcccgcagccatggctggaaaccctattgcagggtcctcggagtcagcattggctccagcagcatgtgtttgccttgacaccagaagatggagccctgagccaactcacattcctccagtccccagtccttctccatcttctgtcctctgagatcgggcatcctccaggacagagcccaggtatcttcctatctctgaacacccacagtcaccttcccacactgcatcaccacagggtgtgcagggcctaacactgctatgctaggttcttaacacatgtctgttgtgtggttggatggatggacagatggatgcatggatggtgagtgggaagatggatggatggatgggtggatggatggatagataggtggatggacagattgatggaaagatggatgggtaggcagatgagtgggcatatggatggatggatggatggatgagtaggcagatagatggatgtgtgggtgggtgggtgggtagatggatggagggatgtatgaatggatagagggatggctgggtggaagaatgtatggagggaagggtggatggatagatgaatggaaggacggatagatggatggaaagttggacagatgggtaggtgagtgggcaaatggaagtatgtgtgggcagataggtgatggagggatagatgtttgtatagagggatggatggatggatggatggacagatggatggatgggtgggtgagtgggtagatggatggatggatggatggacagatggatggacagatggatggatgggtgggtgagtgggcagatggatggatggatggctgtttggatggatggatggatagatggaaagatggacagataggtagtgagtgggcatatggatggatgggtagacagactgatggatgagatggatggatggatggatggatggatggatggatggatggatgaagggatggatggatagatgaatggatggatggacagatagatgggaagatggacagctaggtgggtgggtgggcagatggatggatgggtgggtagacagtctggatgagctgaatgaatgggtggatggaaggtgggagggagggagtgatagatgaatggatggatggacagacggatggaaagatggacagatgggtgggtgcatgggcagatggatggatggatgggtggacagactgatggatggacggacggacagacggatgggtaggtacatgtagtaaaagaaggaaatacatgaggggaggcaaagatttgttggtagactgaaccgtagcccctctggggactaaattctctcaggaaacaggttgaaagctcaacatcatctccagaagctattttcttgcagttcgcacacccagcattcctgtggtcttgtcatcaggctgcctctggccctgtctttcttacctctttgttccttggttgcaccccttccccctcttccctggggctgggcattctcaattggtaacacgaacctggaggggatgtgaatggagatgaggtttctggggagaaacagctgtttcccaccccgagcgtaactcccatcacgggccttgggaagctggaacagcctaacagccacccccagttcc

SEQ ID NO: 36025 - DNA, 1730 bp, Artificial sequence
  DNA replication origin
gatttgctcaggtgtggtcgggcatggtgccccggcgcgccagccagaagatccagctctctccttaagggatagctggctctgatggtgaccatggcttttggcagagcctcaggacgaaaatgtccacccacatggtactggagcagaaagagcccctgattcctcggtggccaggtagggactggggaaggaggctccagcttctaaatagattccccccaaagggaatctccttgtcctcctgcgactttcccccaaagcagaccaaatgaggtatgacacagaatattctgctctggccaaaggttcacctcaccagagcttgcttcttaggtgagcccagcccaggcatgggcctccttggtaggcagagggggcgttccagagcatggccattgatgcactggtctctctgtgtcttcctgaggtcatcagtaagttaacgctggacaattaccctctacctgggcgctgcttagggctttgggggagaccagggcgagcaagatatgcttagctcaccccagaactccagagccagctgagaaggccaagatcacaaagcaaatgcccaggttagggaacttcctgtagcaagaggagaagaagcacgttccattcctaggcctggtgtgtgcaaaggtgtgggtgtgaatcatattccaagcatagagaatccacagtggccagaactggggcatggctgatggggtgtggagagagagtggatcgagctttctgaagggtcctttccctgtgacttaatgacatggtggggtgcaggaggaggtggcctgtgagagtcctggctgctccacagggcaggtatgggcacacctgggcagggtgcctttccagaccttgtagatcacatcaggaggcaggcgtgatgcagagaagagagcctcagctgcgagccagtgggaccacatgtttgctgcgtccccattttctgcatgggtaggggatggaggggctccagcactgagccatgccctaagctgcctttccctagagcctaccccaagatccctccagcctggatgtccacagccagcagcccataagcagttccctgggagccatgtggcagatccgctaatactgtcctctcctctgtttgcttttcaggaataaagttcaacatcaggccaaggcagccccaccacgtaagttctgagagtcagataaatctcagtgcacacagcccttgggaaactggggagggctgggaagaaaattaggagctcacattggatccattcttggaaagaaaaatgtgtccagcctttcccaggagccttgggaacaaagcccagggctctggacccatgaattttcccttccttgttagaaggcttctttgcacggtgctaatagaggccgtaaatctgagcccgcctgcaggccacctattcccgccaccctctcccaggccaggttcctgggaggaccgcgccatcttgtggccgaaatgacacttacacctcagcgggagggaggcctttgggtgccgggccagggctcagaccggaggggtctcacctacagagtcagcctgtctccctcacctgagagggacaggaaccccagccgtggtgagagcctgacctgtgtggccctcagtgcccagctgtcctttccactcagataaccacttctcttcttgccccaggacctcccaccaggcggctcccaggatggtgacttgaaggaacccacagaga

SEQ ID NO: 36026 - DNA, 1199 bp, Artificial sequence
  DNA replication origin
caccacagagtacacaccgctgctctggaaaccatgtgctttatttggaaccttaatccaagggaacctcccccctggctcgtagaaaagctgcaaaccacgtggtttggtccaaggcaatggctaagggagtgcgggacatcccttaccgctgggccccccgtcctctgggcctcagacttccctgctcatcaaaactgtcggctgagctccaggggtgtctgcccagttctcagcctctccctcagccaaggaatgaggaaacaggtacaggccaggggctggggtccccatccaaggctgggcgcctctgccccccacccggggcctgctgcctcccacagcgatggctcctcacgtcctcagagccctgttgctcccaggatgaggagccagggacaggaggatgcccgggagcacaggtgagtgaccggggcagggcggccccggccagctgcggcgcccctcagtacagatctgcaaagggcttggaatagttgaacatcaggtaatccatgtagtagaagtcgtaggtgcgctgcctttgcagggccgagagttgggcgaagtactggtgggcgatcctcgctgtggtccgcgcctcctgcgagtgccggtccttgaaccgggggaaggtcaggttccgcggcgcgcggatgaggctcaggaagaagttggcatcgtcctccatgctctcgaacttgcctacgaaatcgtagtcgatgaggcaggggctgcagagccggctgacatggtcccagtgaatgtccatccccacgggccggtgcacgtccagcaggtactggacgaactcgggaaaacgcaccccagagccggtccgcagggcctcccgagaggcattggcgcggtaccgggccaggatggccttgccgaagaccgggtgatagtagctgttggggtgctcaaacttgtcgcggaaggcggacaccagcctctcgaagggctcgcggacaaagagcatcttggtgtaggtgctgagacggtgcaagataccctggcggtcgaaggtgtccaggcgcttgagagcgctgccatagtggacggtgttgtgctggatgtcggcagtggacgaggccaggccggccagcaccatgagcacccgcttccaattggagcagccggccttgggcacctcgcagtagagcacgcggtggcggtcctccacgaagatacgggac

SEQ ID NO: 36027 - DNA, 1000 bp, Artificial sequence
  DNA replication origin
cggtaagggatgtcccgcactcccttagccattgccttggaccaaaccacgtggtttgcagcttttctacgagccaggggggaggttcccttggattaaggttccaaataaagcacatggtttccagagcagcggtgtgtactctgtggtggcgtgggagcacgtggaccctgggctgggctttctggggctctttctgccttcccggggcagcttgagccaggtgctgcaggccccactgcagagaagtccagttcaggagcagcttcctgggagaagagcacagaggacccagcggctctcagccaggacctgcaggcgtctgaggctaggtcccagtcaactggggtgcttccgtctcagtcctggcacattaatcctgaaaggaaaagataggcctgttcctatgggggcctcctggggtgtcttcttatcagtgcaccttgcaggggcctctggggactgccagagcagtagccagctctccaggcaagctgccaatcagggctgaggccggagccagggggcacggggcatgcatctcggtgggtgtggtactcccagcaggaagcaaggctgtccctggctttctgcacctctgagccaagcaggactctggcctgaggctgtcatctgcagacactcaccctgatccctggccccactcaccctgatccctggccccactcacctgacaaaaccacctcagggctgtcaggatgcacatgctctggaggaggagaggagaagccatagaggaaacttctccaaaagcatacatgttcacaccagagagggctccagaagtgtcagcagtcaatgtggttctgggaaggtctgggaggaggtgtttgttggagtgttgagtgtgggcatgagtgtggctgcatttgggttttgtttgtgatgggaagggctgcctgactctggagtctctgccctctgtcagcctgtctgcaggagcctctgcatgccctcctgggtcattctgtgggttgct

SEQ ID NO: 36028 - DNA, 1709 bp, Artificial sequence
  DNA replication origin
tttggggtaacatccatccaggagatctgagaagcagggagacctccctcgggttccagctggaagcggcttggaccatccaacagaagtgacccagaggggcagggaagaggctgtggtcagggcctggggaactcttgggacccgtggaagctgagacagcagatgctgaggggcccagaaagccagagtagctgccctgcaccttggccaggaccagggtccatgtgagaggagacagggaagtgcctggctgaggacaacctaaaaagaggtgccctgggtcccggtgctcaaacgtgagaccacgttcatgtgcaggaaagtgtccctggtcatgggtgcatttggtgaagccagaggcagtgcccctatggcatctgctcagcagggaacacctgaactctccgctgacacagcatctgggagcagcttggagacagtgaggatgacacagcccctcccctgggtgagcgtgtgtgtgcgtctgcatgtgtgtgtcgggggagaaggcacatgcacttgtatcatctctcagagaaacgccggctcaagctggacagacgtggacacacaacgcatccatcagtggggggcttttgttgcaggtggtgatgacagaagacaggtgcaggcagtgaccatgatcaccacttgacagccctgagagtgacctccaactgaaggccagaggcccagcctggagaccaacccagctccaacccccaaccccagccccaaacctcacagggctcaggaagagccgactcagtgcagtggtagggaagtatgtgtgtgtgcacgtgtgcatgtgtctgtgtgtgtgtctgggtgtctgtgtgggtgtctggcctgtgctgtggggtgggtggatgtgagcgcgtatatgtctatgtgtgtgtctggcctatactctccacatgtgtgtttgtgagtgtgtgtgtttggcctgtactgtgggtgggtgtgagcatatggatcatgtgggtgggtgtgtttgtgtggatgtctggcctgtgctgtgggataaacgggtgtgagcatgtgggtgtgtgtgtctggcctgtgatgtggggtgggtgggtatgagcgtgtgtgtgtgtgtctgtgtctatgtctgtgtgtgtgtgtgtgtttctgccctgtgctgtagggtgggtgggtgtgaacgtgtgtgtgtgtctctggcctgtgctgtggggtgggtgtgagcatgtgtgtgtttgtgtctgtgtgtgtctctgtgtgtatgtctggcctgtgctgtggggtgggtgggtgtaagtgtatgtctgtatgtgtgtttctgtgtgtgtctggcctgtacagtgtgagtgtatgtttggcctgtatcatgtggatgggagtgagcatacaggtaatgtgggtctgtgtgtctgcgtgggtgtgtgtctgtgtgggtgtctggcctgtgctgtgggctaaatgggtaatgagtatgtgggtgtgtgtggggggagggaggtatctggcctgtgctgtggggtgggtgtgagcgtgtgtgtgtgtgtgtgtttctagcctgtgctatggggtcagtgggagcgtgtgtgtctgtgtgtgtgtgttcctggagtgaggggtgtgcattgtgtgtgagcccgcgtccatgccgggtgtgggctgtgtgcagtctgagtcctgcccgtctccaggaccatctcgtgcacctgctcctcgtctctccc

SEQ ID NO: 36029 - DNA, 810 bp, Artificial sequence
  DNA replication origin
ctggcgtccctcactcctccactgctctacaagcccaggggacccagagctgggcacaagaggctgtgttgaaccacgggatccagaaatgggcaaaggtgaaagttgggggtggggtagtctgggctcaagtaacactgcccctacctccggggactcccagctgatgggtaccatgactcctgaatgaggaataggcaggcgccccggggagcagggtgtggggagaggactgtatgttagccccactgccctgcccgggccggggagggggtgtgggagccctgagctgggttcttcacactgccctggcctggctgcttgttggcccttctcactgcccagggcacgctttgcacaagaggctctgttgggagatggcagcagagggggacccggggtctgggccaggccggggctactaggggactatcctcctgcctctccttcaccctgggccggcctcaggaaaggaggagcaggggagcagctggaggtgccaagagctctggaagctagggaagggggcagggggcaggggcagagggcagagagagcaacttcctgtcacgggcctgggcgacccttccgcgccacctgggtatgccagcctgagtcaagtggacagtgagtgctgagcgtggagaagtgcaggtgcgtgcgcgaggtgtttaaagaggagaccaagggactgggaccctgagtgtgtcgggggtgcaggtgtcgggggtcactcgtgctgggtgctgcgctgtggcctcgtgtgcgttgcccagtgcccctctcccagcggtgctgtccactcatgcc

SEQ ID NO: 36030 - DNA, 1562 bp, Artificial sequence
  DNA replication origin
ctctctgtgtctcaatgtcttcatctgcaaaaaatggggaggatgataacggtcttccagggttgtagtgaggattagataagctcttatatgtgaaacgctagccaggcgaggtggcttaagcctgtaatcccagcactctgggaggccgaggcgagtgaatcacttgaggtcgggagtttgagaccagcctgtccaacatggtgaaactccgtctctattaaaaatacaaaaattagcccggtgtggtggcaggcccctgtgatcccagctactcggggggctgaggcaggaaaatttcttgaacctaggaggcggagtttgcagtcagccgggatcgcgaggggcagggtacaaaaaatatgaaatacttagagcagtacctggtaaaccggtaaattccatagttacttattactttaggtgccaaggcaggagatgctagtgtgataatggcttgggttaaatgacagccctggagagggagaatggacatggattcagtatgcccttgggaggcagggcgaaagggacgatccagggcttgtagggaaggctgagccgggaagccgggagaggaggggcttgaggtgtgaaaggtgtgcggctcaggtgagacgttcaagtggagacacccgctggacgtgccgacagctgggggtgaggcggctggccatgggggtctaccgatcagggctgcaggggcaaatccgggagtctagcacaggggtgatggggagctcgcccagggagtgtgtaggcagaagagtgcctgggattgccagcgtgcggcagtggaaggtgccttgtcagcggactctgcgggtggcaagattggaaggcaggccagggtggggtccagagtggaaaaggaggtgaagccatgggggctgaggggtgggttctgccaggaaggagaggagagaaatgggcaggcgctgcaggggccatctggctacggcttccccgtttttaaaggtggggcattgacagcttgttttctgctgatgggaaagcctgctgtgtgtgcagagagggcgcaggtgcgcgcgggaggtgcttaaggagtaggctaagggactgggatctggtgtgtgtgtgtgtgtgtgtgtgtgtgtgtgtgtgtgtgtcgggggtgacctctggccagtgcaggaggggaagtggaggacagggctcagcgtgggaagtgcatgcacttggctgagacagtgagggaccttccggttcttcccatttatttcaatgcagcaagaagccccgtcctgagccgtgcatgtttctgtgtgtttacgtgtgtgtctgtgtgtccgcgtgcatctgggtctgtgtgcatgcgtgtgtctgcatatctgtctgggtgtgtgtttgtgaggatgggtgtctgtgtgtctgtgtgtgtggttgtgtgtgtctgtgcgtctgtgcctgtgtgtgtgcatgcatttgtgtttgcgcgtgtgcgttcgtgttgtggttgaggttggagaaggcctgacatcaccctgatggagcgtgcaggacaagcccccggggaggttgtggatgtcactgctttaggg

SEQ ID NO: 36031 - DNA, 1166 bp, Artificial sequence
  DNA replication origin
ccgcccgccgccgagccccgcccgcccgagcagagagaagtgagcagaatgccacgctcatttacacacaaaatgattttgtgtcccattgcgctcgcagttgttcggctctctgggggtgattaaactggctgagctgcggcagcttgagacgatttcactaaatcgcttcttctgaagtcgcttctttgctaagctgttattttaaccataaaaggtaaacagaaggcgcctctcgagctcccctcggctccgcactcagggcgctggcccggggcgaaagtcctgggggcctgcacaattgtcccaggggtggccccggagaggcaggcgggccacctggtgcgcgccagcctccccaccccccccctcccgcctccgccgcggagccagccggccggtgtgaacttaggggcgacgggagagggcttgggccaaggctggaggcgccgcggggcggggtggccgcggcacccgaagcgcggggctgggctgggaggggttgccgcggaggcggggcggggacaaagttaaatcaagaggcagacacttggagaccacagatgggaagctcgcctaattaaggacgtaaaagcgcttttgttctcaaagtttattgttgccgggattaaaaaaaaattaattgaaactaatgctgttattcactcgtgcagttaaattccttcatgcacatttgagatacggagcgaaaacttgaagcttatctttctgcagtcgcgggtgggggccgccggaagacagaaaggcgctgcagaggcgggggtccgcccccgggtgtgtttgcgagtgtgtgccgggtgcgcgcgtccaggtcagggggtgcgggcgggcagcggggaaccggatctgcaggcggcgatccctcccatcgcggcccctctcccagccccaaaccctgcgcgcccgggaccaccaccagcgcgacagcccctcctgccaggtttcggactcgtggggtgggcgtcagaggacgcacatctgtcccactggagactttctctgattttgggcgccaagccgggacttgtgcatcccgaagccccagttgcgtgagcccgtttctgaccccggaaactcgccagctctgcagggcgctcggcccagaacaggggccagagtgcggggacctccacaagcgcgcgcgc

SEQ ID NO: 36032 - DNA, 907 bp, Artificial sequence
  DNA replication origin
ggcgggagggggggggtggggaggctggcgcgcaccaggtggcccgcctgcctctccggggccacccctgggacaattgtgcaggcccccaggactttcgccccgggccagcgccctgagtgcggagccgaggggagctcgagaggcgccttctgtttaccttttatggttaaaataacagcttagcaaagaagcgacttcagaagaagcgatttagtgaaatcgtctcaagctgccgcagctcagccagtttaatcacccccagagagccgaacaactgcgagcgcaatgggacacaaaatcattttgtgtgtaaatgagcgtggcattctgctcacttctctctgctcgggcgggcggggctcggcggcgggcgggcagggacccgggtctcccgccgcagctggagaagcgggtcactaccgggccagtttggaaacctgtgggccctcccgaccgctatcgctgaggcccctgcaacaggcgggccagggcgcactggggctgggtgctgggtttgatgctggtgctggtggaatgaacttgtatctctcactgcacccacttttgtgcttctgacttaagcagtggtctcggaaagagggtcgtggtcccgcacggatgcgcttgttgggagaaaccttggagattcacggcaaggcgtaaagcctggggcttccaacggtaagtttctggcttgccatgaacatcaggttgttcttgggagggaaaaggggctaagaacagagtggagcggcttctgtgatggaggcttggtgttcacgtcactttggaatagtgtcctggtattggggaaaacatcttgcagtccgctttgatagaatttcagccagaattccttcctgttcagtttatcctcagcgcgtcttcccttctgactcctccc

SEQ ID NO: 36033 - DNA, 1216 bp, Artificial sequence
  DNA replication origin
tgtctcaaaaaaaaaaaaaaatctgttctgtgttgggcaatttgcagggagaaaagccctgatgaccaaacagataccctttaaacaaaaggttaacccccaggtctccgggtgagcccgtcagggcaggtgacctggttccctgggtcatgcctcagtgctgagcccctcccacatgtcagggactctgggaggaaggaaactcaggcctggggtacactggcatgtattaatactagcaaatgtctgtccttccttccttcattccttcctctatccagaggaccagtagccctggggccttgtctttcatccagctcagttactgagtgccagcctctgaattcaggctgaaaacagtgaaacacacacactaggacctgccccacaacacttaacagtctagcgggcagacagatactgaacttgaagtccatgtgacctgggctgggcgggtttgaaagaaatgatgttcatctgggtggtgaaggcagaacggggccaaacaggtgtgagggccttggtgcaggggatgggggtggcagatggcttgatgcattccagaactggaaagaaggtgtcaagcctggagctttatggactgggaggggaaggtcaggaaaggaggctgctgtttgatgtcaggaccttggtgggtggcccagtgcctggcatttaactctgaatgcagtggaaggggtgtgtgcaggggaagggcagtcagatctgcaaattgggaagatctctctggctgttgggtggggaagaaggcagagaggggtgggggtgggtgcagtgaggcaattatggatgaggccccttccccaggccaagggaggctgggtggaggctttggatggaccaggatggagatagagaagatggagcaaggtggcacatcagacttctgtttagtacaggcacagtggctcacttggtcatcccagcactttgggaggccgaatggggaggatcctttgaggcctggagttcaagaccagcctggacaacatagcaagatgctgtctatacaaatttgttttttaattaaaaaaggccgggtgcggtggctcacacctgtaattctagcgctttgggaggccgatttaggtggatcacctgaggtcaggagttcgagaccagcctgaccaatatggtgaaaccccatctctcttaaaaatacaaaaatgagccgggcgtggtggtgtgcacctgt

SEQ ID NO: 36034 - DNA, 1144 bp, Artificial sequence
  DNA replication origin
cttgtggcttgaattctgagttggtaagttgaggcccggggtggaccaggctgtgggagtggggtttctgcccctgcatgggagagctggtggggcatcagatggagaaatcctgggccatgacaaaagatggggttgtctgtcatgcagttgtcatttaaaatctcaggagaatggccaggagaggtggctcacacctgtaatcccagtgctttgggaggccaagcaggaggatcatttgatcccaggaattccagaccagcctggaccttgtgtctacaaataattattattgttattattattattatcctggcatgatggctcatgcctgtagtctcagctgctcgggaggctgagtcaggaggatcccttgagcctgggagttcaaggctgcagtgagctatgatcacatcactgcactccagtctgggctacagaatgagaccctgtctaaagaaaataaaataaaaatctcaggagcaagtgagagtggagagagcagaggcccaggatagagccctgaggagcccttgcatggggcaggagaggcaggatgggccactgacccatgacaggcccagaggtcagggttagaatctaggcctccctccaggcggccagcaggtggaagggacttagggcctgtaggtcagggggctgggcttccttgcctcttcctcaggcatgagtcatggggacctatgggaccttggccattcccagtggggtgggtgtgtgtgagcgtgtatagtgtgcatatgtggcccagggcatggggccagtatcagcgcctgagggacagtctgtgcgaggctgcttagcccagaagggggctgcgtggcagggggcgggcttcccctccctggacactttatcacactctgcctgtttgggcaggggctggaccaggcacttggcacatcttgcatcctttgatcctcactttcattctctgagctggttgtttatgtccattttatacataagggaactgaggccgggcgcagtggctcacgccttgggaggccgaggcaggtggatcacatgagggcaggagttcaagaccagcctggccaacatgggaaaaccccatctctactaaaaacataaaagttagccgggtgtggtggcaggcacctgt

SEQ ID NO: 36035 - DNA, 894 bp, Artificial sequence
  DNA replication origin
cgcgcctccctccagctcactctgcccctggagggctccgcggacgccgggggtgcggcggggagggggcagcgtgcagccctcacctgtaccgagttgagccggcagtagccattgagcgggaagcggatgacgtgcgtggggtcctggttccagccggcgttgacggagttgcacatgacgtctccggtctcggggaagacctcctcgatgagggccttctcgccgctgagtgcgatccgctcgcccaagtcgggcgtgacgcgcaccaccaggcagtcacaggcccggctgcggcgccgctgctcctgctcctgctgccagcgctccagctcgcgcaccatgggctggagctgatagtagcgcgcctcctcgtacagcagactgaagtcctggggacaggcgcacagggtgttgatgtgggtgtcggagtaggggtggtgggggaagggggagaggggaggcggcctgccggttccaaccaattctgcaggaactgcgactcgcagggtattgtgtggactgggccggttgcacccattgtacagatggggcaactgagtggtttgcaagtataaagaacctagccttgtcccaagggcagccgctgatgtgcacctgtgccagcccccctgagcccttccatctggccccaggcactgggcagtgaagcctccccatggaaagacctggaagctccactaaaggacgaggctgtgcctatgcctggggacctgctgctgccttagaatcccaccgagagaagagatcatgctgggcacagggcagccgggcctaggagctcacagcctacccggaagcaaaaaaagttcttctccagccaagcctgcctgggtcagattttcagcttcatcatcaacctgccctgagacc

SEQ ID NO: 36036 - DNA, 1229 bp, Artificial sequence
  DNA replication origin
ggaccctaaggctatggccaggagtgtgtaccactgtgatgaagccatctacctctgggcatcccacagtggtgtcccctctctgagtcaccagctccctttagggtctgccccttcatctgcctgctgggacctcttctaccattccggcacctagaacatggcttttcatggaatcagtgtccaggaaagatctgttgcacagaagcatggatgaatggataaatgggtaggaggataaatgggtggatgggtgggtggatgggtggatgggtggatggatggatgggtgggtggatggatggaaggatggatggatgggtgggtggatgggtggatgggtggatggatggatgggtgggtggatggatggacggatggatggatggatggatggatgagtaggtggatgggtgggtaggtggatggatgggtaggtgaatggatgggtgagtgggtggttgagtggatgggtggatgggcaaatgagtggatggatgggtgggtgggtggatggatggatgggtgggtggatggatggatggatggatggatggatgagtaggtggatgggtgggtaggtggatggatgggtaggtggatggatgggtaggtgagtggatgggtgagtgggtggttcagtggaatgactggatgggcaaatgagtggatggatgggtgggtgggtaggtgggtgaatgggtggatggatgggtgggtaggtggatggataaatagagcagtgaatgagtggacaggtaaatgggtggatgggtgggcaggtgggtaggtgggcaatatagttttgctgtgtccccacccaaatctcattttgaattgtagttcccataatccccacctgtcatgggagggacccaatgggaggcaattgaatcatgggggcggttacccccatgctgttcttgtgatagtgagtgagttctcacgggatctgatggttttataagggtttttcccctgcttgcttggcagttttctctcctgctgccttgtaaagaaggacatatttgcttcccctcccgccatgattgtaagtttcctgaggccttcccagccaagcagaactgtgagtcaattaaatctcttttctttttaaattacccagtctcaggtatttcttcattgcagcataagaatggactgatacagtgggtgaatgggtgggtggatatgtgaatgggtggatggatgggtgggtgggtaggtgg

SEQ ID NO: 36037 - DNA, 945 bp, Artificial sequence
  DNA replication origin
ccagcccggcccgccccgccccgcccggcctcccggaaccggcccggagacgcgcaagaccccgcccaggccgaaggcgagctccggggccaggcagaccgtggagtagctgccgaggcgggcgagcccgagtcccgggttccagcccgggctgccagcctcctggcgcttttcgcccccgaccccctctccgatccggtgggtccccagggacaccctggcaggcgatgctggaaaagcttcttgggtgattctgagaatcacggtccagccctacttcactacacttggggaaactgaggcactgtcccaaggccgcaccgcgagttagcaaactgcaaagcctgcgaggagggcctggcagacgccgtgattttcccaggcctgagtcctgggagatctaggttaggccagaggggccggggattcaggaagtcctgggcgcctgctgccccgacagctccgcggggtgggcccagtcggggcgccgcgaaggtcagcagcctcgcgaaaatcaacaggaagacgcctttctttcctcaatccgggagtggagattccgtttaacttctgcagtcagcaggacaggaagcgctctctgtctcaggctggcgctagcagggacccgagggagtgttcatgggagccaggtattggaagcgaggcatccttcatttcctccgcagtgaggtctctgatcgcccgagtctggtttttcaaaatcacatcatgtgaagaccccaaggggaggtacccgggaggattcctttatatgctcaaccttgactcagacttgcaatcggcatttgatcaagaaacgtggtcagttctccaaacgcaaaatcaatcgctgattttacttttttacttggcatttccttgggatattctcgatcctgggaaggaaagatgatgaactattgtcttcaattctgtcccgctgag

SEQ ID NO: 36038 - DNA, 1163 bp, Artificial sequence
  DNA replication origin
gcctccccctgcctccaggtcgcccagcagagctttctagagctgggtgctcagaagaccccaggcggaggcaagaaccttgggccgcggctctgtgggaaaagccctcggggaagccagacggcgcgctccagctccccatcgcgggcgtgggccccggggtggaggcagttgggtcgcggccctgccacccccatgctgcacggcctcggcccagtgccaccacctctgtgggccgccgtttcagcctccagatggggtggcggcgggccccagcccttgccccaagtctctaaggaagggtctggcctggcccgcccagatccgagctgctgcgtacgcgcggggctgggagctgcaaaaacgcccggggcccagggtgagcggctgggccctcgggggacccggcgcgcgcgggggctccagctccgccctgttgggggccagagcaggagggaggccgccccagcttgttctgggccgcagccctgccgaccgcacgggacaggcgccgcgtcctctctgggcctccaagacgcagactagaagcccatagctgctgggaagatgggcaccccaggtctccgcgcacggccttcccagggccacggtgaaacatggatgcgacactcaggcaccttcccggcccccggcgaaaacgcaaagcctgagcccatgatgggctcggaagctctgcgggattgagtcatcagaggaatgctgatctagaagtacaatggctggaagacacccgcagaaaccgcgggcactggagagcaagtgcagctttaatctccaggcgtgatttagatggaaagcagcctgaagaccagttaagagaaccgcgagcagagcgcgctggactagcaccaacagacgtgagttcgagaccgtcctgccccttaatcctgtgtgaccttggtccattttttaagtctgtgagcctcgcagtgttctcattcctgaaaagagcctgccccatctccggactgcagtgagaacaaaaggagactatgaacatgactttttgccacttttgaagccccacactgaggaaagattttcctagcacttgggagattttctttagcaccagctgccaagaatgctgggaaggagacagccccatcccagaaggaagacaccttaaatcagaactttat

SEQ ID NO: 36039 - DNA, 1136 bp, Artificial sequence
  DNA replication origin
cggccagccgtgccatccgggagggaggtgggggggtcagccccccgcctggccagccgtgccgtccgggagggaggtgggggggtcagccccccgcctggccagccgccccgtccgggaggtgaggggcgcctctgcccggccgcccctactgggaagtgaggagcccctcagcccggccagccgccccgtccgggagggaggtgggggggtcagccccccgcccggccagccgccccgtccgggagggaggtgggggggtcggccccccgcccggccagccgccccgtccgggagggaggtgggggtgtcggccccccgcccggccagccgccccgtccgggagggaggtgggggggggtcagcccccctgcccggccagccgcctcgtccgggaggtgaggggcgcctctgcccggccgcccctactgggaagtgaggagcccctctgcccggccaccaccccgtctgggaggtgtgcccaacagctcattgagaacgggccaggatgacaatggcggctttgtggaatagaaaggtgggaaaggtggggaaaagattgagaaatcggatggttgccgtgtctgtgtagaaagaagtagacatgggagacttttcattttgttctgcactaagaaaaattcctctgccttgggatcctgttgatctgtgaccttacccccaaccctgtgctctctgaaacatgtgctgtgtccactcagggttaaatggattaagggcggtgcaagatgtgctttgttaaacagatgcttgaaggcagcatgctcgttaagagtcatcaccaatccctaatctcaagtaatcagggacacaaacactgcggaaggccgcagggtcctctgcctaggaaaaccagagacctttgttcacttgtttatctgctgaccttccctccactaatgtcccatgaccctgccaaatccccctctgtgagaaacacccaagaattatcaataaaaaaataaattaaaaaaaaaaaaaaaaaagaagacacaacaaatcacactgcaaactttttattttttgtatgtttttgggtgagaaatgaagtattactttgaatctatgctttgtggacattctgctgtgtttatatcagagaggccagggaaatt

SEQ ID NO: 36040 - DNA, 1311 bp, Artificial sequence
  DNA replication origin
gccgggcggggggctgacccccccacctccctcccggacggggcggctggccgggctgaggggctcctcacttcccagtaggggcggccgggcagaggcgcccctcacctcccggacggggcggctggccaggcggggggctgacccccccacctccctcccggacggcacggctggccaggcggggggctgacccccccacctccctcccggatggcacggctggccgggtggggggctgaccccccccacctccctcccggacggcacggctggccaggcggggggctgacccccccacctccctcccggatggcacggctggccaggcggggggctgacccccccacctccctcccggatggcacggctggccaggcggggggctgacccccccacctccctcccggatggggcggctggccgggtggggggctgaccccccccacctccctcccggacggggtggctgccgggcggagacgctcctcacttcccagatggggtggctgctgggcggagaggctcctcacttctcagacggggcagctgccgggcggaggggctcctcacttctcagacggggtggttgccaggcagagggtctcctcacttctcagatggggcagctgggcagagacgctcctcacctcccagacggggtctcggccgggcagaggcgctcctcacatcccagatggggcggcggggcagaggcgctccccacatctcagacgatgggcggccgggcagagacgctcctcacttcctagatgtgatggcggctgggaagaggcgctcctcacttcctagatgggatggcggccgggcggagacgctcctcactttccagactgggcagccaggcagaggggctcctcacatcccagacgatgggcggccaggcagagacactcctcacttcccagacggggtggcggccgggcagaggctgcaatctcggcactttgggaggccaaggcaggcggctgggaggtgtaggttgtagtgagccgagatcacgccactgcactccagcctgggcaccattgagcactgagtgaacgagactctgtctgcaaacccggcacctcaggaggccgaggttggcggatcactcgcggttaggggctggagactggcccggccaacacagcgaaaccccgtctccaccaaaaccagtcaggcgtggcggcgcgtgcctgcaatcgcaggcactcggcaggctgaggcaggagaatcaggcagggaggttgcagtgagccgagatggcagcagtacagtccagcttcggctccgcatgagagggag

SEQ ID NO: 36041 - DNA, 1411 bp, Artificial sequence
  DNA replication origin
gttgtagtgagccgagatcacgccactgcactccagcctgggcaccattgagcactgagtgaacgagactctgtctgcaaacccggcacctcaggaggccgaggttggcggatcactcgcggttaggggctggagactggcccggccaacacagcgaaaccccgtctccaccaaaaccagtcaggcgtggcggcgcgtgcctgcaatcgcaggcactcggcaggctgaggcaggagaatcaggcagggaggttgcagtgagccgagatggcagcagtacagtccagcttcggctccgcatgagagggagacggtggggagagcgagagggagagggagagggagagggagagggagagggagacggagagggagagggagagggactgtgtcttctaataatatgcaacataacaacaaaaaaaaagcccaactagcagaatttaatgttacccaataaatgggtaatctaatggcaatttaatgttacccattccttacactttttttttttcttttgagacagggtcccactctgtcacccagactgcagtgcagtggcacaatcacagctcactgcagccttgacctcctaggctcaagtgatcctcccgcctcagcctgtcgagtagctgggactacaggtgtgtgccaccatgcctggctaatttttgtatttttttaataaagacagggtttcatcatgttgctcaggctggtctcaaactcctgggctcaagcaatccatcggcctcaggctcctaaagtgctgggattacaggcatgagccactgcacccggccattccttacactttaagtgaaatcttttagctcattgaaacagcaaattgaagttaccccttaaaaaaccacaaaacagttgagatcacttgctgctaatcctgatgtttggcctagaataggtgatcaattcccaatttaaaagtacaggcaaataattaataaagaaatttaaaaactacaggctgtgtaatgaatttaactacagcaagacactgacctcaagggcagtattattgtaactatttttaagaattacaacacagagctcattatgtgtcagtcacatttcaacttacaaaatagctaacaatggatttgacattaactttataataaatttaatcatcatccctacagacaaggatctaattttactgcatgtaaagggaaaatatacattgccattctcctaaagacctgatgagttatgagtcttaaatttaaatttgttttagaaaatcatgtctcattgctcccatacacttgtgccagatgaagtgaatagcaaattattccccaaaggacatggacagacaaagacagacagacagacacgcataaactcacacagacactcctttacagccatgacaaatatagctgcat

SEQ ID NO: 36042 - DNA, 1340 bp, Artificial sequence
  DNA replication origin
ccctcacctcccggacggggcggctggccgggcggggggctgactcccccacctccctcccggacggggcggctggccgggtggggggctgacccccccacctccctcccggacggggcggctggccgggcagaggggctcctcacttcccagtaggggctgccgggcagaggcgcccctcacctcccagacggggcggctggccgggcagggggctgaccccccacctccctccctgacggggcgtctcgcctggcgggggctgacccccccacctccctcccggacgtggcggctggccgggcggggggctgacccccccacctccctcccggacggggcggctggctgggcagaggggctcctcacttcccagtaggggcggccgggcagaggcgcccctcacctcccggacggggtggctggccgggcggggggctgacccccccacctcccttccggacggggtggctgccgggcggagacgctcctcacttcccagacggggtggcagccgggcggaggggctcctcacttctcagatggggcggttgccaggcggagggtctcctcacttctcagacggggcggccgggcagagacgctcctcacctcccagacggggtggcggggcagaggcgctccccacatctcagacgatgggcggccgggcagagacgcccctcacttcctagatgggatggtggccaggaagaggcgctcctcacttcctaggtgggatggcggccgggcagagacgctcttcactttccagactgggcagccaggcagaggggctcctcacatcccagacgatgggcggccaggcagagacgcacctcacttcccagacggggtagccgccgggcagaggctgcaatctcggcactttggggggccaaggcaggcggctgggaggtggaggttgtagccgagatcacgccactgcactccagcctgggcaccattgagcactgagttaacgagactccgtctgcaatcccggcacctcgggaggccgaggctggcagatcactcgcggttaggagctggagatcagcccggccaacacagcgaaaccccgtctccaccaaaaaaatacgaaaacccgtcaggcgtggcggcgcgcgcctgcaatcgcaggcactcggcaggctgaggcaagagaatcaggcagggaggttgcagtgagccgagatggcagcagcacagtccagagggagaccgtggaaagagggagagggagagggagctaaaatatattcttatcaaataattgtactactaccaagtttagtttgtgtgaaccccataaaatgtaatatatgagtgcatgagga

SEQ ID NO: 36043 - DNA, 940 bp, Artificial sequence
  DNA replication origin
cgggaggtgaggggcgcctctgcccggccgcccctactgggaagtgaggagcccctctgcccagccagccgccccgtccgggagggaggtgggggggtcagccccccgcccggccagccgccacgtccgggagggaggtgggggggtcagcccccgccaggcgagacgccccgtcagggagggaggtggggggtcagccccctgcccggccagccgccccgtctgggaggtgaggggcgcctctgcccggcagcccctactgggaagtgaggagcccctctgcccggccagccgccccgtccgggagggaggtgggggggtcagccccccacccggccagccgccccgtccgggagggaggtgggggagtcagccccccgcccggccagccgccccgtccgggaggtgaggggcgcctctgcccggctgcccctactgggaagtgaggagcccctctgcccggccaccaccccgtctgggaggtgtacccaacaactcattgagaacgggccatgatgacaatggcggttttgtggaatagaaaagggggaaaggtgaggaaaagattgagaaatcggatggttgccgtgtctgtgtagaaagaagtagacatgggagacttttcattttgttctgtactaagaaaaattcttctgccttgggatcctgttgatctatgaccttacccccaaccctgtgctctctgaaacatgtgctgtgtccactcagggttaaatggattaagggcggtgcaagatgtactttgttaaacagatgcttgaaggcagcatgctcgttaagagtcatcaccattccctaatctcaagtacccagggacacacacactctgcctaggaaaaccagagacctttgttcacttgtttatctgctgaccttccctccactattgtcctatgaccctgccaaatccccctctgcg

SEQ ID NO: 36044 - DNA, 1218 bp, Artificial sequence
  DNA replication origin
taaagtgctcaagtactggttgaattagacgcgactggaacagaacgagaagctaaatcatgtatatccttagacaccaaagtctggttttctctctgtgtaacatgggatcagtagagtgagtagaggaaggacatgatctgagttagatttttttttttttttttgagacggagtctcgctctgtcgcccaggctggagtgcagtggcacaatctcggctcaccacaacctccgcctcctgggttcaagcaattctcctgcctcagcctcccaagtagctgagactataggcgcgcgccaccacgcctggctaatttttttatatttttagtagagacggggtttcaccatgttggccaggctggtctcgaactcctgaccggtgatgcgcccgcctcgggcccccaaagtactgggagtacaggcgtgagccactgcgcccagccctgagttagattttaagaagatctctctggctgctgtattgagaataaagtactgggggcaagagttgacacagaggcaacttttagaaggctactgcaataattcagcccgagtaatcgtggcttgtgggagaagtgtaggaatggagatgagaagtcagatttaggatatattgtgtatacataacggagaggtgtagtcagaacagatgtggaagcaagacagggcaaggctgactcacggcttttagtctgagcagctgagtaaaaatggtaccgtttacatcaaatagggaacggtggtgaaggagcaggttagaggggaaacagggagcatggctttggacccttaacgtttgagattcgacagaaaccctggttcacggaattgatccaagctacatactgataattgggattagtgagttacaatggcgttgcaagccatgaaactggttcagaccggctgaatgagcgggacaggaaggggctgaaacacttgagtccttgtgagagccccagctccaggggcagcctcgggggaagctccccgggcgatgactgcggtaatggagccgtaggagctccacgaggtgcaggttcagcgtcttagaaggatgagcagcggctcgccacagctcggaggcgggtgggcagcgctccaggccgagggccccgcgtcggcaaagacacaggacccacgacaaggcggccacggcctgagtcaaaaggaaggccgcgcgcctcctctccagcccgcagcaagcggg

SEQ ID NO: 36045 - DNA, 1179 bp, Artificial sequence
  DNA replication origin
tgggggagggtagcggagccggcgccgccgccatgttgggtctgaagcggctgctgtaggcgccgacggagcgagcgggcgtgcggagcgggcgacagtggcgtgggatctgcctctctgcgagcagctgggagcggcggcggcggcgccatgagcgggggcaccccttacatcggcagcaagatcagcctcatctccaaggcggagatccgctacgagggcatcctctacaccatcgacaccgaaaactccaccgtagcccttgccaaaggtacgcgggaccgggcctcagggtgggggccgagccgggcgccgctcggggctgctccccgctccggcccgcggcctcctcgttccctcccctccctccgtcgagctccgggaggcctctcgcctcccttctccgggccccggcgtcgcgggccggaccgcggcctccccgcggctccctggtttccgccccccggaatgtccgcgcctgaagcccggggaactacgggactgagtgcgcggcgggcggccctgaagtccgagaacgggccggagaacacggagaaacgcgtcttccaactccgaaattcggggcttctgccgtcttagcacaaaacaaagccggagtattcaaagaatttttccgcccagcttgagttcatcgcggatgcgttgactacacagcacccattttctcactttgttcatttcaattcgtggcgatcttcctctggtgaactcttgagtaatgtgctaaaactttgggtttgctctgcgacgcagacattctcgaaatgccatcgatgccgtggagcagatcccatctccctcggctcatcctctgttggtatttacctgttaaaccggaatcctcaaagcctgttgtgcaaccacctcattagggcgcgtggtaaaaatgcttgctgctgccccgacgcccctgtttctggaaacgggttcaagcttgatccaggatccttcttgaccaggcaagcttgacctttgatccaggctcagtgggcgttgactgatccctctggaggctctctgggaaagggaattcggccgagaaggaaggtgcccctacccacagtgttaatatttggcatccctagagtctgtgtgggttttgtttccgttcacacgtgcagggcctttgctccgccaggaaaccagaaagaaaataaa

SEQ ID NO: 36046 - DNA, 1400 bp, Artificial sequence
  DNA replication origin
cggccagcgcccgcaaagcccggcgtcctccacagcgggcgggcaaggggcgggagcccacggccccgcgccctgcggccccgagcggagcggcgccccgcgggcccgtctcgccgtctgccctggctgcggcccgcggccccgctgcccaccgcccaccgcccgaccccgcccgccagcccccgcctgcgcccgccgcgcccgctcctcacctgcgacgcgccccggcccccagcgcaccgccttggaccggctgtgtacaccggaagttacgtctccggtccggccccgcccccgcctcgggcggacgcggggaggttgcggatcccgcgcctagagcggactctcctctcgcattagaggggagggggcgccccggagcctcctctcctgggaccctgggcccccaagcgggacggccggggcggaggttgaggactggcggccagagccggaggtccacccagatcccccaccatggcttggcccccgggcgggaggggtcgggctgcgtcctcctggatttattactgaaattgactgaaatcgattactggcgtatggagtgtttcctagatgccaggccccgacgggcactgcaggaacgggtagtgctctctccctcataagtttattccttagtggtaaatacacaataccattgtcacatatccgggtgataatatagtaccaatggtgacaagtggtaggaggggaaagagtaagagggagggagagagtaccctgacctagtaaaggagagtgatccggaattcccccagggaaagagcaggagctgaggtcctaaggggtagaagggagaaaaaaaaaaaaaaaaacgagaagggaggagaacacattacgcagaagcagcagcaagggtcttccagttctgtgggttttgtttgtttgagacggagtcttgctctatcgcccaggctggagtgcagtgacgtgatcttggctcgctgcaacctccacctcccgggttcaagtgattctcctgcctcagcctcccggatagctgcgattacaagcgtgcgccaccacgcccggctaatttttgtgttattagtagagacgggatttccccatgttggccacgctggtctcaaactcctgacctcaggtgttccgcccacctcggcctcccaaagtgcttgagccacggagcatggcccagttttgtgttccaataataaatcagagtggtgagaagttaggtcttacttgacagtgttgcaaaactaatgagttttaagcaagaggtgatttgtccatacttgagagtgtaaaggggttactctagatgcagtgtggagaaggaaggactacggaggggaggcaagagtggatataaatgtgtacacccatgttcatattagtcagaaggtggaagc

SEQ ID NO: 36047 - DNA, 887 bp, Artificial sequence
  DNA replication origin
gagacgggcccgcggggcgccgctccgctcggggccgcagggcgcggggccgtgggctcccgccccttgcccgcccgctgtggaggacgccgggctttgcgggcgctggccggccgacggaagcccggaggggcctcctggcgcgaacccgggacctgggggcgcgtcggagactcggcggccgcggcaccgcaggggcgggtcggcgcccgtcaggcggggaaaggggacgctccctcggttcgccggggcccgggaggtcgcgctggcgccaggacccgctcccggaagcccgcggagggagggcggcctgctggcggcaggggtccgctggggctagccggggaggcggccctcacgccatcccggggctgccgggcgggctgcgcgcaccttcccggcggcgccaggctgccgaggaacgcgcttttccggccctgcggagccagctggcgcattgggcccgaggggagggtccgcggggaccgggagggccggggctgagcgtggaggacccgagcccgagggacgagcgcagagtcaggggtgtgtctttctgcgccgcgcggtgcgaggaaagaagcgtgcctggttggcatgataagaattttgtttagactttttagaaattttccagagactcagctttgggggcctccagtttgaaaataccttgttctggtccctcatccccattataaaagcagttaattctcctttcctggcaaaacactcaagacgacacaaaaagtcttaaggtagaaaatgacagtcatctgccagtctaccattcagtgacaaccactgctaacattttggtgataatcaataaatacagataggtattgttatttttatggactttacagtatgtgatttaaccaccg

SEQ ID NO: 36048 - DNA, 1016 bp, Artificial sequence
  DNA replication origin
tccctttctccactcctcatcatcccagttatgtcttattagttgaaacagtgtctcgctctgtcacccaggctggagtgcggtggcatgaccatagctcactgcagccttgaactctgggctcaagcgattctctcacctcggtctcctgagtagctagaactacaggcatgaccaccccgtcccggctaattttcttattattattatttgtagagactgagttgcactgtgttgcccaggctggtctcaaattcctggcttcaagagatcttcctgcctcagcctcccaaactgttgggattacaggtatgcgtcactgtgcctggccataaggtcattttatattctgttgtctatcaccatcagtacaatcactaccatatgctgagccaagtcctgccgatcgcagagcttagggctcagaatccccaggatcctggggggtagtgaagctgggaggggtcatgcccccaggccagggactgaccaaggagaatcgaaaggaaacctagcccagaaattccaagagaacatgctgcagagccggacaccttcacgtgcccccagcaagatgatgtggccctgagagaggagcggaccagagggtacacctgacagcagaggcaagttaggaagtccggggacagtcctaactctggatagcaaagatttaatttcaagcataaggcagccctggaaaagcaattgactgccactgagtattgatgaagctagcacttactgcaggctgtggcgggcacagttccaaacaagagccccgttctaaagatggggaaactgaggtatcggcatttagacatcacagaccttacttcagggccgctggacaggggtcaggcaggccctggagcacaggtggccatgggagtgaaggcagagggactggggcagaggactggtggggtggtcagttctggggcctgagctgaagaagtcgggagcggggcgtggcgtggcgtttccacgcccatggattttagacagctgttccg

SEQ ID NO: 36049 - DNA, 1611 bp, Artificial sequence
  DNA replication origin
tcggggactggggtccccgggcaccgctgcccccgcctccagaccccaggcccgcgtgcccggttccgggcgccgcgcgtggcagcccccgcctccggcccgcccgcacctgaagtggttgaagcggtccttgttggcatcgaagaggcggcgcaggttcagctcggagcggtgctcgcggtaccattgctgcagcttctggaactgggggtcccgggtgagagcggccatggcgggactagaaggtacactgagtgagacgcgagccgaggaggaaggagcgccggcagcgcgcagcaagcgaggcgcgtgggcgcgcggcggcctttatggcgcaggcgcccggcccggcccggcccggccccacccctgagccccggccccgcccccgacccgcgccccgatacccaggccgggtgcccgctgagcgaccttgcccgcggccgctgatctggggcctcagctcctctctccctacctcttgcgccgccgctttgctggcctctgcccggaagtggcagtggggagggtgggcagagcccggggatcactggagcccaggtgttggaggctgcagagagctaccatcgcgccgctgcactccctgtgcactagtcggcttcattcattcattcgacaaaactctatagatcgaacaccttccacgttacaggcagtgttctaggcgctgtggatacatatgtgccaaataagcaagtacaacagatgatgtgtgtctgctggtggtaagggctattgaggaaaaccaagatgaaaagggtgctgagaatcggggttgcaattaagaaaaaagtgactaggccgggcgcggtggctcacgcctgtaatctcatcactttgggaggccgaggcaggcggatcatgtgaggccaggagttccagaccagactggccaacctggtgaaacctcatctctactgaaaaaaaaaatgcaaaaattagccgggcctggtgacacgtgcctgtattcccagctaactcgggaggctgaggcaggataatcacttgaacctgggaggtgaagactgcagtgagccactgtactccagcctgggtggcagagtgagactccatctcaaaaaaaaaaaaaaagatgaggtcagagagcaaaagggaggcaacaagatcacgtaagaccttgtaagtcattgtaagaactctggggctgggcactcctgcctataatcccagcactttgggaggtgggatagcttgacgccaggagttcaagccgagcctgggcaagacagcaaaacactgcttctaaaatactaaaaataaattagcggggcatgtggtggtgcatatctgcagagtcccagctactcgggaggccaaggcaggaggatcacttgagtccaggagttagaggctgccgtgattaccaccactgtactccagcttgggtgacacagcaacaccttgtcttaaaaaaaagaaaagaaaagaaaagaaaatagggaaaggctgacaacaaaagaaataagtggtcactgaggggtcacaggactttccagggaacagccctgtccacatggcccttttctaagaactgtcaactcttaagatttcactgagcttccacaccta

SEQ ID NO: 36050 - DNA, 1511 bp, Artificial sequence
  DNA replication origin
gcaaggtcgctcagcgggcacccggcctgggtatcggggcgcgggtcgggggcggggccggggctcaggggtggggccgggccgggccgggccgggcgcctgcgccataaaggccgccgcgcgcccacgcgcctcgcttgctgcgcgctgccggcgctccttcctcctcggctcgcgtctcactcagtgtaccttctagtcccgccatggccgctctcacccgggacccccagttccagaagctgcagcaatggtaccgcgagcaccgctccgagctgaacctgcgccgcctcttcgatgccaacaaggaccgcttcaaccacttcaggtgcgggcgggccggaggcgggggctgccacgcgcggcgcccggaaccgggcacgcgggcctggggtctggaggcgggggcagcggtgcccggggaccccagtccccgacctccaggccacggactggggcccaggccgagtccgcacttcgtccttggagtctccttggagtgcgttcctgggggcttgcagcctcgccgggagtctcggccccgggtctgcttcgttacgaggaaaaacgggcccctccgtggggacatttcccctcctcctccccgtgcagctctggccatttgagcaggggctcctttcgcagttgtgaagagaggccttggctgacgcagcaagcgggaaagggctgtccctttccatccgctcctggccacatgagcttgggagcgtctgcagggcgggcagcccgggcgggggtgtttgagggagctgggtggaaggatggagacgtcgggcgtgattcctgcagaagacacctgtgcacgaccgggaagtgggaaggagtgtttgagcaaatcatgggcgggagtgcggccaagggagctctgatcactgatactggtggaggcgggggaggggagcgactgtggctccgggctagacgtcccgatggccatccctgtcatctggatgggtgcctgagtaacttacggcagaaagtggaagccctgggaaggggtggtcccccacttcagtccgggctcctcatccagggtctgcctgcatctacggtctgtgaggatggcttctttctctgggctgctgttgcagatcatcctggtgggccagcaggtgacagacaccaccactgtgctgggtggccgcggcccttgtggggcgtgggtcagggaggatgtttcttctgggaacagctcctgcttagggcatggctccccgctagggagaccagggtgtggtcagcagcatctccatctttctgcagcttgaccctcaacaccaaccatgggcatatcctggtggattactccaagaacctggtgacggaggacgtgatgcggatgctggtggacttggtaatgttctgcttggggaggcataactggtaaccgacagagtggtgggtgagctgggctcctgggagtccccaggaccttgagtatcttgagttcttcctctcattagacctcagtcacctcctctgtgctggtg

SEQ ID NO: 36051 - DNA, 1269 bp, Artificial sequence
  DNA replication origin
gggcgcccgggccgtcgggccgctgggaagagctcggatttccgcaggctgagctggaggcagctggcgccatccgggccggagagatccaagcagtcgacagctttccccacatcccgccccatctcccttccctgcgccgccttgctctccggcgctgcagggccgacccagctcagcttggaacccacggcgcttcgcccgtcccgcgcccaggaatactgtgcgcctagcgcagatgcgtccccacgaccccctgcctggcccggggccatgtggccgcgcaccggcctctgaagcccccatctgactgctggggaaggcgcccagaactaggagcgggttggttggggactggtcctcgcgctgggtcgcttcgcccaggcccccaaggccaggctagaagcaggcctcaggctcagagccggtgggcggcgagcctcccctgtggccatcacaggcagtccccgtgaaatatggggactcctcccttttccagcacctgcatccagggtggtgggtgaggcttcgaggggaggtcctggaaccagcggggccataggggccacataggtggggaatcgagaggtgactagggcttcgtgcccaaggacacaactaaaatcccttgtacaagtcacacggctatagggaagaaaaccaaaccgttatctgtcagggcctgatggatccaagaaaagtgttgcgtgagagagtactgttttccaggccctctctgctcagagattttcgggaaggcgcctacagtggctcagcgcgcagggagcccgcacgggaactgtcccggccagaccgcccagggcagtgtggcctcaacaccactgagcacccgctggggccgctaaccccagcaccttcccatagcctgcggagttccagcccctgccccaccagggtaggggaagtggaagcaagcatttcgtgtgcgcggagggtgggggagttgcgctgttttgtttttttcagacaaggtgtcgctctgtcccccaggctggagtacagtggtgtgatcacagctcacagtgatcacacacaccccagagtctcaacctcctgggctcaagcaatcctcccacctcggactcctgagtacgtaggagtacaggcgcacaccaccacacaaaacgctgagattacaggcatgagactccgtgcggggtctagaagccagcatttgggagagcaaatacccagggaagccaggacatgaaaaatggtctacctttcaaatgagaaaggaaaagccag

SEQ ID NO: 36052 - DNA, 866 bp, Artificial sequence
  DNA replication origin
ctgagccgcggggagcggggtccccggcgcgcggcggttccggagctcagcgcgcagcctgcgggcagcccacgggccagcctggcggggtccgacggcggcggcggtggcggcagcgcccgatccagcggcatcagcctgggctacgaccagcgccacggcagcccgcgctccggtcgctcggacccgcgtcccggtcccgggccgccttcggtgggcagcgcccgctccagcgtttccagcctcggctcccggggctcggccggcgcctacgctgacttcctcccgcccggcgcctgccccgcgcccgctcgctccccggagcctgcggggccggctcccttcccgctgcctgcactcccgctgccccctggccgggagggcggcccaagcgcggccgagcggcggctggaggcgctcacccgggagctggagcgggcgctcgaggcgcgcacggcgcgggactacttcggtgagctcgctcggcccggcagttccctgcgcgcatggctggggtccggggttccgagactgcctcgggtaggcggccggatcagcggaggagagcacggggctggctgggggtgcagcagtgcacggggttgggacgaggaaggtgcatcccctggggactggggagcgcaaagggtgagtgagtgcgcctggatccccagcagcggcttcacccctgcctctgggtcccccgacacacgaggggttctggccgagtgagttgatgtgcggttcctaacttaacaggcaagtcaggttcatgggcacactgagccattttctgataattttttcttctttcttcttttttttttttctttcttcttttttttttttttttgagacagggtctt

SEQ ID NO: 36053 - DNA, 1231 bp, Artificial sequence
  DNA replication origin
ctgcctcgggtaggcggccggatcagcggaggagagcacggggctggctgggggtgcagcagtgcacggggttgggacgaggaaggtgcatcccctggggactggggagcgcaaagggtgagtgagtgcgcctggatccccagcagcggcttcacccctgcctctgggtcccccgacacacgaggggttctggccgagtgagttgatgtgcggttcctaacttaacaggcaagtcaggttcatgggcacactgagccattttctgataattttttcttctttcttcttttttttttttctttcttcttttttttttttttttgagacagggtcttcctctgtcgccgagactggagtgcagcggcgcgtcctcggcttactgtagccgtcgcctctcaagctgaagcgatcctctcgcctcagcctcccgagaagctgggactacaggtgcacaccaccatgcccagcttttcttcttcttactttttttttttttttttttttgtagagacagagtctccctatgttgcccaggctggtcttaaactcctgggctcaagcgatccgccctcctcggcctcccaaggtgctaggattacaggcttgagccagtgcgcccggcctgatcttttcttctttgcgtttggtgctctcattctatctgatcctttcatgcttcgtgatgagcagaaaggggtgcttccccgtctgccccgccacggtatgggtgtggacagcaaccgggagatggagtggcccaggtaccaccggataccgcctgacccaggctttggtgatggtagcggctggagagggagactgtgtgagggaagaaaagcccactttgcgggagaggggaaccgtgccagtcacacggggctgccctcgcccggactgtgctgtggacataggatgtttcctaaaggaatcctgctgcaggtgcatctgcaaagcccagcagcctcacagcctccacttcccagtgtggcccaggccccctgatctctagttcttgggacagctcttggggtgagattgtgagcggggcagaggtatactgtggggcctggggcgagaacttcccaacccgccttctgtattaagcacctggctttggtggatggatggtcaccatgcctgggaccgtggctgtcctggggtttgtgtctttgagcgttcaatggtgtcagcagctcacggctgccctgaactggatctttttttttttttt

SEQ ID NO: 36054 - DNA, 1741 bp, Artificial sequence
  DNA replication origin
tttgttgagatgagtctcactccgttgcccaggctgcagtgcagtggcactatctcagctcactgcaagctccgcctcctgggttcaagcaattctcctgcctcagcctcctgagtagctgggactacaggcacccaccaccacacccggctagtttttgtgtttttagtagtgacagggtttcaccatgttggctgggctggtctcaaactcctgacttcaagtgatccacccgccttggcctcccaaagtgctaggattacaggcttgagccaccacaccaggccttcttttctgaatcttggccctgggaattccagttgccttggcctccccagattctcaactcaaggagaccacggggctcccctgggcagctggagcagtctccaggcagtcagtcgggtgttgtggggtacacttctcagatttcccctctctgagagatgatgggcctccctggtctgttgtccggggtctgagagtcactgtcatctgtttagcctgttgctctcgttgttaaaggtgggaggggaaatccaatttctcttcctccgttctggcgggaagcaagggtcccatgatggacacagggacggcagctgaagccagggagcaagtgaggtcttccaggatgagttggaaaagaaggagtgggggtcaggatagctcagggagcactgtcatttaaggacacacacaggcgaagtggccacaaagggagactgaggaggcctgggcaggagaaccaggaggctgccggcgaccgcgccccagcaagagcagagcaagtggcggtggggaatctgcagtagcaatcagggatcccttgggtgacaaggtctcctgggtgcaggcgagtggccccatgggagcaccgattgtgtcagggtacccaggagggaggacaaggagcagggatggtctgcagaggggccagggctcccctccagccctaacaggacctccgcgtccctccacttgctgggccgtcctgtggactgtgcggtcccctgcagattgtccagtaccgagggcagcaaaaggttgacgctgagagtgagagcggggcaggcggctggtggtggtgctgtgctgccgcgaggctgttggatggggactgatacctccgggaccccgcactcctccctggcctggtgtgcagcggtcggtagcagggcccagccagtggcctgtggtgggacagacaggagaccagggaaaggagtgatgtggtgtcactgcagcagcccagctcccttccctgcgcagggcgggccaggtgttggtgtcaggggctctgggtaacgggtcaaagccgccagcattccagccccgagcccgcaacggtaaaaactgcgagatagggtacttgaagcccgccccctgcttcccaggtcctctcaccattgcctcttcagaccacccgggggtggcattcatcccttcaccctgctccagggacccctgtgtggtgggaactggtggacacttccttccgggccccccagcagcttggagcacagggccgctccctcctccacccacttgcttcactttgccctcggggctgccaggttgtggttgtcttcactttcgtttctccttgagtctcttctgcccaggcctgttctcttcccacctcctcatggaaggttctgctgtttgccgtcttctcttttctagtgatctgcaccccctggaagaggtggtctcctgttttgtctttaaaaaccatcac

SEQ ID NO: 36055 - DNA, 1295 bp, Artificial sequence
  DNA replication origin
agcaggggggtcggggggcccaagccaggagccctggaagagggagcagggcggcaactggggccgcaaacacccatcaaagtccccaggaccaattcccacagacaccacgtggccacaggcagtgccctttgcaggccccctccccaagggtgtcacccctcaccccctcctgggaccccgcctaaaccaggcacccttccacccaccagcaggaactgcgctaggagatgcaggaacacccatgtccccgccagccccgccttccagaccacaccctgcccgggagtgcgctttgcgaggtcggggtcgggggggagggcgggggccaggcccctgaacaacagacagcagctcccacccagcaatgcagccgggtcacctcgcacccctggccaaggcaggggccctctccagcctggtgacccacggcctaccctgaggctgcagggcacagggggcctccaagtggaaagctggtgatggggtgggtgggaggcagggcccgcagggaagtgacttgagcaggcacagacggtgaataaatagaagcttccacgcgggggtccggcccctgcagacagcagctcggtgggaaactgattggagggagctcccctgacgctgaccagggccacccacgcgggccctccctccacacccacacccaccccggcccagggacgggttttcccctgctcagagctcagtgacgtgcacagtgggtgagggaagaggcccaggttggaggcgccgcaggtggcaacgacgacacagtaggtggcccgccaggggatagcaacggcgtccctcctccccgctcagctgcagcccgcagtcctagggaagaacacagcccccagccccagagtcagcagacaagcgcacatcagaggtcacgggacgggggagggacggaggggaggggcagatctgcagggtgccgcaaaacaacatgaagactcttccgccgggcgcaggggctcacacctgtaatcccagcactttgggaggctgaggcggctggatcatcgcttcggtcaggagttcgagaccagcccagccaacatggtgaaaccctgtctctactaaaaatacaaaattagccgggcatagtggcacatgcctgtaatcccagctccttgggaggctgagactggagaatcacttaaacccgggaggcagaggttgcagagagcagagagcctgccattgcattccagcctgggtgacaacagcgaaactccatctcaaaaaaaaaaaaaaagactcttcctctgccagagggggtatgg

SEQ ID NO: 36056 - DNA, 1902 bp, Artificial sequence
  DNA replication origin
agccgagaagatctgggaaggagtccgtcagagagccttgggccagagttccaggggctctgagagtggctgccgggttggacagtccgatttccagtggggtcccacacagatgggacatggcttaggaggaatcccaggctgcaggcattccttggcctagtggccagatttccagcacttgaagcaagctcctggggcaggcagtcctgaaggaacgcctggccactgtggttcaggtgtttggagttcttgtgtgctggagatgtgcctggggtttctctcacagtggaggcaaggaattgcaactcagaaatatgttgctacttggctgcctctagtctattactgtacatcttgaaggtggggttaattaagtcctgttgtggggtttgagggctggagtttaatttttggagttttatttaatgttgggagcagattaggtaataaaatgtatattgagaataagacagctttttgaccttttaggatctagggctgtaaagtgtctcagggttgctgccagacaagccatgaactgggctgggtttttatatttgaggaaaaagagcctaaacgctaactgatttgggagaggtcggataaagaaaaaggagcgttaaccttgactatgcctttagctccagctacctctttaagacgaaattgttgggcaggtggggaagggctagtcgtggaatgaaactgtaagccggaccaggtgtgaagaagggaggtgatgaaaggattatagggtgggggagcagaggctgaggaagaattgggacctggcttggcctggcgaggagcagcctggggaggaggggagatgtcagatgggtctgtaaagaagaacgattggaaagacgcagcaacacttgcggttgggactgaggggacaggcgggggggggggggggaagaaggaagatttgggatgagttgcattgggaacagagactagggagggaccagtgtgtaaaagaatgcctggacatcaagcacctcagaccatttgcccatattatgacaagaattatctagatcttgtaggatggagaactcgaaagtgccattttctggctatttggaaccattgtcaagtttgtattgaggttaagtggcattgcagaagaaaataaggcatttaggctttaggtcaggtgtgagttgaagaggttttaagttcttgagaacacaggctaaggaagaagaaggaggaatggagggtggaagtttgcctatagggaaggaggcaagtccagagaaaagagagggtagagacacggagagaaggggaggggggtgcttgtccccctggaaagtggagagaaaagagagggtagagacagggagagaaggggtgggggatgcttgccacccagaggaaagtgaagaaggagtggggagtgtttccccacaagaaagtggagagaaaagagagggtagagacacggagagaaggggtggggggttgcttgccccccaaaaagtggtgcttgccactaagggtgaaggatcaaggcaggcgtccccgcagtgatcagacacctctgaaacgtgggtgaataatcaagcaggtgtcctcacagtgattaaacaccaagggaaggctgttttcccgagtccttgactggcaccagagttttgggctcacggataatacgcgtcttctctgtctctatcagaaaaggaactgaaattaagagaagggagagattgaagtgtggcgccaagactgaaaggagaaagaggtggagggatagtgagagaagttggagaagagagtaaagagaggccacctacccaatttaaaattggtgagatgttccttgggctggttggtctgaggaccagagattgtacgtggatctttttctcatggagcaaagagcaggag

SEQ ID NO: 36057 - DNA, 2452 bp, Artificial sequence
  DNA replication origin
tatctttggtgtctccatgacttgaaggcaaaaagttcaaacttggccttttcttttaagggttgaaaaagggaggacagaaccaagtcttggagacactggatttgctgcaacacaggaaaatgagatgtgcagggtaaaggatgggaatgaggaggaaaaggggccacttggatttttccaggctaggaggagccatgccgggcagctctgggtcaccagggccactctgcggtcccccgccctgcctccaggccctgtcagacgctgcaagcccagctcagaagcctggcctgggaccaagttcactgcagcaggctgggcccttgcattctgagctgggtgcggatgcgctggtgctctgggaagtcaggggctttgacaactgaaggcaaaggagccgggcacctgagggggtcccgggggagggggtgccgggggaggggatccggcgtcgtcaccctccagtccttgcccacaggtcagggagcccctgccatgggggaaggaggctgtttcttttgtaaactggtggaggcgtgcctcgcccctgggcctgacagcccaaagagacacgcctgagacctctggacagagtacagcagtatgggcgtaggtttctctgcacagtgccttatccatgggcacgggaaaagttatgggatgacagaaaagatgagcaaggaggtctgtggggtggctattttgaatccaccaccggtctaatgtggaggtggtccagtcaattgggcatggggtatggcaatctaaatgccagcaacctttaaggtgccagaaatcccacactctttcccataacaacacctgatttgtttctgacagaaaaggcaggactgggatggccaacccaaatgattgatgagaaatttgacctcctgtgatagaaaatcagtactgaggaccttgaagaagttcttacccagttgtctagggcagtattgatgacctgacatatgaaattttaccaaacaagacaatagaccctggggcatacaaacaattatgacaattttttaatagacagacaaaggaaggggggcccgtgatgggatcagtcagatgcccatctggccactctccctgaggggacttaggctcctcttagcattggcaggctggtataaacccctggcttggatcgagctatgcctgatgctgccttaagccttaagaggtcaccacggaactgcaggtgagggcccattcaaactccgtagctttcaccgtggagctacatactggaaattcaagtgcaagcccttgaactccacattcacgcactcattcacacagagtttataacagttttcttattccctttccaaaacagaggtctccgggagacctgaacgagagaaggagaagagatagagaaagagggagggagggagagagagagagagaaagagagagagagatagagactagtcttaacagagaggcctaacagaaaaccaggactctgtcctccagtgtcctggaacatgggcagagtcaagggagggccatcgtcagggctgcttccctcccagagagacacagaggtgcctaacagaaaaccaggactctgtcctccagcgtcctggaatgtgggcagagtcaaaaagggagggccttgtcagagccgtttccctcccagagaaacagagtcagatctgacttactttcccaggaccagaaactgaggactcaggagttgaatttttgtgggcacacaccagtggtcgatccattcccgtctggaagatagggtcttatggggccctggaacgtcttctggtggtgcctcccctataagtctgctgtctgtccaggggagcctggaatgagtctggctctcacccggtgacaaaaaaatcttgctggggcctccaaatgttgtaactgagctaggtacagagaaatgccacactctgagacgaattcaggagtcctttattagctggtgaccgagagacggctagtgctcaaaattctctcagccccgaagaaggggccagattttcttttatactttggtttagaaaggggagggaggcagtctagtgaaaacaaccttacagaagtaaagcaggcaaaaaagttaaaagaataaatggttataggaaagcaaacagtttcaggtgcagggctttaaatctttcacaaggtgatagacgcggggctttgggtgttatcaaccagatgaattcctaggaactgtggatatagcttgccacagtattttatcagctaattgcatccttggacgtgctgggagtcagcttgcataagttaagtccttgaggaaggggtgggtaaggggctgtaagtgtaggagccaagatggggtctgtctggctctctcagctaagggagagtcaattcaggttaaaacaaggttagctatcacacacatactttgtatcttcttccttgagatcccagtcct

SEQ ID NO: 36058 - DNA, 1895 bp, Artificial sequence
  DNA replication origin
gccacgtggttactgtgggatttggccttggggaatctgatggatgttgacagccagttcctgcctcttttcctcttctggagcccccttgctagcaccgcgaaaaaccccgcacagctccagccgcggggctcgctcaggagcggccgcgaggggacacccaggttgcgctgcaggaaagcccttgtctgagcagggcacggggctccacgacaaaaggacacgatttgacttaaattatgtttttcccttgatgatattttcattttctttaaaaggatgtagttttcttggaccgtggaccaagcttatttcttaaacagattccagcaaactcacaagtgtccttcagctctaggcctgctgtgtgtgtgtgtgtgtgtgtgtgtgtgtgtgtgtgtgtgtgtatgtgtgtgaatgtctggggccaaggccagggatgactgggctgtggtgagaacctgacccttcccagtcttccctgatttctcttgttcctgcagctacctagtttggggatggatggggaaggaggccccaggatgagtcctcacgtctctgcatcccactgggggctgcgtacaaatggatgaggaccccccccttgaaaggctcctgggtggtgtaggccctggatgggagagttggggggtagagctggatgtgggatctagatcagggatgcttggggcttttgatgccctgatatgggattgaggagggggcatggtcaatgctgaatgggtgtgaacagatgactggggatggggagcaagggagattctggtgggggaagcacgggaaggttgaggtcagagctggggaagctgaattccaggttgaggagaaggaggtgtggtcgcagattgcagggaacccagaggacttgagcagggaaccctctggccaggtgggtgtggcagttgacattggagttggggtgggggtggagtcgggggtggagctgcagatggcaggggcagtgttgaaggtggagggtgacggttgaggcagggaaggggcagtggggtggggataccccatcaggttgtcccatgcctctctgagagatgcctgcccttccacccgcccttctggggtcagtccctcccacttcccccttggctgaagaacacacacagaagctggatggatgcaggtgagtttattaggcagcattgtcccgcaggggacaggcctgggtggggaggtggggggcagccgttcccaggcttgccccaatcagcacagcaggagagagagtagaggcagcagcagggcgggagctagggagggtggggccctgggcccagattctcatggttgggacaggcagcctggacaggaacccgaggtgcctatggatggtgttacttcagtatcgtgtcggcacactggttgttgatttcttcctgtggggaggggtgggaggccgaagggaggggtcttctggggaaggagggataggatggggttgattgcggaggctgagcatcagagcgcggaggtccagcgccctgaggtcttgtccctgggcagctgcccgtgtgagaggtggttgcttggtgagaggtggggaggtatttgggtggagagagaggctctcagggaacagagtccctgctctcaaaggaggtcaagggctgtggggtggcgctggtggccgggccctgctgcactcaccagttgctgcacgacggcctctgtctcctcgggggtcattgtgtcggtcacgcagtccttgagtttagaggatgtgtttctttccggctccgtgaggtggtatctgttgacagtgtccatgtaggtgtccttgtccttggtcagaaactggttaatgaccgtcataagctgcgggcagagtttcctgggctctgcggggagagtaggagcgt

SEQ ID NO: 36059 - DNA, 952 bp, Artificial sequence
  DNA replication origin
gctctgcggggagagtaggagcgtgtgatcagggaggggtgggtgccccggggctgcagcgcggcccgggcttccctggcggggcctacctgcgagcagcggcagcagcaggagacccagcagcgccagggctcgggcggacgccacgcggttcggggtcggggccggtaggtatgcgggtcacactggggcagtgcggacgcaggtccctctggcatctcgggagacgcggtccttaaactccgtgtcctgggggcgggcccgggtggcgtggcttggctggacagggagggtaggggcggtagtggggtttgtggcactccagcgtagcaggttgcatctgcgggtccccgcccctgccccgcccccagcccctcccatggtgctggatccaggcagctgatgtgcaggcggggacccctggctgggcgcggtcctgggcgcgtccctgcgcggttcaggcttccatgcgcgctgagactccgctggctctgtggcctgccccgtcgtgtgtgcgtcacgaggcttgggtgcacgcgtttgagaatgggatatgtgtgtgtgagtggaatgcgctggtgggagcgtgtggggtgtgtgtgtgtggcacctgaggttggggtgttgactgtgtggggtgggggtctgtgattatatgaatatgagggtgtgattgcggctgggacagggcatgtggctgcctctgcctctgcatctgagagagacaagaagtgatgggagagtcttgtgtgggggccctgcggggcagggacaggggacccttcttcactttatgccatctggaggtgaaaagccagctaagtagcaggcttcatcctggagacagaggctgggagactgcagctgaaaggtgtgggttccgggagggctgcagggggctgagcagcagcgtcagggagcagagggccgccctccctccatcttccttcct

SEQ ID NO: 36060 - DNA, 2077 bp, Artificial sequence
  DNA replication origin
gggatatgtgtgtgtgagtggaatgcgctggtgggagcgtgtggggtgtgtgtgtgtggcacctgaggttggggtgttgactgtgtggggtgggggtctgtgattatatgaatatgagggtgtgattgcggctgggacagggcatgtggctgcctctgcctctgcatctgagagagacaagaagtgatgggagagtcttgtgtgggggccctgcggggcagggacaggggacccttcttcactttatgccatctggaggtgaaaagccagctaagtagcaggcttcatcctggagacagaggctgggagactgcagctgaaaggtgtgggttccgggagggctgcagggggctgagcagcagcgtcagggagcagagggccgccctccctccatcttccttccttctctggaccccagagcactgtgtccccctcccacccctacagctgcaggtggagccagctggaggggtctttagaaggaagggggtcctctgagggcagagagggccaggaggctccctgaggacctgaggcccctctgggcctcccagggctgggcctgtggtctgatctgctttgccctgggagagacgtgctcagtggtggggtttgtgtagctgtcactcagtcacctgcctgtgcccagccacacacctgtgactcccatgggccccacccaatacacatgtgggtcttcaagtgccgtgaggggaagttcctgcctgtgtcacatgcatccatcccacccaccacactgcaggttacaggactgccccacaagcgccaccatgccagcctgacgttacctggcacacaggtatcctcacctgcatgacatgatcagatcatgcactttctatgccagggccagtgccagggcaagcttgtatcttcagctttggggacactgtggggcgggtggtggctggaggccagggaagtcaccaggctggagagggttgatgtcagacatctcccgtgcaccactttgagccacctcagcctcacctgggactctggctggcactgggactagcagttccatgaaggtttagagcatctctaggcttaggaagggcctcccttgtcatcactgtggtccgggctgcatgccttgtgaccaagggctctggacagcagatgcagccagccagagtgtgggggtgaggggcctgggcacaggagggatgggaggccttccctgcacccccatggccaccatttcagagggaggacagcaattatttgggtttgtcctgtgagcggtggcagagagaaggccccagggcaggtctagggccagacaggcaccctctgctgcagcctcggggccaccaggcacgtgatggggccggtgtggggatgtcccctggccaaacacatgggtagggggtgctctggggtcagtgggtgggtccgggcgtttgcaagagccatgttaagatagacagtcctgaaggatggagggagggggcagaggggtcagagaatggatggatgggggagacggctcctgccgcttcctggcctctaagtgggggtgatgggtggtaggtgagtgcagtgggagctgcaaggctgagccagggaagtggaggcagcagagatgcagaccttgcctgaggctgactcgggactggggcttcttagaggccagggccctagagctcctggacagggagtttgcaggaacagtgatgcagcatacaacacagcacaactcgacacaacacaatctgccacagcagagcagcgtgcggtgcactgggctgcagcagagcatggcccagggtccagggagtcatgtaggctccagggaatcatggagcaaactgacctgagccgcatccctcagccaaggcacaggcccccagccttgagccacccacttccttgggacagctggatgccctagtgtccctggggctgaggatggggctggggctgctgtccaaggtgaggtctgactctaatcccctgtctctaatccccagtcgtttggggaacttgggcgtcttccaggggacccagtggtgctgatgggatttctgggcacctcagccaggtcccctgc

SEQ ID NO: 36061 - DNA, 1099 bp, Artificial sequence
  DNA replication origin
gccagggccctagagctcctggacagggagtttgcaggaacagtgatgcagcatacaacacagcacaactcgacacaacacaatctgccacagcagagcagcgtgcggtgcactgggctgcagcagagcatggcccagggtccagggagtcatgtaggctccagggaatcatggagcaaactgacctgagccgcatccctcagccaaggcacaggcccccagccttgagccacccacttccttgggacagctggatgccctagtgtccctggggctgaggatggggctggggctgctgtccaaggtgaggtctgactctaatcccctgtctctaatccccagtcgtttggggaacttgggcgtcttccaggggacccagtggtgctgatgggatttctgggcacctcagccaggtcccctgcccacctcgccacactggttcccactgcaatctggctttggggcctgtgtggcctctgcttactgagccctgtggttccctgccaggcaccgttggccctccggccaggctggcacctggagaatggcctgtccccaaatcctgcactcttcccagctcacctgctttgcttttctcccgcactgggaggtgggagccaggttgacactggaggaggagctccctcaactgtggcttcaccttagggttctgggcagggttttgggcagtgagactttctggataggggctggaggtcaacagccttctgagtggggagtggtctcatagcagagagacccacggtggaggggtggggtgggcagggaggacgacccggctgtggaggagctggggcaggcaggttacacggatgcagttcacactccctccttctccccatcctctcccacaccccccgcgtcctctcctgtctcttcctccctgccctgttctgtccctctttcccctctgtgtctccatcttcctgtccctttttccttattcatttgtcctcctcttcactttccatttctccctttccctcctcccctcacctctcatctttctattatgacatatgacacaaatacagactaggacacaccatataaacgtatcttaggtgatgactgtgac

SEQ ID NO: 36062 - DNA, 870 bp, Artificial sequence
  DNA replication origin
tggctggaggccagggaagtcaccaggctggagacatcatctacctccctagagggtttgatatcagacatctcccgtgcaccactttcagccatctcagcctcacctgggactctggctggcactgggaccagcagttccatgaaggtttagaccatctctaggcttaggaagtgcctcccttgtcatcactgtggtctgggctatgcgccttgtgaccaagggctctgggcagcagatgcagccagccagagggtgtgggtgaggggcctgggcacaggagggacgcgaggccttccctgcaccctcatggccaccgtttcagagggaagacaacaattatttggttttgccctgtgagcagcagcagagagcggggcccagggcaggtccagggccagacaggcatcccatgctgcagcctcgaggcctgcagggcacatgatggggccggtgtgggggcgtctcttgtgccaaacaactgggcaggaggtgccctggggctggtgggtgggtcagggcgttttcaagagccatgttaggatagagagtcctggagaatggagtgagggggcagagggggcagagaatggaggggtcggggagactgctcccactgctttctggcttctaagtgggggtgatgggtggtaggtgagtggcagaggggtcagcgggggctgcaagactgagccagggaagtggaggcagcaagaatgcaggccttgcctgaggctgactcggggctaggaattctcagaggtcagggccctagagctcccggacagggagtttgcaggaacagtgacgcagcacatgccacggcacaacttgacacaacacaacatggcacagcagagcagtgtgcgg

SEQ ID NO: 36063 - DNA, 1531 bp, Artificial sequence
  DNA replication origin
gctacaggtggagccagctggggggctttctagagggagtggggtcctctgagggccaagagggccaggtccctgaggacctgaggcccctctgggcctcccagggctgggcctgtggctctgacctgctttgtcctgggagggacatgctcagtggtggggtttgtgtagctgtcactcactcacctgcctgtgcccagccactcacctctcactcccatcagccccacccaatacacacgtgggccctcaactgccatgaggggtagttcctgcctgtgtcacacacatccatcccacccaccacactgcaggttacaggactgccccacaagtgccaccatgcccgcatgaggtcacctgcatgacatgaccagatcgtgcactttctgtgccagggccagggcaagcttgcactttcagccttggggacatgggggatggtggtggctggtggccagggagtcaccaggctggagacatcatctacctccaggagagggttgatatcagacatctcccgtgcaccactttgagccacctcagcctcacttgggactctggctggcactgggaccagcagttccatgaaggtttagaccatctctaggcttaggaagggcctcccttgtcatcactgtggtccaggctgcacgccttgtgaccaagggctctggacaacagatgcagccagccagagtgtgtgggtgaggggcctgggcacaggagggacgcaaggcctgcactctcatggccaccatttcagagggaggacagcaattgtttgggtttgtcctgtgagcggtggcagagagcagggcccagggcaggtccagggtcagaaaggcatcccgtgctgcagccttggggccaccaggtacatgatggggccggtgtgggggcgtcccctgtgccaaacacctgggcaggaggtgccctggggtcagtggatgggtcagggcatttgcaggatttctggtttctgttagaaatgcatgtcctggaggatgaagaaagaggggagggggtggttgggagggagatacagctcccgctgcttcctggcctctaagtgggggtgatgggtgggtgagtggcagaggggtcagcgggagctgcaaggctgagccagggaaagggaggcagcagggatgcaggccttgcctgaggctgactcagggctagggcttctcagtggccggggccctagagcttccggacaaggagtttgctggaacagtgacacagcacacaacacagcacaactggacacaacacaacctggcacagcagagcaccatgcagtgcactgggctgcagtagagcgtggagtggggtctgtgggacccagggagtcatggagcaaactgacctgagccacgtccctcagccaaggcacaggcacctggccttgagccacctacttgcttgtgacaccctcatgccctggtgtccctgggcagggctggggctgctgtccaaggtgaggtctgactaatcccctgcctctaacccccagttttgggaactt

SEQ ID NO: 36064 - DNA, 990 bp, Artificial sequence
  DNA replication origin
gcggagacccagcgccctgaggtcttttccctgggcagctgcccgtctgcagggacattgcttggtgagaggtggggaagtgtttgggtggagagagaggctctcagggaacagagtccctgatctcaaaggaggtcaagggctgtgaggaggcgctggtggccgggcctgctgcatgacggcctgtccctcctcgggggtcgtggtgttggtcaccatgtccttgagtttggagggtgtgtttctttccagctccgtgggatgatatctgttgacagaatccatgtaggtgtccttgtcctcggtcagaaactggttcatgacggtcacgagctgcgggcatagtttcttgggatctgcagggagagtaggagcacgtgagcagggaggggtgggtaccccagggctgcagcgcagcccagggtctcctggcagggcctacccacgagcaacagcagcagcaggaggcccagcaacgccagggctcaggtgggcgccatgcagtgcggggtcagggccgactagggtgtgggttacacttggggtggtgcggaatcctctccctctggcatttggggagatggggtctttaaactcagggtcctgggggcaggcccggtgggcgtggcttggctgggacctggagagtcggggagaggtggagtttctggtggcccagtgggcgcagcaggtggcatctgccaggtacccgcccccttcctgtccggtggtgcaggatctaggtggctgtgcactgcaggcatccatgtgcactgggacccgcaggtggcccagtggcctgtcacattgtatgtggggcgagaggcttgggtgcacatgtgtgagaatgggattgtgtgtgtgtgagtagaatgcgctgtcgggagtgtgtggggtgtttggtacctgaggttggggtgtgtgactgtgtgggacaagcgtctgtgattatctgaatatgcgggtgtgattgtggctgggaccggcctt

SEQ ID NO: 36065 - DNA, 1053 bp, Artificial sequence
  DNA replication origin
tccacccagggccctagtgagtatgggtgtggggggaggggcacgtgggtggcccgggtcagtgtcagggtgggctccccccatcccaccttcccgttacaggaggagggtctccaggttcttgctgttttgaacaaagaattggggaaaacgcacaaacaaagcaaagaaagaattaagcaacaaaagcagagacttaactgaaagtgaaagtacactccaaaccgggagcaggcccaagcataagggctcaagagcccatttagaatttcctggggtctaaataccctctagaggcttcccattggttacttggtgtacaccctatgtaaataaagtagtggcccgcaatcagccccaattagcacagcaggagtgggaggaggggcagcagcagggcaggagctggggagggtggggccccgggcccaggttctcctgggccggacaggctgcctgggcagagattcgaggtgcctgtggatggtgtcacttcagtaccgtgtaggcaccctggttgttgatttcttcctgtggggaggggtgggaggctgaagggaggggtcttctgggaaggagggataggatggggttgacagcagaggttgagtatcagagggcggagacccagcgccctgaggtcttttccctgggcagctgcccgtctgcagggacattgcttggtgagaggtggggaagtgtttgggtggagagagaggctctcagggaacagagtccctgatctcaaaggaggtcaagggctgtgaggaggcgctggtggccgggcctgctgcatgacggcctgtccctcctcgggggtcgtggtgttggtcaccatgtccttgagtttggagggtgtgtttctttccagctccgtgggatgatatctgttgacagaatccatgtaggtgtccttgtcctcggtcagaaactggttcatgacggtcacgagctgcgggcatagtttcttgggatctgcagggagagtaggagcacgtgagcagggaggggtgggtaccccagggctgcagcgcagcccagggtctcctggca

SEQ ID NO: 36066 - DNA, 1201 bp, Artificial sequence
  DNA replication origin
ccacactgcaggttacaggattgccccacaagcgccaccatgcctgcctgaggttacctggcacacaagtatcctcacctgcatgacatgaccagatcgtgcactttctatgccaggaccagggccagggcaagcttgcaccttcagccttggggacactgggggtggtggtggctggaggccagggaagtcaccaggctggagacatcatctacctccaggagagggttgatatcagacatctcccatgcaccactttgagctatctcagcgtcacctgggactctggctggcactgtgaccagcagttccatgaaggtttagaccacctctaggcttaggaagggcctcccttgccatcagcgtggtccaggctgcacgcctggtgaccaagggctctgggcagcagatgcagccagccagagtgttggggtgaggggcctgggcacaggagggacgtgaggccttccctgcacccccatgaccaccatttcagagggaggacagcaattgtttgggtttgtcctgtgagcggtggcagagggcagggcccagggcaggtccagggccagacaggcatcccatgctacagcctcggggccacgagggcacatgatggggtcggtgtgagggcatcccctgtgccaaatacctgggcaggaggtgccctggggttggtgggtgggtcagggcatttgcaggatttctggtttctgttggagttgtatgtcctggagaatggagggaagagagaaagggtgaagagaagggggaaacgacccctgctgcttcctggcctctaagtagggggtgatgggtggttggtgagtggcagaggggtcagcgggagcttcaaggctgagccagggaagcggaggcagcagggatgcagaccttgcctgaggctggctcggggctggggcttcttagaggtcagggccctagagctcccggacagggagtctgcaggaacagtgacacagcacatgacacagcacaactcaacacaacacaacctggcacagcagagcagcgtgctgtgcactgggctgcaggagaacacggagtggggtctgtagggtcccaggagtcatggagcaaactgacctgagccgtgtccctcagtcaaggcacaggcacctggccttcagccagcttccttgtgacagccccatgccctggtgtccctggggctgagaca

SEQ ID NO: 36067 - DNA, 910 bp, Artificial sequence
  DNA replication origin
tcccggccgccatcccatctaggaagtgaggagtgtctctgcccggctgcccatcgtctgagatgtggggagcgcctctgccctgccgccccgtccgggatgtgaggagcgtctctgcccggccgccccgtctgagaagtgaggagaccctctgcctggcaaccgccccgtctgaaaagtgaggagcccctccgcccggcagccgccccgtctgagaagtgaggagcccctccgcccggcagccaccccgtctgggaagtgaggagcgtctccgcctggcagccaccccgtccgggagggaggtggggggggtcagtcccccgcccggccagccgccccgtccgggagggaggtgggggggtcagccccctgcccggccagccgccccatccgggaggtgaggggcgcctctgcccggccgcccctactgggaagtaaggagctcctctgcccggccaccaccccgtctgggaggtgtacccaacagctcactgagaacgggccatgatgacaatggcggttttgtggaatagagagaggggaaaggtggggaaaagattgagaaatcggatggttgccgtgtctgtgtagaaagacgtagatatgggagacttttcattttgttctgtactaagagaaattcttctgccttgggatcctgttgatctgtgaccttacccccaaccctgtgctctctgaaacatgtgctgtgtccactcagggttgaatggattaagggcagtgcaagatgtgctttgttaaacagatgcttgaaggcagcatgcttgttaagagtcatcaccactccctaatctcaagtacccagggacacaaacactgcggaaggccgcagggtcctctgcctaggaaaaccagagacctttgttcacttgtttgtctgctgaccttc

SEQ ID NO: 36068 - DNA, 1320 bp, Artificial sequence
  DNA replication origin
catcttgcactgcccttaatccattcaaccctgagtggacacagcacatgtttcagagagcacagggttgggggtaaggtcacagatcaacaggatcccaaggcagaagaatttctcttagtacagaacaaaatgaaaagtctcccatatctacgtctttctacacagacacggcaaccatccgatttctcaatcttttccccacctttcccctctctctattccacaaaaccgccattgtcatcatggcccgttctcagtgagctgttgggtacacctcccagacggggtggtggccgggcagaggagctccttacttcccagtaggggcggccgggcagaggcgcccctcacctcccggatggggcggctggccgggcagggggctgacccccccacctccctcccggacggggcggctggccgggcgggggactgaccccccccacctccctcccggacggggtggctgccaggcggagacgctcctcacttcccagacggggtggctgccgggcggaggggctcctcacttctcagacggggcggctgccgggcggaggggctcctcacttttcagacggggcggttgccaggcagagggtctcctcacttctcagacggggcggccgggcagagacgctcctcacatcccggacggggcggcagggcagaggcgctccccacatctcagacgatgggcagccgggcagagacactcctcacttcctagatgggatggcggccgggaagaggcgctcctcacttcctagatgggatggcggccgggcagagacgctcctcactttccagactgggcagccgggcagaggggctcctcacatcccagatgatgggcggccgggcagaggggctcctcacatcccagacgatgggcggccaggcagagacgctcctcacttcccagacggggtggcggccgggcagaggctgcaatctcggcactttgggaggccaaggcaggtggctgggaggtggaggttgtagcgagccgagatcacgccactgcactccagcctgggcaccattgagcactgagtgaacgagactccgtctgcaatcccggcacctcgggaggccgaggctggcggatcactcgcggttaggagctggagaccagcccagccaacacagcgaaaccccgtctccaccaaaaaaatacgaaaaccagtcaggcatggcggcacgcacctgcaatcgcaggcactcggcaggctgaggcaggagaatcaggcagggaggttgcagtgagccgagatggcagcagtacagtccagcttcggctcggcatcagaggga

SEQ ID NO: 36069 - DNA, 1554 bp, Artificial sequence
  DNA replication origin
cagtgaggccgggaccccctccgcgcctttgcaccagccgtgaccccttgcaacgggggtacccagcggagctgcgcgctctcggcgcccccggagcctgcgccccgggccccttgcgcattttgcacgggggagactgaggctaggagtgcgaccctcagcccggggtcacacctcgtctggggcacggccaggtgggtggtagcctcagcctgcgagaccccctacccccgccccgtggtttcccgcaccgtggggccctgctctgaccacagactccgatggcagcggcggcgctgcgggaccccgcgcaggtgagtgcttggacgttaggcccttcgctgtcggccccccacgcttctgttctcggtgttgagacgcaaaagatggctttgttctaggacttttcgcctttcccatttccttgcttttgagtcaggggaccctggaagggagttgctcccagctaggatcctgaatcagggcagggtttatataaagtggcttccgttgctgaaatgtaatgggatggagggagaaagggctttgtaggcacaggaaccagcgtgcgcaaaagcttgggggtggggtggggcacggtgtggagactgagttgggagtgttcaaggaaccccacccaggtcagtgttattaatattatgtctgctggaaccagagagcaggtgggctgaagacagctcagaacggcagagctgggcctctgttctgagggtgttgggagccatggaaggtttagggcagaggaggaagatgctgtgactcaggtcttaacaggctccctgtggatgcacagtggagaactgaatatggagtgagccgcaagcagggatgccaaggagtagcctaatggaatagcccaggccagtgctgcggctggccggaccagagtgaggactggaggtagaggaagtgattgggaacttgatgtcttttaagtcaagctgaccaaattttccgatgtggagggtgagaaagaggagggaagaatccatggtttttggtttgatgaatccagctttatgaactgagaagttggttttaggaggaattttccatggaagcagtagaagttaggttttggccaagttgagcctgtgatgtcccagagacccccaaatggagttgaagagtgggccgctgaacacacagttcgggtgttctgagggagttgttaaggtaatgagagactggatattcattcgaacaatggccagatcatgtatacaaatagaactctgccccagaacctgcccaggaaaccaacccccttatctacaataaacaacccatacagcaggaagccagcctgctgtctgtcagacccacaggaagccagattgctatctggactgacaatccaggaagtaaaaacaataacttctgtaatgagcagtcccaaatggccagggtttgattaataacagacagctttcctcatttttgctcctgcttctgatttaagaacaaccagagaaaggcagatacgcaccctaaccaatcacataggatgcccacttctagttcacccaccta

SEQ ID NO: 36070 - DNA, 1698 bp, Artificial sequence
  DNA replication origin
tttggttgtaagtgtaatcatttatttcttttaaaaaaaggacctgaagcaaaatggcaaaatgtccacatctattctatataggtacaggggacatagaggactgttatattttcttcctttttttttttttttttttttttgagatggagtcttgctctgttgtccaggctggagcgcagtggtgcgatcctggctcactgcaacttccacctcccgggttcaagcaattctcctgcctcagcttcctgggtagctgggattacaggtgcaagccactacacctggctaatttttttgtatttttgatagagatggggtttcactctgttggccaggctggtctcgaactcctgataggtgatccaccctccttggcctcccaaagtgctgggattacaggcgtgacccaacgcgcctgacctgaaataaatattatttaattaaaaaactaaaagcattacactagaagaaacagaccaaagagaaatctaaagagatcagttggacagaggaaggtggtgggaggagggcctctcttccattggccggtgggaggcagcaaatgtcagatggtggatgggggttttagaggtgggggttagcatgagaggtagggcacggcgatagggggggtgctgtccatgcagagggaataaccagtgcaaaggtcttggggtaggaggcaggaaggtgcctggtgagttagaagaacagcgggtaggctggatggggggtgtgagccagggggagatgaggagctgaagtcagagagctgacaggggccttgggtgccaaggtgaggactttgcttttacctggagtgaggtacagctggggcagggctctgagccaggagggtagttaactgactcaggtggtcccaggctctctctggctgcaggtgagaacagacagtaggggcagggatgggagcagggagatcaggcaggagaggatggaggctgggccagggcgtgggcagcggaggaagaagagtttagaatggagcgattgattttatacgtggagcccacagtttgtgacggattggatgtggtgtgaaggaaaagagagggtcagaaaagactctgaagttctgggcctgccattcatcaaaatggagaagtcaggtgggcttcttttgcaggaggaggggaagggttgatggagagggttgggaagggagttttttcaaaagaggcggggacagcgtaccctggagagcgctggggagccacagccccggagctgtgaggtgggactcgcatttctgtgtggttgggccaggagtccaggacaccacctgactctgacctcttgcagacggggcgggggaggggggacgcaggttatggcgtcagagcaggatcgaatccaactctgccgcctacctaccaggtgaccccaacaagtcacttcccatcttagaggccgggcttctccttccgtaaaaggactgattttgcccgttcctgcgctgtccccgggaaaagcccttaccaccgagttagtgggactcccagcactggggtgatgagcgcaaggtctcagcacagataagagccagggaggctggattctgacttggtacttggcctggctgaccaaaactgggaagtccctagaaacggaggcaccggacctcctgggaccaggaacccgggctcagagactgggagagggaaggaggaggcg

SEQ ID NO: 36071 - DNA, 1122 bp, Artificial sequence
  DNA replication origin
accgcgccgcatccatgttcgagtaaggaccgggcgactagagctcagggaccgggcgcgcgggggaggccaccggagggagggggcgccgcgggcttggggagggggcggagcggccgctgcagaggtcgggggcctctgcacatggctctggccggggcgatcggggtgggggcggggcagggggcccccgggcgaggggtgcagctggggagtggggcgcggacgcagggcagggcccggggtctgggtcgccactgccggcccgcgacgcactgggttgcggggtttggctgggggcccgcgggttcatctggcggggagggccctcaggcctggcaaccccctgcctggtaagccaggggtgagcgcgaggccgaactggggctccggcctgggatggagacaggatcgggaccagcccaggcccacaggccgcggagccctgggcgcgccgggagtaggcagccccctcctgcctgggccccctcccaccgtccttggctgttgcgggtctcggggctgccgggggtgggggcttcctgcgtctctccaggaccgcgtgcttgaggtcatggagggcggggggtcctgtgtgctcggaattgacttcttactccccttccggtccaggtgggcgcatgtgcttccgactgtgaattgtcttgcaagtgtgtgtacgtgtgtctggggctgctagcctgcagcagctttgggcctctgatagagttcctgcgtgtaacttaaccactaattctgaccgcggctctgtgtgtcactgtaagttacctgtgtgtgtctggggctccaaatctgtggctgtgagcagctggttgtgtgcgtgttgtgtctcattccatctgtagctccctgtgcaaatataaattacccctgtgtgtctgagtgtgacgttggagtgtttgtacatgtgtctggagttaccgtgtgtagcagctctgatccttcttgggctgtgtgtgttttaccattaattctatctgtagctccaagcgttgctgtaagttaccagtgtgcgtcccattgtgacttagtggtgtgtgtacaagtgtgcctggggctctgggttctaccatgaccctctgtgcctgcatatgcctgtaa

SEQ ID NO: 36072 - DNA, 1312 bp, Artificial sequence
  DNA replication origin
gtccgccagtccctgtgggagggaaagcagcgtagttaaaccaggtgccctccaggtactgggctttgtggatctcacctcacctccatctctgtgcaaccctaggaggtgggcactaattcccatcatacccaagaggaaactgaggcacaggagggttcagacactagctcagggtcacacagaaaggacgcggtggcacttgactggaaggtccttggactgtggggcccacactccaggctgctgccctggagacctgcagggtccaaggagtcgtgcacctgctggaacccaagttctatggggggcggggaaggagggccgatcacccaggccatccccaacagtatgtgctcacggagcacctcctgtacgccaggccctgctctaggtgatggggacactcaacatcgtgggtgggggttgggggtggggagagaaggataagaactagggggaaatactgaaggtcccgggaggcagcagggagacttgctttgcagaaagagagcagggagggggatcgggaggcggggtagggggtgttaaatagggaggtagggaaggtgtccactgagcagagacctgagggaggtgggggagccctgtggatgtggatgtggatgtctgggaggaagggcattttgagcagaggcaccgaccaaggcgggagctgggagagggagtgcagggctgatgagggcagagagggaccacccaggaggaccctgatggactcagatgatcccaggctccctcccactacaggtatgggcagggatgggaacagggagaccagggaggaggctgctgggatggcccaggggaaaagcagtggcctgggccactggctgtttaattattttattcacgtattttattccacaaatttattttacaagtgttacatgagtgcctaccctgcatcctgtcccgcattgtgctggggacagagcagtgacccacagacccgtgaaggacttggacctgtcatcagacagtgacggcccagagtagtccaggatgggagctgcccaggggactgtggggtcacgcatgagccaaagtcctgaaggacaaataaggatttgctaggcaaagaagaactacgatctggacagacagaatggcatatgttaaggcttggaggtaagagagacaactttgagttgccccaggtggtggagggaatcccacctgcaccccagaatacatcaaggcccctaaatgggaatcctgccttgaaataaaccaagcccatggccaggtgcagtggctcacagctgtaatctcctagcactttgggatg

SEQ ID NO: 36073 - DNA, 1244 bp, Artificial sequence
  DNA replication origin
gtaagagagacaactttgagttgccccaggtggtggagggaatcccacctgcaccccagaatacatcaaggcccctaaatgggaatcctgccttgaaataaaccaagcccatggccaggtgcagtggctcacagctgtaatctcctagcactttgggatgctgaggcaggtggattgcctgagctcaggagttcgagaccagcaacgtggtggaaccctgtctctactaaaatacaaaaaattagctgggcatggtggtgggtgcctgtaatcccagctactgcggaggctgaggcaggagaatcacttgaacctgggaggcgcaggttgcactgagctgagatagtgccactgcactccagcctgggtgacagcgcgactctttgtctccaaaaaataaagaaaaaagaaagaaaccaggcccgtatcctatggcaagtggtttgccgctttgagctagtttcctcctctgtaaagcagggatggtgaatcatatcaaaggcaccggcttgagaaataatacggttaatcatacggagagcttgacatatttcctgataaggagtcaacaaagaatgtccttttaaagttcccaacgccatccccacagtccttattacagttcgtgtttgcacagtgaagttgggagtgtcctgtttgttcagtgtctgcctccccaccagaaggctcattccccaagggcaggggccatgtcctgcgggctctactgatgccagctccagccagcgtgcagattattcatttagcctctggtggttattgagcattcactatgtgcctagagttttgggctctagggacccggtggtaaccaagacctgaaggtcacagtctgggtagacagtaaacaaacagtaaacaagcaggacactccagatagcctggggtgtggcgacagaggtgcctgccttaggctggatgatgcggaaggagagcatttgagctgaaggggacagagctggtgatgccggggccatggaaggacattcaggcggagggactacaaatgtggaggccttggcgtgggaatgagattggagagcttagggacaaaagcaggctgggatggccaggggagaggaaggacagggagagggaggacatgaggtcagtgaggttccagggccaaatcaccacaccaaggtgaggtctttgcttttacctggagtgaggtgcacccagggcagggctcagacctgactcagatggtcacaggtctcctc

SEQ ID NO: 36074 - DNA, 1102 bp, Artificial sequence
  DNA replication origin
tctggcgggccgggctctggctggggtgagatggaggccaaccccaggtcccgcctccccagacgctgagtccccgcgagctctggcacctggtgcatcagtgctacggctcagagctgggcctcaccagtgaggatgaggactatgtctcccccttgcagctgaacggtctggggtgagttggaggtcaaaggaggttgaagggttcgggggagaacaggacggtcggcgtgcagagttcctggagtgctggggggcctgagatggttgtatgacgtctggaggattcaggagggtgtatggggtctcaaggacacagcagtcccgcttcctcccctttcccacaggacccccaaggaagtgggagatgtgatcgccctgagcgacatcacctcctcgggggcagctgaccgcagccaggagccaagcccagtgggttcgcgccgtggccatgtcacgcccaacctttcccgagccagcagcgacgcagaccatggggtgagcggtgggttggaagaggggtgggatactgataggaagagagaggagggctgggggtgcagtgggagaagaacagcctgacagatttggaggggaatggatagggggacaggggaggcctggatggaggaacaggacagggaggggaagacggacatgtgacagggaaagagagacagggaagagaggggacagacagaaaggatgagagacagaagggatgggagatgggtggatagatgaagcagcagacagacagacggacaggacaggtaagaaagcttatggctcaggcatctgagacaagcctggcaggggctgagaggggccctcatctgggtggccccaggctgctcgcagctcagccgtgagccctcggtgcacacaccaccccgggtctgcacaggctctggaatccttgtggccagtgtggacttgggagccctggggctgggatggaggtggccaaggctgcatcgggcctttctccacaggcagaggaggacaaggaggagcaggtagacagccagccagacgcctcctccagccagacagtgaccccggtggctgaacccccgagcacagagcccacccagcctga

SEQ ID NO: 36075 - DNA, 1358 bp, Artificial sequence
  DNA replication origin
gccagtagtgtgtggtttttatttatagatatttcctgttgttctcaagagattctgggtgctaaggacaggagttcatctatcctggtctcccactggcctccaagccctgcataggcctgacagagtggacattaaatttgtgatcattaacacatatttatttatttatttatttatttttgagtcaggttcttgctgtcgccccagctggaatgcagtggcacagtcttgagtcactgtagcctctgccttctgggtttaagccattctcctgcctcagcctcctgagtagccgggattataggcgcccaccgtcacgcccagctaatttttgtatttttagtagagacggggtttcaccgtgttggccaggctggtttcaaactcttgacctcaggtgatcctcctgcctcggcctcccaaatttcccgaagtgctgggattacaggcgtgagccactgtgcccggctgcctcagggagcttttgatcatgctgaaaggcaaagggggagcaagtgagagagagtggaggggaggtgccacacacttaaatgaccagatctcggaagaactcactatcatgaagacagcagcaaaccatgagggatccgcccccatgatccaaacacctctcaccaggccctacctccggcattggggattacaattcaacatgagatttgggtggggacaaatatccaaactataccaaactcagactctgttctaggggtactggggagccatggagtgttctaggcagagaagggatagagtcaggcttggctttaacaagatgcccctggaccagatggggagactgaggccagacactcaagggaaggctggcaggggcactgggcaggcaaagatgggctgaaccaggagtgacgctcaggaggtttggtgaacacacagtgtaggtaaccatctaggggtttgagtagggggtgtccagggcaaggcctaccgctccagtgggagcctggaggaccctgggccacccctgagtgggggcctgggagatgcagcaggtttggggagatgctgaggctgtgtggagctcggtgggttcgaggggtccagggaccttccaggggaaggtgttcaaaagattacaggtccaatgctcagggcagaagccaagacgggtgcagagggggaaactgaggctgcagcagtggaggagatggccctgccccaacagctaaggttttaggctcctggaaggaaggtggggacacagaggagtggtggggattgggacaggtccccagagagacctcccagaaggctgagtctcctgtggcctgtgggcaaaggactggggtgtggcctcctcatgctgctcctcc

SEQ ID NO: 36076 - DNA, 742 bp, Artificial sequence
  DNA replication origin
ggccagggctctgagccaggagggcgctgacctgactcaggtggtcccaggctccttctggctccctctgttctggtgggaacagactgcaaagacaggtacaggagcagggaggccagggaggaggctgctgggacatccaggctggaggggacggaggctgaatcagggtgaggaaatggagggggaagagtttagattctggagagattttgcaggtttagctgacaggatttgctgagagattggatgtggcggtgagggaaagagagctcaaggaatatcccgaggcatttggcccaaatcactacaacttcggagctgcccttgacccagatgggggcggcagggaggaatgggtttggggaaagaccaggaggtcagtttgggactcagctgtctatgttgagctgagcccatgtggagctggggtgcagcagccgaatggaagaggttcaggggcatggtctggttaagacgtcagtctgtgagtagacagggctcaggccgccgggagcgttgcccaggtagtgggcatgggtggagaaggaccgagggctgagttggctggcatttgggctgggcgggtggtgtatggggtatccagggaagccatggggggtagggaacccatctgttttgtctgtgagtgacaaggggccctctctgaattaggggaaggaaaaaactcagcttgtgggacggggcagccagggctggagtcagacccttacctccttcc

SEQ ID NO: 36077 - DNA, 1071 bp, Artificial sequence
  DNA replication origin
aacccatctgttttgtctgtgagtgacaaggggccctctctgaattaggggaaggaaaaaactcagcttgtgggacggggcagccagggctggagtcagacccttacctccttcccctgatctcccaaccccagagtgtcttctgagatccgctaccgaaagcagccgtggagcctggtgaagtcgctcattgagaagaactcgtggagcggcattgaagactatttccaccatctgggtagggacagaaggccggctggggcgtgggttgggggatggcctggccaggtatggacatccagagccccctctcttttacgcagagcgagagctcgccaaggctgagaagctgtctctggaggaaggcgggaaggatgcccggggcttgctatccggcctgcggcggcggaagcggcccctgagctggcgggctcacggggacgggccccagcacccagatcctgacccctgtgcccgggccggcattcacacctcgggtacgttccgttggggccgggttggggtaggcggaggatcgggggtcctggactgggccatctgactccaagctgctctcctgcaggctccctcagctcccgcttctccgaaccatctgtggaccagggccccggggcaggcatccccagtgccctggttctcatcagcattgtgtgagtaagagacaggagcagtggccacacaggcctgaacctgcctcctggctgtgtgaccttgggcaagtgtgtggcctctttgagctctctgcttaagtgggagcgtgggtttgctcacagcaaggattagacaaggcaatgtttgggatgtgccggtttgtcatggagaagccttccctgctagaacagcagagccggggggggctatgggagatcagaggggcctgacctcacccaaggatcaaggggggctttctggaggagcaggcacacaaagattctggaattaggtgcacagggagaggtgtgcctaacaagtgaggtcatttatggacattatgttctctgtgcccactcctaagctgggcgatgctgaggacaccgcagtgaccttgag

SEQ ID NO: 36078 - DNA, 1093 bp, Artificial sequence
  DNA replication origin
cccaggctggagtgcagtgatgcgatcttggctcactgcaacctctgcctcccgggttcaagcgattcttcctcagcctcccaagtaactgggattacaggtgcccaccaccactcccagctaattttttttgtattgttagtagagacggggtttcaccatgctcgtcaggctggtctcgaactcctgtcctcaggtgatctgccccccttggcctcccaaagtgctgggatagcggggggcggctcacatctgtaatcccagcatggtcaacatggtgaaaccctgtctctactaaaaaataaaaaaattagccaggcatgatggtgcacacctgtactcccagctacttgggaggttgcggcaggataatcgcttgaacccgggaggcggaggttgcagtgagacgagatcagccactgcactccagcctgggcaacagagccagaccctatctcaaaaaaaaaaaaaaaaaaaaaaaaaaaaaaagaacataatgtcaggtagtgaggctgctgtggaaaacactcaacaagaggtaaagagtaaaggaggtcaggttaggagcggggaaggcagtttaccctgaagggacacagaagacctgacgaaggtgacattggagccatggaggcccacggagaggggcggggcagggggggagagccggggcagaggggagagctggggccaaggccctgaggcaggaacgggttccctgtgttgggaacagcaggagggcctgaacagccagagtggagtgggaggaaagaggggtagaaggtgacatcagggacataaatgggtgcaggggatcacgaaggggtcctcctcctgaaacagcacctccagattcccggggctgcttctctccagggtgccccgcctgcttgggtgaggtccggattgtagctgtagtcctagcctgacggccccccaccctcctctaatgcctacttggggtccctgcacattgacccccaggcctggatatcagggctcaggggagataacttggaggttcgccctctggaactcctgaggatgacctccatcatttgaagtcggaaacccggcccccaaactgcgctct

SEQ ID NO: 36079 - DNA, 2402 bp, Artificial sequence
  DNA replication origin
tgggcccccggcggtaaccggagcgggggggccgcgccccccctcctcccccctcgccggtcccagagccgcagctgctgcgcccgcgcgctcccggggacattctaaccgccgccaggtcccgccgcctctcgccccgctattaataccggcggcccgggaggggggcgcagcacgcgccgcgcagccatggggaggctgctggccttagtggtcggcgcggcactgggtgagtgcgcggggggcgcgcgcggccggggggcaccgcgggggcactggcggggcggcgggagtggcgctcgggacacggggcagccgcgcgagggccacccccggcccatccccgggccccgccaagtcagcttcagaagttgtgcgcgcgggagccgggcttggggagggcagtggaggtgagggtgggctccagcgggtgggggccgggctggcacagcctggcggctgcaggcgcccagccgggggcgaggaaacgcggagtcagctgctcccggagccccgcaggctgcaatgtgacacccacagccgcgggaggggggtggggggaaggcggcgcccggagactgggacgggaaagacggagggacagggagagatgaagacgggaggaagggggcgagagacagagaaggactcggagcgcaccggagtggtccgctgggatgctggggacatgggggtcaagggggagacggagacagagagaggggtattggagagagagagagagagagagagttaagagactgagcgcgatggagaaagggaaacttgagaaaggcagaaggagatggagagaagagagagggagatgcgggtgcccgtgaacaccgggagagaatcttgcatggagtttgaaaagggatagacgtagaaaggtggaaagagattaggagaggtctccttctgagcccagagagtggacaaaaagtggagggaccttcagagagacccctgagagggacaaagataggagggactgagacagaggccctcagggagtctgaaagggaccgcaggggaggcggatggatgagaagtcctgaggatcaggaaacaaggacagcacagggctgcagcagaagagacacagcgttagctacagagtgctgggaggcagaaaggaggtgccaggtaagagtgtgaaggaattctaagactggaattcagtgggctgcaaaagccctggggcaggagagagctcaggaaagctttgagtagtggatggggttggggtgggaagagctctagaggcgaggagcctggggaagaggggatgatggaggcaggagaggccggggaggggatggctcacacaggggcttgtgggctgtggagaggggctgagtgtgggtcagccccggtttcagtgcccacctccccacaatcccccacccccagaccttttctcccaacccatttctcctggagctagctggttttacaatttaatggtgaaaatgactgccaccttaaacttctaacttagctggaattctcattctaccacctagatgcttgggttcctccagcaagggactttctgaggaaggggcactcgggtagcataaagtctgagttaccggcaacgttgacagtcccacttatggggcctcccatgtacaaggccctacctaatgtatgaaaatgggcccagccattgctggaagcaaaggaccatttctttcaacaagagagagggaaactgagactcagggatgaatgacttgctgaggtcacgcagtgagtgacagggctcagcctagcatccagtcctgtctgctggtaatcattgaggggggaacagatggtttgtgaggggtctggcattgcttagggcaatgggtgcctctgcctgacctgagcctgctgtccccacagtgtcctcagcctgcgggggctgcgtggaggtggactcggagaccgaggccgtgtatgggatgaccttcaaaattctttgcatctcctgcaagcgccgcagcgagaccaacgctgagaccttcaccgagtggaccttccgccagaagggcactgaggagtttgtcaaggtgtgcgggtgccgggaacgggcatgggagggcaggggtccacgagtgggaggcggtggggctggatctcagggagggggcttatttgtttaataatatgctgtgattgctgacctggattcagattctggctccaccagtggccagctggtgaccttggccaagtcagtgagcctctctgaaagtcagtttcctcctcggtaaagacggggtggcggtggtctctagcccataggtttgtgtgaggactgaatgcattgacgcacctggcacacggttggcatgaaataaatgtcagtggacttatttggcaccagcaaacaatgtctctgatagtca

SEQ ID NO: 36080 - DNA, 830 bp, Artificial sequence
  DNA replication origin
cggtgaggtgggggcagcggccccgcacccctcctccttgctgatttgcacacattggccgcttcagacacgcacttctggggccagcccctccccgcctcctccctgcctggcggcaggggtcgcgatgatgggctggagcagtttggggcagggggttctgggacccactccgactccccctccccggcatcatttcccctcccgcttcctccggctggacctggggtcccccctccctgtaatgcactcctgccccggcccaacctcgccctctctcaccagccttgaactgtggccacctagaaaggggcccattcagcctcgtctctttacagaagtagttttgttcatgaaataaagactcttggacttgatgcatagtttcgattgtgagccccgtcaccttccccccattcccgtccccgaatcttcgagcccgctttccagggaccctacctgagggcccacaggtgaagccacttagtgcctgatctgtgtcggggttgggggagccatgggctcaggggtgagggagagtggaacggagccaggaagggagggggtgccgtggagggaagagaatcgaggctgatgctggggtgcaggggtggcatggggtgtgtggtgtgcccagcagtgtgagtctctggagaggtgggcgctggggagaaggagagggaaggagagacgggtatggatggaaaggcagaggaagccaggctaaaccagcgtgtcccaatgaggggccctgggctgagtggaggaaatgggtgcggtggaggtgggtttggctgggcacagcgggcacgtgtgggtaagcgggtggg

SEQ ID NO: 36081 - DNA, 853 bp, Artificial sequence
  DNA replication origin
ctccctagtatgagggaggaggggcctgagggctggaactcctgggtctggggaggaaaggactggggtccaacggctgagtctgaaggaagagcaggacagaacacctaggtgcttggggggacgtcatagtgccccctcttcaggtccccaggaacccctctattaggaggtgggcattaggctgggtggggggatgagggaacccctgtcctcagggctggaactgtgagtctgggggcccttgtccttaccctggggtccagcaggtgggggcggagcctcgaggtagtgccggggtcgggtcagtctccaggcctgggcaggagcatggtggccccgcagcagcgggcggcctggaggcagaggcggtggcgtggggcctgctaggccaggctgcctcacctgaggaggagggggctgggcgaggggcgggtgaaggggcggggaggggccggaccattcgattggcagcactggaggccacctggctgatggggccgggcttgtgggggctggaccaggcgggcccagctacggggcttgccttggacctccagggggacccaggtgtgcctgtctgcggggatgtgggaacagggacaggcctggccggaggctgggggtttagggagaaagtgcaggctgaagggtgggggtctgaccagaagagatcagatggagggccccagctgccctaagcccactccaccctcacccagcgaacccttccccccgccctttctgcgtcctccagccccaggtcctggctgtgcccgccacttgctgcacctctgcctaattccctgcccaattcctgggccccaaccccagccccagcctctcccgcctg

SEQ ID NO: 36082 - DNA, 931 bp, Artificial sequence
  DNA replication origin
tgggggatgaggggaaactgaggcagcacgccaggaaggtcacatagggtagaagggaggctggtggtggcacagctgcacagaaaatgtggttaatagttaatcaggtggaggaggactaacaggggtggggatgcatctgggaggggtgcccagagagagggggctccgaagagtagagggtagagaaaagagcacagagggcggggcgccaggcagagccaaagctggggctcagggaaggggactcaccctccttctgcgccatgtcactgcctcttgttaatgattccctggctgacctcctgggccagggtgggacctgtgaggagatggacggggaggcagggcctgggggagcccagcccagcccagtcctggcgcccccagtcccaggcgtccatccaggcaggctgtagggactgggccttggccagagcacgccgtgatcacggacgcagattgggctgggttcaaggatggggtcagtgtctgaccagcagcggggggacgcctggatttgcagggatggggacccccatgcctgagcctggtggagcaggggactgaggatcccggtttgagggaggagacagctgaggacctgaaatcataagtcttgggaaaggaggaatttgggggccaggactccctagtatgagggaggaggggcctgagggctggaactcctgggtctggggaggaaaggactggggtccaacggctgagtctgaaggaagagcaggacagaacacctaggtgcttggggggacgtcatagtgccccctcttcaggtccccaggaacccctctattaggaggtgggcattaggctgggtggggggatgagggaacccctgtcctcagggctggaactgtgagtctgggggcccttgtccttaccctggggtccagcaggtgggggcggagcc

SEQ ID NO: 36083 - DNA, 762 bp, Artificial sequence
  DNA replication origin
aaggtgcagatggagagaaagaaggaaacgggggaaggagagtcactcaggaggattggcaggctgtcgggggaggggaatgttatgcagatggggatggtcctaggagtgagggcctctgagacaggaccgggaggaagaatatacttggggagacattggggagacattctgggacctggtaggggcaaagggactaggaggtcccagggaaaggtatttaaaaggtatttaaaggactgcaggagccctgacctgggacctggaagagggtctagggctggggacagaggggaaactgagtccacagaggtgggtgagacagacttaggggcaaggaggagcagggggaggctgcggccagccctacaaactctggattttacggagtaggtagagggtgggtgaagacagcagcctcagaggcgggaaggaaaatcaggtgcgcctggtgtcccagaagtccaaagaggagagcatttatacaggaagctgcagtcatgtaagatgaggcccgagacacggagccaccagttgagtggattttcagagccagagagccaaaggtgttacgcgtgggggtctttgcagccaaatggtggaggcggaagaactgacctatgagaagacccaaggcatccagaggggcctggagaagcaggggcagagagtctcagggagatgtaggggtgggggaggtctggcttaccaagggaaatagccctgctgctgggatcaaagaattgatgttgacgtgccgcc

SEQ ID NO: 36084 - DNA, 794 bp, Artificial sequence
  DNA replication origin
tccctgggaaggtggtgcaagaacaaagacctgcaggaggtgagaaagtgtcaggaggtgtgtgagatcagcacggagacagagggacttgcagatgcaaagatcccaaggctggtgtgggggactggggggagtgctccaggaacagtgggaggccagagcagagtgagccagggaggggcagatcaggtgggagctagaaatagagcaacatcagggctttgctggcacctggtgtgaggtgcagccaggggagggccctgacctgactcaggtggtcaccagctccctctggctgcaagtggggaaccagcatgagccactgtacctggcccccatctgataacattttaaagcctcttgaggcagccaggttttaagaccctccagaattgccggttaagtgagtgagtcatatcccctttgtgggatatgattggggggcagggatgggagcagggaggccagggaggaggctctgggatgtccagaggggaggggaagggggctggagcagggtgggggcagtggacggggagaagagttcagattttggagaggttctgtaggtgcagctgacagggtttcctgcaagatctgattcatgggtgactggaggaactgggagggtaaccgaggggtttggcctgagcctgaaaagatggggctgacagagatggggacggaaggagcaggttcagggagagatcagctgtgaacctctttgtcctttcctttccttctccctgccacttttttttttcttttttgagacagggtctcgctccaccacc

SEQ ID NO: 36085 - DNA, 965 bp, Artificial sequence
  DNA replication origin
atagctcctggctccttctggcttcgtcctctgtcttcctggggcgggccctgtccctcttctgtcccctgccctgccaacacccccctgcgggtcttgcccttcctcacttcccccagttctgcaccaatgggctggtgtccttcggggagcctgtggctctcttcacactggaggcatttccccaggagatgggccaggccttcgcagtcccgttctgggccaatgggtccacactgagcaggggccagatgtggtaccggcagagccgccagccagagctgccgcagcaggtggcctgagacctggcctcagccttcccccatgccccgcccaccccttgcgccctgctggtggccatgtgggaccaaattccattttacggggcacttggtccccaggtgaggaagcgggtggcagagaagggcccaggctgaggctgtttggcccaaccccttgggaagaagggcttggattcctgggtaaggaggagacaccacggaggagagacggagatgggggaacgagggagagatagagggggcgggaagagagagacagagagacggaagcatggagatgcagcgaggtagagaaaatgggtgagaaagagggaagacacgaacagggagagaaatggcgagagagaggaggcaagacagcaagcgagaggagtgagatgatcagatggagagacagagaataggaaaaggagagagacggagagagagaggggatgagagcagagcagaaaaatcgagactgggggatgtgaaaggaaggctggcacaggtgccagcagaggcagctgtggacatggtgtggacaggggcctgggaggtggcgtggatgggggtctgggatgtggcatgggtaggggcccgggatgtggtgtggatgggggcccaggaggtggcacagctggaagcagccagcttagtggtgcagatggagctcggttgagg

SEQ ID NO: 36086 - DNA, 1370 bp, Artificial sequence
  DNA replication origin
tgcactccagcctgggtgatggagcaagacaaggaaggaaggaagggagggagggagggagggaaagatgaaagaaagaagaaagaaagaaagaaagaaagaaagaaagaaagaaagaaagaaagaaagaaagaaagagaaagaaagaaagaaagggagagagagaggaaggaaggaaggagaaagaaagaagaaaggaaaggaaaggaagaaggaagtaaggaaaagaaaagaaaaggaaaagaaagaaaagagaaagaaagaaagaaagaaaagaaagaaagaaagaaaagaaagaaagagagaaagaaagggagagagaggaaggaaggaaggagaaagaaagaagaaaggaaaggaaaagaaaggaagaaggaagaaggaaggaaggaaaagaaaaggaaaagaaagaaagagaaagaaagaaagaaagaaagagagagagaacagggaggccagcggccagtgtggctggagtggagtaaacccggggagagtaaggggtgaggtcggagcgttaatggggacagatcctgtagggccttgtgggtcactgtaaggactttggctttcactcagaatgggttgggagttccagggatttcagggagggctctgagcccaggaggcccctgatctgactcaggtgtcagcagatccctctggcttcatgcagtggacagatggccgaggacctggggggagcaggtagactggagaggaggctgacagaattgttcaggcagaacgtggcagtggttggaatcaggaagagggcagtagagggagtgagacatggttagattctggaaatattttgaaaggatcagctgtgggatgagagagagggcaggttccaacatgatttggtttttggcctccgcgtcctggacaagctgccactgcctgagatggagaaggtaggagaggaagcttggggtaagattaggagttcagatttgaacgtggggagttcgaggtgcctcttttctcccagagctgggacacagcaggatgcagacacctggagttctaggactggtgagggcatttgggaattgtcagaatacagctggggtttaaagccaggcaagtggatgagaaaagtaagggaagggaaacgaaggggaaggggctaaggtgaacttggcagtgtgaggtgtgaggtccttggtggcatggagcagacagctcggcttggagattcatacaccttacctgctgtggggtcatgaggagtgtatggatggcactagggggtgggagatggtagggggaaatggatcctgagctcttcccctgcactgcaggtggacagccaggcggtaagcagggcctggtgctcctgcaggtgggcacctggctccagg

SEQ ID NO: 36087 - DNA, 1216 bp, Artificial sequence
  DNA replication origin
gcagaattgctcacagcgctccccagtccagaaggcctccccagccgggtggtggtacctgccccccatggagcagctgcactggattgggggcacgcagtccatgccactgagcacaaagcctgggtcacactggcagccatcctggcatggtgtcaggcagctgtcgggcagggcaggctcggcacaagagctaggacaggaggagccgcagagctcgtaattgctgcggggaggacaggccagctctggaagaaaacaggtaggagttaaataattgagcaagcattactattctggagcatttccaaccagaataggaccaagggagcggagagagggttgtgggggccaagggtaagtcataaaggcaaaggaggggaggtggaggcatcatcaggatgtagcataatggtggcggcgtggtcacggcggtgataacggtggcggcgtggtcacggcggtgataacggtggcggcgtggtcacggcggtgataacggtggcggcgtggtcacggcggtgattaacggtggcggcgtggtcacggtggtgataatgctggtggcgtgatcatggtggtgataatggtggtggtggtggtcgtggtgatagtaatgatgatgatggtggtagggctggtgatgttgttggtgatgtgatggtgttgatggtgatggtaatgatagcggtgatggtgacagtgatgatagtggtgagggtggtggtggtggtgatgacaatagttgtggttgtggtaacaatgatggtggtggtagtgataatggtgatggtgattatagtagtgatggtgatgctgatgctggtggtgatggtgatgctggtggtgatggttatgatggtgatgatgatgttgatggtggtggtggtggtgatgatgatggtgatggtggtgatggtgatgatggtggtgatggtagtggtgatgatggctgtggctgtggtaacaatgatgatggtgatggtggtgatggttgtggttgtggtaacaatgatggtggtggtagtgatgatggtaatgcttgtggtgatggtggtggtggtgatgatggtaatgctggtggtggtggtggtggtgaggctggtggtggtggtgatggtgacgctggtggtggtggtgatggtgacggtaatgatgatagtgactgtgatgatgacaaaggtgacgaagatagtgatgaagaaacaaccttggt

SEQ ID NO: 36088 - DNA, 930 bp, Artificial sequence
  DNA replication origin
attgcactccagcctgggcaacaagagcgaaattccgtctcaaaaaaaaaaaaaaaaaaaagaatggcgttcattcatccactcattaaaaacttcctgagcacctactatgtgccagaccctgggctcagtgctggggaaacagcagtgggtggaacggtcaagatctctccatcgtggtggagctgagattccagaggagagagagacaataggcctcaccagtatgaattatatagtttgtcaggaggccgtatgcgttcgtgtcagggaagaacatacagaacaggatggggaggggcggtggtggcttccagatggaaaagatggttttaaattgagaagccaaggaaagcctccttgagaaggtgatatttgagcagaaccccaggagagaggcactcatgtgcacatctcaggggtgagtgagtcccgcaggggctggatggggcctggtgcattggacgagccacagggaggctggtgtggctggagctgagcgaggggctggggagaagagacgatgaggtcagagaggtgacggggaccagatggtgggggacttatggggctagtgaggacttcgcttttgcctggagcgaggtgcgccgaggacagggctctgagccaggtggcccctgatgggactcaggtggtcccaggctccctttggctgcaggtgggaacagactgcggtggggcagggaccagagcagggagaccagggaggaggctctgggacgtccaagctggaggggacaaaggctgggccagggtaagggcagtgggaggggagaagtggatggttctggaaatattctctggggtcttatcccctcttcaaaccctgctgactgttcctggggccctcaagtttacgtgggcccctggttttgtttttgtttttgtttttgttttttgagatggagt

SEQ ID NO: 36089 - DNA, 1344 bp, Artificial sequence
  DNA replication origin
cagccgagatgtccagatgttgctttagacctgaagggcagctcgggaggtccagtaggctgggaccctctatgtccccccatgggtgcagatcctttaagaagtgggcttaaggcctagacgtgtggctgatgaacgtggcccacggtcagcagctcacaggcgggccatcaccccaagtagggccaggagccagccaaggggccgtccaggggccccagccatgcccagagtcccgttggtggtctcaggcactgaggtcgatctcgtgatgctggtagatctgtgtggggcccttaaagcaagcagcaaagaggaagcgtctgccggccatagtgatgtgggcaaaggcacggggggccaccagggccggaggccccagctcctgcagtggctccaggagccccttgtcaggctcaaggcggaggacctggctgaaggcgaagtcgctgcctaggatggccagctggtccctggcgatgagcagtggctggaagacgtgggcaccgcgcgagggaagttgctgcagcagacgaaacatggagccgtcccagcgcatgacctgtgggggtgtggccagtgagggcctggggtcccgggggtctctgggggccgtggaacagcttggaagcagaagcctgtcggtcccaaaactcccatagctttcttatcttcataaaagtcaccacccacctgttcggccacacacatgcagttgttctgagcccttcccttgccctcacgccccacacagaagcactcagccatggactctgtcagtttcaccttctacagttgtacatttctcccaccacctctggctgaactccatcccctcctgactggaccatcctggcagcctcttccctggcctctaggctcctctccctgctcccccagtctgttccccacccagagaccttgtgaacacctgagtcagatcagggcccttccagactcagaaccctcccctgcctgcacctcactccagaaacagtgggcagtgcttaaccctagcatcagccttgggggctcagtgtcagggtggggacaggtgtggctgtggtgaagtctggaatgcatccgagtcacagagccagcatttgggggtagaatcaggatgttggggccagcatcagtgtcggggactggggagtggttcggagtcagccagccttgagggggtcagagtcttggcatcagtgtggggtggggtcctggttcaaaggtcggcatgtgagggtaggtcagagtttagaggcttagtgtgcaagattgggtcagtgctgaaaagccagccccccgcccccaggcccagcctcaccatggagtccccaatgtagc

SEQ ID NO: 36090 - DNA, 1094 bp, Artificial sequence
  DNA replication origin
gggatgtctgtgcgtctctcgaagcggccaccggtccagtggaagagcacgggccgctgggaagccgaggccagcagcaggtggggccggccgtccagctccagggcctcagcgtccgtgtcccggtgccaggcgtgcaggctctggtgcgggtaaaagccgggcccgtcgcggcacagcagcgtggtgctgcccgccttggaggcatcggccaccacgaagcagggttgcccttccagccacaggagctcggcgtcattgggccgcagcagccgccgcggggccagggtctgcgttggggccaggcgcaggccgggactgggccgggcccacagctgtgagcccccccacaggcgggcagccagcacgaagaggctcgggcccagcaccagtggcttgcaggacaccacggaggccgctgtggggaggtggggaggcaggtcaggccagccaggcaggctgctggacaggcagaaggacggggagggggctcaccgggcagctcttcctcgggccggaagcgctgcaggctgtagtcccaggagagaatcaggcagcggccggcgaagggctgtgccagcacaatgtgaggctccccttggtaggagaagggctctacgctcagtgccgactcccccaccgtctggaaccaggacagctctgtgggtggagaagagagtcaggcaggccccaggacccccagggtcctcattgctgagcctcagtttgcctacatctctgaaatggaggccattcatggtacccccctcatagggacatataactggaatcttgatctgtagatgtttgtttggtttgggtcgaggggtattttgttttgttttgagacagggtcccactgtgtctcccaggctgaagtgcagtggcacaatcatagctcaatgcagcctccaccttctaggctcaagcaatcctccttcctcagcctcttaagctgagactacaggtgtgtgctaccatggctggctatttttttattttttgcagagatggagtcttgctatgttgcccaggttggtctggaattcctaggctcaagagatcctcctgccttgacctcccaaagtgctggg

SEQ ID NO: 36091 - DNA, 2066 bp, Artificial sequence
  DNA replication origin
tctcacctaccactgcccacatccccagctcactcgtcaggacgggagtcacccagctgaaggccggcagcttcctgagaattccgtctctgcacctgctgtgagtggggcctggctgggccgacaaccagctcaagggagtgtgcgtttatgcacatgtgtgggagtgtatgctcacacagatgtcaggtgggcattgatgcacgtgtgtgggggtgtatgcacacgtctgtacaaaagcatttgtgtccatgcacatactcacacctgcgtgcccatgcccacctaggctgagggtggaggccagggttaaaatgtcagatgggggctgcaattctggaaaaatttctttcttgcccccttgccagcctcttcacctccaactccttctccgtgattgaggacgatgcatttgcgggcctgtcccacctgcagtacctgtgagtgaggccaggggatggaggcaggtgggtctgggcaaggagggacccttctgtggctcccagagtagggggagatgggagctgtggccctgaggagcaggtgtttggacatcatggtgggatggtgttgataaaaatggcgaacccaatggtgatgatgctttgggtgatactgatgaagttctcagggctggtgtcaatgatgtttatcagtgttgattatcacctcacttctctgcttcaagatctacaaagggcccggataaccagagcctgattctggctctccctgactcatagaaacccaggaagggtgtacagaagtcagagacaagaaacgtttcaaatgaccaggaaacaactctgaattaggtagtggtggtgatactgtggtggtgttgagggtggtgctgacgattgggtagtggtggtgatggtggcagcggtggcagtcacagcatgacaatgctggcattggtgtgggtcatggcgttgatgataatggcagtggtgatgaccctgttgctgctgctgacatgggattggtggcattattgatgatgatggagtggggatgatgttggtaaaaatggtagccccagtggtgatgatgctatggatgaaatcactgatgaagttcttggggctcgtgtctgtgataattatcaatgttgtgggggtgggtcattacagtattggtgttgatgttggtgatggctgtgggtaggatgttggggttggtatgaatggcaatgttgttggtactgggttggtgatgatggtgaaggtgttggtatttatggaaactccggcagtggtagtactggtggtgggtgaatatgtgcatcttgggcataatggagatgtgagtgttggcagtgttggtggcgctcatgctgatgtgtgtgatagtgctgcattggagatgcgggtggcaatctttttggtgttgatcatgaagattgtgttgttggtgatgattattagtgttgttggtgtggagtttggtaatgatgatattggtgatggtgttgatgggagtgggtggtgatgttattggtgacaatgatgctagtgttggtgatgatagtggcaaggtataatgttggggataacagcagttattggtcttggggttgatgatggtaacagacatgggtgttggggatgctggcattgggttggtcattacagatgatgctggaggtaatgtggtggtgtgggtgctagcactggtggtggtgatggtggtggcagggtatggtgttggggataatggcagttattggtcctggggttgatgacagtgataaagacatgggtgttggggatgctggcattggtgttggtcattaccaatgatgctggaggtattggtgatttgggtgtcagcactggtgatggtgattgtggtggtggcagcaggacaatgttcacagtgaaactggcaatgactatggggccagtttcatggctcctagaattgatggctgggactttgggaggagaggtttttgagaggctttccctgggattgtccgtggtattggaagagaattcagcaccttccagtgggcctatgtctttcatggggtgcgttccctgaagctcagcgggcctccc

SEQ ID NO: 36092 - DNA, 1441 bp, Artificial sequence
  DNA replication origin
cgctttgtgatttttctatctgtggggctgttggaacccacggccaccgcctccactaggctgggagctcggccaggaagggcgggaggttttttcctcgcttggtcccagggccaggcttgggccatggcacatagtaggtgcttaatacatagtcgctgacggggatcgggctgcgggtcaggggtactccccgcctcacccgcggcgccctccagagcaggagcgggcgaaggagggcggggaggggcgtcttacctctgctgctggttgaacttgcaccggcatcttctgcctgtgggcgtggagaggtaggagaagctgaggctccctcccggcgggcgccaagcggcgctgtagctccagctcgccctcgcgaggggcggggcttgggggacggggcggggctagaggcgagaccgggggccggggaaccaaggcagggtaggcggggcaaggcctgggaggggttggggcggggcggggccagggaggggcgggaccagggagaagcggggccagggagaggggggctagggagaggcggggccagggagaggcggggccagagagaggtggggccagggagaggcggggtagagggcgggagctaggggcactcactcagcacgatgaggatgcccaggatgaagaggatcccggcgatgacgaggcctccgatctgcagggactggtagtctgtgagcagcagagcagggaaggtgagggcagggaagacaggagggagaataggagaggggtaaattgggaaggagggaacagggagaaaggaccagcaggcagaaggggggaagtaagataattaagggggagcagatatgggaggaggaaagtggggtaccagggagaggaaaggggtgtataggaaagggagggaggggacagggaggaggaggacaggggggagagaagacgggaagaagcagaggatgggccacgagatgctgagacagacgcaggcaagagaaagagaaccagagaggtatcacatagacagtgacacagatagacacagacaggaaaagatgcagacaggtggaatcagagaggaaggacaaaatagagggaaggagaatgacagagatatcaatactgggactctgggggagggcgagggggaatcaaaggaccagcaaagccaggctctcccccaggactcaaaattagaccccccgctcaccgtaagtgaacgggtcgtgttcctttggactttctggaaagagagagaaatcaggggttgaatgcttcctggggtcctggcagggaggggcatgaggagaccactggaggctctgccttgctgggcttagagtctgagggtgtctgggcaggctgcccacactctctgggtcccagctgccccctctgcactgtcccagatggggcaggtggcacctaactgccccagctccctgactca

SEQ ID NO: 36093 - DNA, 1020 bp, Artificial sequence
  DNA replication origin
aaagtgctgtcgagaggaacgcacgttttattggaagtcttggcggcagggggagtctgcgggggcagggctggggaaggggcggcggagggggcggtgggcgcgcaggtggagcgtgggagatgtcaggtgccaggggagtcctgtgagggtgaaaagggtgagaggcgaggggggacgtccagccccacccctcgccgcccttcaactctggcacttggccccctccctctcccgcctttccttcctccctccttccctcccaccgccgtgtcagagctgcagcacctggccggattccatcgctccaggtgtttctaccgcctgcgggtggacagacctggggggaacacggagatcgggggtcattctggagaggcatccccagctcctgggcaggtggggcccgcggcggggcaactccccgccctccgctttcagatccagcccttccctctacgcagccagggagggccgggaaaagcggtccttggaaccagccctctccccagaatacccgcagtctccccagactcacggcggatggagctgcggaaagttccctcctcttcatcgggttccccagtcctgggaagacagaggcagagggatttcgggatggaaagggggagaggctgcccttctaggaaccccccagtacaagcctcctttcccagattggtgtaactaggcccagatatggacgaagagcaggctcggggtccgccagaaatgaggagcacccaggagcagcttatgtgctggcagggggcttctaagctggttaacagtgagtacctccgcggatttgggggcagggatgtgaagttggtgggggagggatagtcatggggacttggcagactgccatgagatggcctgggttggaaacccagaaccccccatcttccacttgagtgatcttgaacaaagtgactttacctccctgtgccttagtttcctcatctgtcaaatggggttaataacagcacctccctcccagaggaagtgaaaccgtat

SEQ ID NO: 36094 - DNA, 809 bp, Artificial sequence
  DNA replication origin
tcccttgccttaccattgcttgaatctcccgacaccctctctcctaggctctcagatcccggagcccccctgcaaccccctccccaaacgacgctcaccctttgtgggggtctgggtcggggtcgccatgctgggccggagcagggggctgctggatgctttggcggcgaaggcgcgctgcagcagctggaagcaggacggaccgatgtgggggggagctggggggagccctggcgtgggggggcctgcagccaatgggggcccggggagcccgcccccgtgcaggccacccccgcccccgcccccgcccaccaccgtcgtccccgccccttcctctagggtggggcgccccctgctggggcccagtggcgctggcgtttcgcgctgagggaccgagaccgacaaagtgctgtcgagaggaacgcacgttttattggaagtcttggcggcagggggagtctgcgggggcagggctggggaaggggcggcggagggggcggtgggcgcgcaggtggagcgtgggagatgtcaggtgccaggggagtcctgtgagggtgaaaagggtgagaggcgaggggggacgtccagccccacccctcgccgcccttcaactctggcacttggccccctccctctcccgcctttccttcctccctccttccctcccaccgccgtgtcagagctgcagcacctggccggattccatcgctccaggtgtttctaccgcctgcgggtggacagacctggggggaacacggagatcgggggtcattctggagaggcatccccagctcctgggcaggtggggc

SEQ ID NO: 36095 - DNA, 1270 bp, Artificial sequence
  DNA replication origin
ggggcgggggcgggggtggcctgcacgggggcgggctccccgggcccccattggctgcaggcccccccacgccagggctccccccagctcccccccacatcggtccgtcctgcttccagctgctgcagcgcgccttcgccgccaaagcatccagcagccccctgctccggcccagcatggcgaccccgacccagacccccacaaagggtgagcgtcgtttggggagggggttgcaggggggctccgggatctgagagcctaggagagagggtgtcgggagattcaagcaatggtaaggcaagggagttgggggagggaggtccgctcctcctgtgggcggaagcccctgtaatgcgcccccccgatcgcccctccgggtctctgggacaccccctccccggcaggcgtcctgtgccagacctgcggttggagagtggcagtcccgggagaagggatgctcggacaggtcgctatggcaaccgggtggctggtcccgcaccgtggtggtagcagacggggaagagatgagcttgcagggtgggagcgggtgggtctgcgaccagagacgttctggaagatttcagggtccctggggtgggcaagggaaggggaggaggttcatgtccctcttctttccagtgctgtctcctagggtgtctgtttcctgaaacccttgacagccaggttcagaggaaaggagtgagagctgaaggaagagacagagagaagggatatagcaagagacagacagggagaacctggaagagacagagaccaagagaggcaggagatccagagtcacagatacaaagacccaggaagacaaatagatggactcagagagattcccagtggaggggagaggctgagagcagtagacagagatgcagagagagagagaaaaaaaaatgagagcctgggagatagtgggattgagaccgctatggagagagaagcagagagacggagggagagagacggacccatggggagagaggggagtagaaagagaagaagggagccatgtggggtggggcccaaaccactgcagtgagaccctatgtgtgggaatggggcgatgggaccctccttccagcccacagcaggggtgttttccaatcccagaggtgctgttgggtatacacctagctgcccctactgcccccatccagccacacactgatttccattccacaccaattaacccagttatgcacccacttaaacacccacttctaccgtcgccccctaatagcccccactgctaatc

SEQ ID NO: 36096 - DNA, 1070 bp, Artificial sequence
  DNA replication origin
gagaccctatgtgtgggaatggggcgatgggaccctccttccagcccacagcaggggtgttttccaatcccagaggtgctgttgggtatacacctagctgcccctactgcccccatccagccacacactgatttccattccacaccaattaacccagttatgcacccacttaaacacccacttctaccgtcgccccctaatagcccccactgctaatcctgcttctgcagatgagcaaggcacagactgcttcaagagggagccagtgcccagcaagggtctccagcactgagggcaggggaccaggggtgctgagaagcccctggcagtgaagggaacccgaattccacttggatggctccctcccttccgcgcttcccagcaggcgggggctgctgcactgagccatatctgcagaatccgaagcagggcggggggtggggggggctgcagaggctggaagctaccctagggaggggggcagggctgaggcagcaggcctggcgggagcccagggcttctttttgcagaggtggtggttagcaggatcgatggcagcagacgggcagaggtgggaggacagactcctcaacccaacctcctctgcctccccctttcccagtcacagcatgacaggggaccgcaggtctcgggaaaccccgggggaggaaaagcatgttgtgcattgcaagctgcttaaggaaactaattaatgaattgttggggagcgaggggggaagaggggagagtctccctccaccctgccagagaacaggagggagagttaggagtgaacagaagagggatgcatgagcacagctgggtccgggtccctatccctgaaatggacccttagcttggccagaagccagtcctgcaggggcaacggcaggaggtgcaaaaggaggggagagggtcaagattgaaacctgcatctcacacaggacctcacaggggaccccacccagcctggggtggcgggacctatcacctctcttcacctcccaagatgccccagttgccatagcaaccacctccttcctgatatctctttggcagctggccaggag

SEQ ID NO: 36097 - DNA, 905 bp, Artificial sequence
  DNA replication origin
gggggcgactccgggcacgcaggggagagctaccccaggttcagttctgcacccctacccacaccgtgccccacagatgagaacacacagacagaacagaggaaaaaaccaaatgcacatttattaagctcaagacatggacactgaggggccagggggacggatcttcggggatgagacaaggaggtgcaggggggccatacacggggatgctgggggtgctgggccgggatggactcccggatcccaggagctggaggcctgaggccctgggtctggggtgcagacgggctctttgggggatcgtcattgccaaggcctggagagggacagcagggtgcagcggctccagccttggggtgggtggggcggctcattccggggagcgctcccggcgcgcggctgggtccccaccgcctccacccggtcctcaggctcccgcgctcaggcagggtcggcagcggagtttcctcgggaaggtgttacacgccgccgccaccaggggctggggagagagggggtgcgtgagccactagaaaggtggaaactgcctccctccccacagctcgttggctctccattccccggcaccatggaagccagaccccagggactgtcaccccagagctaacactgaggagctgtcttgcctcccacactctaatgtcttgttcccttggggacacctcctggctgctgtcatggagagaaacacctgctacggggctggcgaccccagacccaacctgggcttttggggctatccgcctgccagaaagggagtccccatctcccttcccatttgcaatctcctcctacaccctcactcctttcctacactccctgtcctgaacatttggatacaacgggaagtcccccattccccacccgctgcagaccatcat

SEQ ID NO: 36098 - DNA, 1049 bp, Artificial sequence
  DNA replication origin
ctcttccctcccccaggggcccagagcccgggagtcggcgaggaggggaaggaggaagagtgagtaacgcctcccgcgctcagaggaaaaagtgagttggtgtcaggggccgccttgcagggatggcgcgctggagagacctaagaggcactggtccgaggggggtggcagagagctggggagactgaggcaggcgggcgggagcgaggcagagcggcccactgtagcccaggagaggaggcagagagatgtgggcgtggatggggggcggagaggagcggaaggggtcaaacccctacccacctgagcccggcccgtgggcagaggggcagcggatggaggtggcgcacgagagggacttacgtcggagctgggggtcctaagccggcagcctcgtggagagagggacgcggcggtggctgctgcgtccaggcggagggtgtggccaggggagcgcgagcgggcggggacccagacgggctcagtcatttcctcttgggtttcctggcttcagagcccggggtgggagcaggagggggaatcgctgagggcgacggggggcaggggtgagggcatagtggtgggagagggtgggaacggggatggggcaggcaggtctagggtgagtggacgcctctgagagagcagggggagaaacgggagggctctattctggggtcgctggaggaagggaaaggacaaatccggaggtgttgaggaaggagaagggattgaaggggggcatctcggggcactgggggaggagaatgaagagggggcgactccgggcacgcaggggagagctaccccaggttcagttctgcacccctacccacaccgtgccccacagatgagaacacacagacagaacagaggaaaaaaccaaatgcacatttattaagctcaagacatggacactgaggggccagggggacggatcttcggggatgagacaaggaggtgcaggggggccatacacggggatgctgggggtgctgggccgggatggactcccggatcccaggagctggaggcctgaggccctgggt

SEQ ID NO: 36099 - DNA, 1205 bp, Artificial sequence
  DNA replication origin
gtaagcggagatcacaccactgcactccaacctgggcgacaaagtgagactcagtctcaaaaaataaaatgaaataaaataaagtggctcaaagactcaatttaagagttaaaactataaaactcttagaagaaaatattgttgaaaatcttcatcacattggacttggcaacaactgcataaataggataccaaaagtacaaggaagaaaaaatagtaggtaaattgaacttcatcaaattaagaacttttgtgcaccaaaggacactatcaagaaagtgaaaaaacctggagaatggaagaaaatatttgcagatcatatatctaacaagggattaatattcaaaatatatatagaactcctacaacttgacaacaaaaaaacaaacaacccaattcaaaaatgggcaaagtacttgaatagacacttctccaaagaagatatactaatggacaataaattcgtggaaatatgctcaacatcgttagtcattggggaaatgcagattacaaccacaatgagatgccacttcacactaaccaggatggccataatcaagaaaatggataataagttttggtggggatgtggagaaattggaatcctccgtgcattgctggtgggaatgtacaatagtgcagtcattggggaaaacagtttggcagttcctcaaaaggttaaaaatagaactaccaagtcacccagcaattccattcttaggcatatattcaaaagaaatgaaagcagatatttgtacaccagtgttcacagctgcactatttacaatagtcaaaaggtagaaacaacctaggtccatccacaaatgaatggataaataaaacgtagcatatacatacaatggtacactagtccgctgtaaaaagaaattttgatcttactgcatgctacatggcttcgacatactacaacatggatggaccttgaaaacattattctttgtgaaataaactagacacaggacaaatgttagacgattccacttatatgaggcacctagaatgggcaatttggtaagcaaagtagaatagaaattactaggggcacaggtagcagggaatggggagttactgtttaatggtcacagagtttatgttggggatgatgaaacagtttcggggataaagagtggtgattggtacacgacattgtgaatatacttaatgccactgaattttacacttga

SEQ ID NO: 36100 - DNA, 927 bp, Artificial sequence
  DNA replication origin
gcactatttacaatagtcaaaaggtagaaacaacctaggtccatccacaaatgaatggataaataaaacgtagcatatacatacaatggtacactagtccgctgtaaaaagaaattttgatcttactgcatgctacatggcttcgacatactacaacatggatggaccttgaaaacattattctttgtgaaataaactagacacaggacaaatgttagacgattccacttatatgaggcacctagaatgggcaatttggtaagcaaagtagaatagaaattactaggggcacaggtagcagggaatggggagttactgtttaatggtcacagagtttatgttggggatgatgaaacagtttcggggataaagagtggtgattggtacacgacattgtgaatatacttaatgccactgaattttacacttgaagtggttaaagcgataaatattatagtttgcatattttatcataaaaatatttttttaaacgatgaagggacgtgaacgggttgaaattttataaaaagtggccagggaaggtgtcactgcaatggtgtcctacaggaggaggaagatcatgtggacatctgcgggaagggtgttctggcagagggagtagcacgggcgatggctctgaggactgtgagaagtatagttggaaacagcgaggaggccagggtgtccgaagctgagtaagccagagagagtgggaggaggtgagataagagggggaaggtcagtttctgctgagagtgaggaggagccacaggagggctgtgagcaggtggacgtgatctggcttgagttttaacagggccagtagaacaaagcacgcctgggtaccgaaaccagccactggccagttggcaacctgggggagtctaacgcgaggaagcgcccagggttcccccaggatgcgctttc

SEQ ID NO: 36101 - DNA, 1281 bp, Artificial sequence
  DNA replication origin
gccagggtgtccgaagctgagtaagccagagagagtgggaggaggtgagataagagggggaaggtcagtttctgctgagagtgaggaggagccacaggagggctgtgagcaggtggacgtgatctggcttgagttttaacagggccagtagaacaaagcacgcctgggtaccgaaaccagccactggccagttggcaacctgggggagtctaacgcgaggaagcgcccagggttcccccaggatgcgctttccctcgccgccacctggagacagcagagtcacgcccagcgctgcgcaggctgatcgccgcgccgcgcccccgccctcggtcgcaggtggctcgttccgggaattcctaagcggaaaccggtcccaagccccgcgccttcgctcggcccctttaagagccagaatttccggagggctgacccgggggctagggatgcccaggggccgaaccacaagttgggaacgggtgggggaggtggcgaaaacttccgaagtggaattccaacttttcctggccctgattccccttgggcatccctgagggggcagagcttcccttccggggactttagagggttcctcaggtcatctaactgggagacacaggaggcccgaagcgccccccctccacccggtccggaggaaccccagtggaagtggagaagtcaggcgccaccaacaagcctctcccagccaggactttgcttagactcgctcctcccggcagggcgcacctaggcgggtccatcgccagccggggagaggggtttgggcagggagggaacaggtgcgcggcgggacccgccctatctcaacaggtgaatcgctccaagtgggtctcggttgcatggatctcggtgcgcttggtttggccggagcagatgggggccggaagggacctgtggtccgcaggcgccctcccagcgggccagtcacttggttcgggccctgggggacggagcgcacctgggtcagcccacttccggggagggaggcagaggaacccctccccgccgctcacccctaagcccagccctcggctcccacccttgtgtacctgggccgaaccattcaccggagcgcgcagcgggtggagtgtggctcggaggaccgcggcgggtcaagcacctttctcccccatatctgaaagcatgccctttgtccacgtcgtttacgctcattaaaacttccagaatgcaacaggacggacttggagtagggacaaggaacggaagtgggaaggggaggagcgtgcacccctcctggccttg

SEQ ID NO: 36102 - DNA, 1285 bp, Artificial sequence
  DNA replication origin
ggggacggagcgcacctgggtcagcccacttccggggagggaggcagaggaacccctccccgccgctcacccctaagcccagccctcggctcccacccttgtgtacctgggccgaaccattcaccggagcgcgcagcgggtggagtgtggctcggaggaccgcggcgggtcaagcacctttctcccccatatctgaaagcatgccctttgtccacgtcgtttacgctcattaaaacttccagaatgcaacaggacggacttggagtagggacaaggaacggaagtgggaaggggaggagcgtgcacccctcctggccttggtgcgcgccgcgccccctaaggtactttggaagggacgcgcgggccagacgcgcccagacggccgcgatggcgctgttggccggcgggctctccagagggctgggctcccacccggccgccgcaggccgggacgcggtcgtcttcgtgtggcttctgcttagcacctggtgcacaggtacggggcacggggcctctgacgctgcggaacgccggagggaactgtagagggggatggatggagttggaggcggcgggaagcgggaagcgggggtctcagaggctgggaccttccgatcccctgggtcttgggcgatctgttgcgcgcgggagtgagaggaattccccatttgtgccggggagcgctccccgcgcccttatctggaagatagcaggaagtgaaactccctggacggtgagacccggagcggcagggagaatggaactctttgtggggagggagtggaagaccgcccgatctctgggaaaagaaaagccgggatgggacttgggcgcacccggggatttctaagttttggagtaacggggagagggcacgggagggctggatcagacgcttcctagagggacagagacgaaggaacaatgcctaggcctcgggtgggtgtgggactggggactccccatcccccgcaccccacccacctcccgcgggctccggattatacgtgcgtaagagtctggtgggatggatttacggacttgaaaccgacttctgctggcaggctttcacctggatgggatatttgggtggtgatgaggtctttcccgagacacttttggttcagtcatttgaaatgactttagagtagggtgaggtggtgggaggctgatggagatattgtgggggctttagtccctccatggcaaagcagttcaggcaaacaactccatggttttccctccaaattcaaaaggccccgggtaacctggaatccttcgtagt

SEQ ID NO: 36103 - DNA, 994 bp, Artificial sequence
  DNA replication origin
aacatggtgaaaccccatctctactaaaaatacaaaaattaactgggcgtggtggcacgcacctggagtcccagctactcgggaggctgaggcaagagaattgcttgaacctgggaggtggaggttgcagtgagctgagatcgcaccactgcactccagcctggagtccagagcaagactccatcttcaaaaaaaaaaaaaaaaagaattgctcccttcaatggtcctttcagacactggcactcaagagctttcagatggggactccaggtcccgcacaaggacgccagtcccaccacccgggcaagcccagcctcatccccctgccctgcccaacatacttccggtgatggtaatcctccggccctggtagtaatctcccagggtcacagcgttgccctgcttggtggccacgaccctgacggtgcgcacgctgtcctggcactcaacgtaggggttgtagcctgggttcccggctgccagctgggcattgagctggttgtcgacgctggccggggagaaggcatcggcgatgcggtcccggcagaaagacttgtacttccagatgacgatgggttgcgtgggggtcgaggtcatctggtaggtacagggcagggtcacaggctggaagaggatcaccacgtggtaggggttggacacggtcacctggatggccctggcaggagctgagggcaagaggagagacagcaagggttgctgtgagctcagggaggtgcttcaacaggaacgccacctgtcaccagcttgacactcgcaagtatgtggtttacagagtgcctggcacacattgttccttaattgccaggaccagtgaggtagccacgataatcatgcccattttatagacccgtggggctgaagtggcaggtgcacggtgacacggccagtttccttggactcgcccgccatccctcttcccagcctgtggcctctgaaccacaccagtcccctcttccctttgccattcacccac

SEQ ID NO: 36104 - DNA, 1512 bp, Artificial sequence
  DNA replication origin
gatcttaccttgaactgtcaagcctagagcctggtggggcaggcagaaatgggtgcagtccatgagttagaaacactagaggagacactttgctgcttggccggggcaggcaagttaattcccgaggctcctgccactgcatctcaatctggaaggtgaccaggtgggcaggacccacgtctcccagatgactcattttttctagaacaggggcttggctgccaaagaggatacttgatttcggcttgtggggacagtggtggacccagcatctgggctttatataaagggcagctttgttgccctgtaaacacacagaccatgggtggccacttcttccagtaagttagctggggagttggaagtttaggtaaaaccttttgattgacaaatgttggcgaattaccatgctgttaaatgaaacattgttctgccaccctggggctgtgggtgcctgcgtgcaccctctgaaaaatcacacaggaagtggggtggggtctctgtgaagctggtgtcccccagcctcagggatgctgcagaaatggaatgaggaccaacagggactcagatgtccaaggaagctctacagcggagaggacggcttgggaaggaggtccaggcccaggtccctccggaacccaatgggtatggggcagcctggctcctgcctcatcccccttctcctgttgattgtgtcctcacagtgtatgccgccggcaaagcagccacctcaggtgttcccagcatttatgcccccagcacctatgcccacctgtctcccgccaagaccccacccccaccagctatgattcccatgggccctgcctacaacgggtaccctggaggataccctggagacgttgacaggagtagctcaggtgaggccgggggaagcaggaacagctggtgggagtgtgctgggcatctggacactgaggggcaggggctggaaggaagagtgtcttgggagccgaggaggggctctgctcctggtgcgcggccactgacagccactctcccccagctggtggccaaggctcctatgtacccctgcttcgggacacggacagcagtgtggcctctggtgagaatccatcgtcccgaagttggatgtgcctgtaagggagaggggtgggccaggatccatcctcccaaaccgaccaccacccccctgtccctagaagtccgcagtggctacaggattcaggccagccagcaggacgactccatgcgggtcctgtactacatggagaaggagctggccaacttcgacccttctcgacctggcccccccagtggccgtgtggagcggggtaagcaggagccttggggtctgagggcttttaaggtgggggggtgaaacatgtctccctgatacctgccgcagggactcttggtgcaaaccctggaccccgggctcctccagcagtcagtgacaccccccttccctgcagccatgagtgaagtcacctccctccacgaggacgactggcgatctcggccttcccgggg

SEQ ID NO: 36105 - DNA, 882 bp, Artificial sequence
  DNA replication origin
aggattcaggccagccagcaggacgactccatgcgggtcctgtactacatggagaaggagctggccaacttcgacccttctcgacctggcccccccagtggccgtgtggagcggggtaagcaggagccttggggtctgagggcttttaaggtgggggggtgaaacatgtctccctgatacctgccgcagggactcttggtgcaaaccctggaccccgggctcctccagcagtcagtgacaccccccttccctgcagccatgagtgaagtcacctccctccacgaggacgactggcgatctcggccttcccggggccctgccctcaccccgatccgggatgaggagtggggtggccactccccccggagtcccaggggatgggaccaggagcccgccagggagcaggcaggcgggggctggcgggccaggcggccccgggcccgctccgtggacgccctggacgacctcaccccgccgagcaccgccgagtcagggagcaggtctcccacgagtaatggtgggagaagccgggcctacatgcccccgcggagccgcagccgggacgacctctatgaccaagacgactcgagggacttcccacgctcccgggacccccactacgacgacttcaggtctcgggagcgccctcctgccgaccccaggtcccaccaccaccgtacccgggaccctcgggacaacggctccaggtccggggacctcccctatgatgggcggctactggaggaggctgtgaggaagaaggggtcggaggagaggaggagaccccacaaggaggaggaggaagaggcctactacccgcccgcgccgcccccgtactcggagaccgactcgcaggcgtcccgagagcgcaggctcaagaag

SEQ ID NO: 36106 - DNA, 1281 bp, Artificial sequence
  DNA replication origin
ttcggcgaccacaacatccagtaccagttccgcacagagacaaatggaggacaggtgagcggcgggccgcgagggcgaacgggcgggcgggcgggcgcgccgggaaggctcggacctggccccagcgccggcctcgccgctctgccgccccctgcaggtgacataccgcgtagtccaggtgactgatggtcagctggacggccagggcgacacagctggcgccgtcagcgtcgtgtccaccgctgccttcgcgggggggcagcaggctgtgacccaggtgggtgtggacggggcagcccagcgcccgggccccgccgctgcctctgtgcccccaggtcctgcagcgcccttcccgctggtaggtgccctgccacccctgggtgggggggggagggagtggagaggggacactggctctgctcttggggagccccgggggtggggcaggtgtcgcccagcggatgctgccttcaggcctcaggctgcatggggccagatccctgttgtgcaccgtgaaacctggggacagtgctcttggaatttttttttcccgcaaaatgggaatgatgtgtcttaagaggaaagtttcttagagtgcgaaacggatttgctcagcaagtgatcgctgacctcccgccatgttccagggctgtttgaaacacaggacagaatgctacacgcagaaggagtccccactcctgttaattgcagagaatgcagtaaaccccaagcacagcaatgaggggacgggatggaggaacagagaaagctaagggtagcctctgccctcctactccccaggctgtgatccaaaatcccttcagcaatggtggcagtccggcggccgaggctgtcagcggggaggcacgatttgcctatttcccagcgtccagtgtgggagatactacggctgtgtccgtacagaccacagaccagagcttgcaggctggaggtgaggagtagaagtcagattggcaggtgggggaggcaacgggcccagcagggagggaagcccccccagccagttctgacttcaccctgccttgccactaaccccccactctccctgcaggccagttctacgtcatgatgacgccccaggatgtgcttcagacaggaacacagaggacgatcgccccccggacacacccttactctccgtatgtgcaggggacacctggagggcctggtgttgaaatggaaggaagaggggtttctggagtagaagctgggcagttagcatgaagtgggcacatggtgtaatgttttttttctttgcct

SEQ ID NO: 36107 - DNA, 884 bp, Artificial sequence
  DNA replication origin
ttccacgtggcagctgtcatgctcacatcccgcactcccatgcctgcctggcctccagaagtaggtctgttcccccagggagcacatctgagggagaaactgcatgaagttctgcctctggctacctaaggccggagcatcctgccctttccagaaacaccaggtctcacctcaggtcatttggccttcagcactgtcccgccccgcctgtcagtagccactgcagtgggcacagcactgtgcaagtgccaggagagtgcttacacccaaacaaccatcattcaacaaatatttactgcccgtgggttctgggctgagcggcacaggccctgtgccaggtctggagtctggcctggagcgtcagggaggctcaaaggcctgagggcttatgtctcatgggtctcatgggacattgatggggggtgggctggggtgacgcttccctagggagaggggagtgtgggtcaggttactttgtggggtgctggtttggttgtgggagaagttccatttagaatgcctcaggagggaagatcgggaaggcctcgaatgcccgagtgaggggctgaatgctgagtcctaaaggtggtgatgggactggggtctgtggcccaggtagttgtgttctgagcagctcctccctgagttcaggcgttcattcagcgcgtgcatactacgaccagccccccttttgcgtcctcagatatggcaatgcagcagatgataggacagacaaggtctcagctctctgtgcgcgttctggtgggagagatgggagtcacacagccgcatcaggcagtgcaggcagtcacaggcaggagaggaaagctggggaagaaggtggcgggtgatggcggcatggtagtgtgctctgaagggctctt

SEQ ID NO: 36108 - DNA, 1153 bp, Artificial sequence
  DNA replication origin
cgcccatcagccaggcccctccattgcaatgctgtcctttccttctgtagccttggcaggctggcccgtgtgcaccctaggtctgcccgcctctgcctcccactaacccaggagctctcagaggcaggggctcaccagaaacctatctgcctctctgtctgtcatgtgcacccttctgtccccggggcagtgcttggtgcacataggactgtgctgaccaagttgggcaaggaccctctgagtgcagattccaccccttggtcatgacttttgcaaggtgggtgggggctcggggcagctggaggtggcgtgacaaagtgcagcagtgatttcaccatgagctgttcagcctcactgggacatctcctgtcctccttcaggccagagcagtggggagggggggtcctcgctctcaagggagaacccagggggtgaggggcggggaaatccctcagaccagggagagaagcgttgtggggctgggggggagttggagggggagggggagtcccacccccaccccaggcttcatgatgtcagactctgcccgtgcctttcccagtccgggacaaaggaccattgagagtcgggcggggcttgaatgcctgggtcctggagaagagaggggcctggtgcctgggctttggtggtggtggtcggggtgacaaggagatcctggggggtatttgcatgtcacagccttcagcatcaacacccacctagttggagctggagtcgtgtgctggtgcagtgtggggctccatctcctccctgggtgtgaactgaaggctgttgctggggagaggacagtgtcccacaggagcactcgcaatagtcgctgacatcagcaactcgggtctccaggagacctgtgggagcgaggcggctggagcccatgagaggaaggggctgggtgacaggacctgtgactggcgggcaggtgccctgtctaaggggacaactgacccgcagatccagtggccggtgctgccgtatcagctgatcttttacgagagagcaggtgtatcagttttccagggctgttacaacaaagtttcacaaactgggtggcttaaaaaccggaattgaggccatgcacggtggctcacacctgtactcccagtgctttgggaggccaaggcgggcagatcac

SEQ ID NO: 36109 - DNA, 2542 bp, Artificial sequence
  DNA replication origin
tggcccagccagctcagctcagggcgcagctctgggcagttgtccggcaccatgcagctgacctccacctccgtgcctgccaccacctctgggggcaccacgatgttgggggtgtctatacgaggcggggaaagggagggctgagaaagcagcactgggctacggtcccggtcccaccccacccaccctcctccttgtccacctccattgctggcaatggtactcctcaacggtatcgcctccgctccctgcctccagattcagaattccctttacccttcctcctcttggtcaccccggagccctccacggagccaccagagcgccatcgtaatgaaaatcacagtgtcgtggccagagcacttgacggcgtttaacttgccagtccctcccgcaaagcgagagggtgaggactgtaattttgctcattttgcagatgaagaaactgaggctgcagctggcaccaggtaacactggctacaaaccctgtggctctggcgtcagcgtgggctccccacacctcatcacttcccaagcggctctcctctcccatgcctgcttggtttaccctccgccgggcatgtgagtgtgtgtgtgtgtaggtatgtgtgtgtgtgtgtgtgtggtgtgggtgtgtggtgcatgtgtgtagtgtgatgtgtgtggtttgtgtagtatgtggtgtgtttgtgatgtatgtgtgtagtgtgtggtttttgtgtatggtatgtgtgcagtgtgtgttgtgtgtgtgatgtgtggtttgtgtggtgtgggtgtagagcgtggtgtatgtggtgtgtggtctgtgtcatgtgtggtgtgtgtgtgatgtgtgggtagtacatgtatgtgtgcagtgtgtgtggggtgttgtgtagtttgggtcgtgtgtggtatgtggtttgcgtagtacgtggtgtgtgtggtgtgtggtgtgtgtgtggtgtggtttgtgtggtgtgagtgtagtatgtggtgtgtatgcggtgtgtggtttgtatcatgtgtggtgtgtgtgtgctgtgtgtagtgtgtggtatgtgtgtggtgtgtgggtagtgcatgtatgtgtgcagggtgtgtagggtgtagtgtgtgtggtttgtgtagcatgtaatttgtgtgtagcgcatggtgtgtgtttggtgtagaggtagtgtctgcagtgtgtgttgtgtggtttctgtagtatgtggtgtgtgtgtgcagtgtgtggtgggtatagtgtgtggtttgtgtgtgtggtgtgtgcatggtgtctggtttgtgtggtgtgtgtttggtgtgtggtgtgtatttggtgtgtgggtagtgtgtaggtagagtgtgtggtgtgtggcgtgtggtttgggtactgtgtggtgtgtgtgcagtgtgtggtttttgtagtgtgtgttgtgcatgtttgttgtgtgtggagtgtgtggtttgtgttgtgatgtgtgggtagtgcatgtatgtgtagtgtgtatagggtgtagtgtgtgcgtggtttgtgcagtgtgtagtgtgtgtttgatgtgtgggtagcatgtgcagtgtgtggtgtatgtatgtggtgtgtgtagtgtgtggtgtgtgtagtgtgtggcatgtgggtagtgtgtgcactgtgtgtgtagtttatgtggtgtgtggtgtgtgtgtggtgcgtgggtagtatgtgcagtgtgtggtgtgtggtttgtgtagtgtgtggtgtgtgtttggtgtggtgtgtgtgtgtagcatgtgcagtgtgtgatgtgtggtttttgtagtgtggtatgtgtgtgtggtgtgtgtttggtgtgttgtgtgtgtggtgtgtggtttgtgtagcgtgtgttgtgcatgtttgttgtgtgtggggtgtgtggtttgtgttgtgatgtgggggtggcgcatgtatgtgtacagtgtatatagggtgtagtgtgtgtgtggtttgtgcagtgtgtagtgtgtagtgtgtgtttggtgtgtgggtagcatgtgcagtgtgtggtgtatgtgtgtggtgtgtgtagtgtgtgtagtgtgtgtggtgtgtgggtagtgtgtgcagtgtgtggtgtgtagtttatgaggtgtgtggtgtgtgtgtggtacgtgggtagtatgtgcagtgtgtgatgtgtggtttatgtagtgtgtggtgtgtgtggtgtgtgtggtgtgtgtttggtgtggtgtgtgggtagtgtgtgtgtggcatgtgcagtgtgtggtgtgtagtttttgtagcgtggtggatgtgtggtgtgtgtttggtgtggtgtttgtgtggtgtgtgtgtagtgtgtgtgtagcgtatgcagtgtgtggtgtgtggtttttgtagtgtggtgtgtgtgtggtgtgtgtgtttggtgtggtgtgtgtgtggtgtgtgggtagtgtgtgtagtgtatgaagtgtgtggtgtgtggtttgtgtagtgtgtgatgtgtgtggtgtgtgcttggtgtggtgtgtgtggtgtgtgtgtagtgtgtggtgagtttttgtaatgtggtgtgtgtgtgtggtgtgtgtttggtgtggtgtgtgtgtggtg

SEQ ID NO: 36110 - DNA, 1269 bp, Artificial sequence
  DNA replication origin
tggtggcaggcacggaggtggaggtcagctgcatggtgccggacaactgcccagagctgcgccctgagctgagctggctgggccacgaggggctgggggagcccgctgtgctgggccggctgcgggaggacgagggcacctgggtgcaggtgtcactgctgcacttcgtgcccacgagggaggccaacggccacaggctgggctgccaggcctccttccccaacaccaccctgcagttcgagggctacgccagcatggacgtcaagtgtgagcctgggtgcgggcggggcggggtggggcggggtggggcggggtccggggagggggtggacctggggatgcggccggaggcggggccgggccgtgatgggggcggggccatgcccagggccaggcagggattggggggttgggtgggacgggggcggaaccaggcagtcctggggcggggccaaggctgagggcggggccggacagtgttgggggcggggccgggctgggagagggcactgggccggttccccagcacctgctcactaacctcgctgtgtcgcgggccttagaccccccggtgattgtggagatgaactcctcggtggaggccatcgagggctcccacgtgagcctgctctgtggggctgacagcaaccccccgccgctgctgacctggatgcgggacgggacagtcctccgggaggcggtggccgagagcctgctcctggagctggaggaggtgacccccgccgaagacggcgtctatgcctgcctggccgagaatgcctatggccaggacaaccgcaccgtggggctcagtgtcatgtgtgagtggcccactctgtgcgtccacacgcccacctgcagccgagagataaagggaaaggggcctcatccagggcgagcatgggctgggtcccgaggggaccggccataaacagtcgaggccaaggtagacaggggggttgcaagtcaaggtgtaccttcattctttccacaagaatctggggaacacctgctctgcctcatcctccttccaggacaagacccaggcctgcctcctagggaagcctgttaactgcagcttcctgggggcagttcctggttgttctgggacttgatgtgggtctggtcccaggaatctgcgttttactttataaaatttttttggagacaaggccttgctctgttgcccagtctggaatgcagtggcaccatgatagcaccacttgccctcaaactcctgggctcaagcaagcctactaccccagcctc

SEQ ID NO: 36111 - DNA, 1115 bp, Artificial sequence
  DNA replication origin
tgagccaagggtctcttgcctgtgtgtaagtgggttttggtgagaactcactgagaaccagtgctcagtctagagcaagccaaggagggtgctggactctcaggccaagaaagagaacacagtttaaaaagcagcattctgtgctgtaatacaattgcgtattttggtacaaaaattagccaggcatggtggcacgcacgtgtagtcccagctactcaagaggctgaggcaggacaatcacttgaacctgggaggcagaggttgcagtgagcagagatcgtgccactgcactccagcctgggcgacagagagactccgtctcaaaaatcatagtaataacaataataataataataatttcctgttttggaaaatgaaagaaaaaacctaccagtactatttttgtaatccagtggcagcaaagcaaagctcaaccaagtgactttgggtggagggtggtgtttggtgctagtggcaggagggaatctcatgggtgaggaagggccggggttcaaggcggctttaggggaggaagtggggggcatctgcagcgcagactgaaaggaaggagcacagcctggaagccagaaaggaggggatagtctaagcctgtgtgagccccaagggtctggggaggccgggggctgggagagttccatggttcctcccttctacgtgtggggcccagagtggagaaggagcaagcccctgtcttgatggaaacaggaggccccttatgtaagtgtgtgatgcagggagggtgagtgctggggaggagaactgagtgaggcagggagtgaatgatacgtggagcgaggtgcagcttccctgggtggtcagagaaggagacgccgcatgggtagaggccagtttggagcgagggagggcgttccacaggcaactgatggaagtgttccaagttgagggagaaacgtacagaccctggagtgggagaaagctccacgattttcagacacagcaaggaaccggtgtggctggaaaggactaagccagggggagagaaggagagagtgtgtggtcaggcagggcctgaggggccttgtagatgaaagactttgtattttgggctgggcacagtggcttgcgccttataa

SEQ ID NO: 36112 - DNA, 1322 bp, Artificial sequence
  DNA replication origin
aggagaggctggtggttctgaaagggctgcttgccacatcttagagatgggtgggagaactctgaggtcccctgagccaaactcctaaaacacgtgggggtgcagaaagggagggcagagagaggtctgacgagtcctgccctgcagaaagaacgtgacagagagccccagcttctcggcaggggacaaccctcccgtcctgttcagcagcgacttccgcatctctggggcaccagagaagtacgaggtaaggaccaggctccaggctggcctgggaacctggatgccagggacactgaaggcctgggaaaggcctgtgaggccaaggggcaggggagtgggagcggcctctcacaggaggagaggaaggacattccagggctgggttggacctggaggctggggaggaggtgcccaggccgaagctgtgtagggggcgatgggacgtggggcctaagggccccctcccctccctgcctgtgtctgtgactgcatttccttctccaatagtccaaagaggtttctaccctggaatctcactgagtgccccaggaggtaggttccgggggcctcagtgtgccctcctctgggccctccttgggccctggggttggcgtgcatgtccgtgtgtccctgtcaggcgtcaaggtggtctctggtgatgtccgggcctgcccggcagtgctggccttgtctagtctgtcctgttgcagctcccttctgtctgtggccaccgtcctgtgtgtccaaattcctgtggctagggggtggagggaggggtgggaagcgtggggggaacccacatgtcacctgcaggacctcccagattgagggcggacccatgcaggacccatgggggggcacgtaccaaaccaggtatttccaggaatttggaaagatggggtcctgactaggtggttttcacccaaaaaggtattaggggttacattgtgtgccctcaaaactcctatgttgaaagcttcctggacgggggcagtggctcacacctgtaatcccacaactttgggaatctgaggcggatggatcacttgaggtcaggagtttgagaccagcctggccaacatggtgaaaccctgtctctactaaaaatacaaaaaattagccaggcgtgttggcaggtgcctgtaatcccagctacttgggaggctgaggcaggagaattgctggaacccaggaagtggaggctgcagtgagcaaagatcgagccattgcaatccagcctgggtctcaaagaaaaagaagaagaagaagcagcttcctggagaaactgaatttgtaggcaaatttcaagttcagcaatg

SEQ ID NO: 36113 - DNA, 1603 bp, Artificial sequence
  DNA replication origin
ttgaccggtgtgttgatgcccagggaggtgttgctgtggtccagccagcctcctggagcctccaacccaaagaccagacccaggtgacacaggacgagggcccagatggccgcgcacaccccccaggaatagcacggcctccggaaggcttggtagcccaaggggaaggctgctcccaggtagcggcctgcactcagggcggccaggaagcccccgccggcatagagtgggaagaagtgggccaccgcgaagacggggcacagcgaggccggcagaggccaggccccggaggctagcgcctccaccgccttcaggggcagagagactgtcagcagcaggtcggagcagcccaggttcagggcgtagaccaggctaggggtgagacggagccgggcgtgggccgtcgcgcctcggatggccaggacgttgagcgggaagcccagcgcaaaggcggccacatagaggccgaaggagagctgcgggggcaggtccatggggccgccgtcctggcctgcacggctcctgtgtgcaacctggctccctgtcctcagatcttggggccccggagaggaggggctcctgggatcactcgcgggttccagccctgtgtggagaattacaattcacctggtgggatcagggaggaaacgaggcccacagagaaaggcagcagtcagggagcagcggagcctggatgagaagccaggacctgtggcccccagtcctgtgctttctctccaccatgtcacctcttaaaaccagggaagctcctgcagcgtcacaggagataggatgtggcgcacaggtcccagaggaagaaagcttctcgatttctgagactctgtggggaggaggggtggagagaattcagaacagggctgggcccacagcctgagccttccctgggaatgggagtttgactcctgagcccactgccctccctggttccctggcaaggcaggagctgcccccaccccccacccacattggaaagccggcggggcagcagggaggagaagggtgtggataaggtgagggtgtggccagggacaggaaaagggggtcccccagggagagcccaagggtcagccaggccccatccatgtcacggttgagcttagcagttctcaggggccacctgggcagggggtctgggggtctggggaacagtcaggtgaagagaggagccacagagagagggacccacctcctggtgctgccagatgtctctgaggctcagcagtcccctcagcgggctgatggaggatgcccgggatgggcagtgagccggaaggggaggagggcgggtgacagggccattagcctgaggttctagcagcttgggtgagcagctaatggggcatcccggctggaggtgaggccacgccagaggaggtgaggggctgggaagatgcaggaacacagaggggccagggaggaattggggtcctgtctgggtaggggccgagtgtgtagccagtgcctctcaagagcagggcttgggggctcggccacaacccagcgctattccctccccagccctcctgcctgttcacacctgcgctggggccaggtcttctccacccttgatgcacccctgggc

SEQ ID NO: 36114 - DNA, 901 bp, Artificial sequence
  DNA replication origin
cctattggtggctgggccctgagtcactgcggggagggacctcaggttgcccagccctgtcaccttctcccaacctagagtataaggagtagtgacagggaggtggactctgagaagcccaggcagttgaggacaggagagagaaggctgcagacccagagggagggaggacagggagtcggaaggaggaggacagaggagggcacagagacgcagagcaagggcggcaaggaggagaccctggtgggaggaagacactctggagagagagggggctgggcagagatgaagttccaggggcccctggcctgcctcctgctggccctctgcctgggcagtggggaggctggccccctgcagagcggagaggaaagcactgggacaaatattggggaggcccttggacatggcctgggagacgccctgagcgaaggggtgggaaaggccattggcaaagaggccggaggggcagctggctctaaagtcagtgaggcccttggccaagggaccagagaagcagttggcactggagtcaggcaggttccaggctttggcgtagcagatgctttgggcaacagggtcggggaagcagcccatgctctgggaaacactgggcacgagattggcagacaggcagaagatgtcattcgacacggagcagatgctgtccgcggctcctggcagggggtgcctggccacaatggtgcttgggtgagtggctgtggggctgcatgtggaaatgggaggctgtgggctgctgggctgagattcttgggaaacggttgaaaggatggatggatctcttacttgcaggcttctggggcagcttccttctatgttctgcccccctcctatgccaccctggagtccctctgcctgtctctctcctggtctctttatg

SEQ ID NO: 36115 - DNA, 787 bp, Artificial sequence
  DNA replication origin
gctcaggagttcaagagcagcctggccaacatggtgaaaccctatctctactaaaaatacaaaaattagccaggtgtggtggctggcgcctctaatcccaactactcagaaggctgaggcaggagaatcccttgaacccgagaagcggagtttgcagtgagctgagattgcaccattgcactccagcctgggcaacagagtgagactctgtctcaaaaaaaataataataaaataaaatatgtagagggaacagagactggaggcaggcaaatagcaccactcacaacagaacaggcaccaagaagggagcgtggggagcaggagagggtggactcctgtgcgccctcactctccaggctccatgaggggtcctggatctgcaagatgtgactggctcagacgtcgaagtccagagccacatctgccgccagacagagccagggatgggtgggtggggaggaacggcgcagcagaggagcgggcacggcaggctgcagggtgccgcgagcagaggacggtgcactgtaggatttggggctggcaacagcagccggggttgggggcactgctggggtgcatggctgagtgtctggggctgggttaaggacaaggatcagtggagttagggatgcagctagacagggcatagaagggtagatttgaggtcagggctgaggttaaactaggtcctgatattgtttgtcacgggtcctctaccttccctttccaccagcccctcctccatgactgagagcacttcattaaggaaattaaaaggggctttgg

SEQ ID NO: 36116 - DNA, 1158 bp, Artificial sequence
  DNA replication origin
ggctctttcgccacggccagggcctggcacccacctgactggcgggggcccgcgcgcgaccttctgggagcagtagtcccggcgcggggcgtcgcgcccagtgacgtcagagagcccgtggccggccctgggtcccaccgctgccggcccagcgctttggggagtgacttccggccatgcggggcctctaccgctgccatcgcggtcccggtctcctgaagtggaacccggcttggagtcgagcgcgacccctcgcccgtgggcgcaggcgatcgagtaagggtggggcgggcctcaaacccggatcagaacccgccctgaccggcgcagagatacgggacgcagccgtgagcactgttttttatttcaccatggacccatcggcgtggggcgcccgccccgggtgtccttcctcccccgggcagccagatgctggaacgggaggcacatgttccggccccggcccctgggaaggaaagaaaggaccttcccgtttcacttgtctcggctgaacatgtagcggaggaggtcgaccacccggtgactgtagccatattcgttgtcgtacctgtggaggaggggtcgggaggttcaagggggttccttccgaccaccccttagttcccctccctctaagtctccagctccttcccccttaccatgaaatgagcttcacgaaattgtcattgagcgcaatgccggccttagcatcgaagatggacgagtgggtatcaccgaggaagtccgtagagacgacctggaagtcagaatttcaaagataagtgtgtccggcagagcaaggacctccaggagctgaggccccgactcttaactctatcgcccatccatgcattcatctataatatttgatgtagccctactgtgtccagtctctggactggagggtatgaccaagtgcagggtatgaccaaggcactgtgtcagggtctggccaaagggcacaggtcacaaacaccctcatgctgtaccagtacatccctttcctaggaataatgcaagcgtttggaatgggccagcatggagggcctctctgaggggtggccatgagcctgggtctagatgactagaaagatctgaccggctggggccctcagcacagtgtctgaggtagaaggagctgcaggaagggaggacctg

SEQ ID NO: 36117 - DNA, 1115 bp, Artificial sequence
  DNA replication origin
actacagaagctggcaggggtcagatcacaggaggctttgggaaccaaggagagctctaggcagaggaaggacagggtcagatttggctttaggaagctctgcatggctgttgtctgaaatgggaaagctgaggccacgaggccagggctggaccagggcagggctttgtggggttaggagagtgactagaagccaagcccaggtgttggtgatcagtggctgtgtgtatttatttaccggcagggggcgctaacaggtaagggaggagcaaagagttccaggataactggagtttggggcttgtaagcccgagggctcaccacgtttccaagggagaagggaccacactgatgggacagtgggactatcagattgggtcagtgcatgggtacaggcatggggggtgatgaagaggccagtgtaggtcaccaacactgggggaagctggggacagaggtgggtctcactgcagaaacaactgaagccatgggggactggggggctgtggtcacaaggaaggagaagcccaggccctagccagagaaagccacataagaaagaggaagagaggtgaacagaggggctgggaaaggagcggcagagatgggaggtagggggatggggttaacctttcaggtgaggggtgtgaggaggggacctccaggagttgttcaggaactggccattgccgggacagaggagtaagcaggtaggctcagaaaggagacaccgctggggggtgggggatgcttgatgtggaaatgacttgggcccccttgtgtctgggagcctccaggagggagaagggtgctgagaacagagaaagcccagaggtggtagggggtgcctatcgccacggcccagcttgcgtttagatgccatgaccctgggcaaaggaataggaatcatttccccaaggcaggtttattgaggacctactatgtgccaggctgtgtactaggcactggaggtgcagccctggataaacagcccccatgtacaggactgtgggagatcacaagcactaatgagagacgctgaggacagtgcctggcaccagatacagcacagtcagcatgagctggttttattaccatcgcccaggacacaagcg

SEQ ID NO: 36118 - DNA, 898 bp, Artificial sequence
  DNA replication origin
cagatctagcctcactgtgctccaaaccttcattaaaatagaccacatgtgcaaataccctgtgggagtgatgctgtagggaaaatagcagaataggggcctggttccacatctgagatgatgcattagtgtcagggcagagacacccatctgcagttgcgatcatcagaagcaggagtttggagctggagatggtgggaaaggcccttgcccccccgaactggcagggagtctgggggtccgggatgctctggctgaactcagtcacacgtggaggaacaagtgggccgcacacaaggcaagttgccctgggaaggagggagcccagggatgggatggggcggggcagggctcacccactcctggccgtagctgtcctgcagatcttgtaggtggtggtcctcccactgcgcccgcagccccacgcacagcagtgggaaccagccctcctgggccattgccgtgaagtagtcagtgaagccagcaaaggactgaatggcacctggagagagacaaggggacacagggagacagagatggacacagagacagggacacaggaagagagggacatggagagacagggacacagatacacaaaggtcaaggacacacagacagggacacgggaagagagacagggacacagatacacaaggtcaaggacacacagagccagggacacagaaacagtgacagagacacagaggcagagagagaagcagggacagagagacagaggcagggacagagagaaaaagacacatccaggacccaaaaagacagaaataggcaacaactcagagacagggtcatggagagcaaggtcagagagagagcagggacacagcagaaccagagagactgtcacaaacagagagggacacggaggacaacg

SEQ ID NO: 36119 - DNA, 807 bp, Artificial sequence
  DNA replication origin
aggtgaggactggggtcaaggtagaaagtgaggacagacaggggtcaggactggtacagggaaagtcaagggtgaggctgtggactgcgacaaatcagccagcagccagggatgaggacggtcagggctgggccgggagtggtgggcagggtctgtgctagctcctcctcgcacctggagtctcctcccctgcccaggggtctcaccgagcacgcgttcgcccaggcctcccaggctgaggtaggcggtctggaaggcctcgcgccactgctcgtccagcggcagctcctggcccttgataaggatggagctgcagcgctccagcacgcgctcgggggcgcccttcatcaccagcaagtgtcgcgggtcccgcgggtcctccagcgtatggatggacagctgtgggcgggggggagaggcgaggctgtggacgggggaacggggcggggctgtggacgagggaacggggcggggctgaggagaggggcggggccgagagctcggtgcgggctctgagagctgcggggaagggtgaaggtggaagatggaggccttgtgtggaggggtccttggtagaaggtaagcgttaaggcggggctaggtgcagatttggagtcctggacgcagggaatgaacagaattagggtgcggagttgggctgggggcggatttggagagcgaggtgctccccatggacagtcccgccgaggagaagctgtgggcggggctgggtggtgggcggggccttgcctctggtggacggggccataggcggagcgggagatggggtggggtttggctgcggag

SEQ ID NO: 36120 - DNA, 1626 bp, Artificial sequence
  DNA replication origin
gaacacgaaaggcagtctcaagacaggggtcatggagggtgaaggacattgggatatggatggggcagacccaaggacacaggacacagggacactggggtgaatcttgggtatggggacataggtgggggcataaagagtatggcaatgtgatacgtaagagatgggatttggaggccgggcgtgtaatcccatgcctgtaatcccagcactttgggaggccgaggcgggcagatcacctgaggtcaggagttcgagaccagcctggccaacatggcaaaaccccatctctactaaaattacaaaaattagccagacatggtggcgggcacctgtaatcccagttacttgggaggctgaggcaggagaatcatttgaacccaggaggtggatgttgcagtgagccaagaccatgccactgcactccagcctgggcgacagagcgagactgcatcttaaaaaaaaaaaaaaaaaaaaaaaaaagagatgggacttggaagcagaggacatgcagtgcagacacaggacagactgaggcacggggaataggagaccctgggactcagacataggacaccagggcagggacccaagcctcaggacacagcacatagagagacacaaaacatgagacatagaagcacagagacagagaggaaatggaggtgcagggcaagggacattggacatatggcagagatgagggcaagggacatggggactcagggacatgtgacatgggacagaggctcgaaaagtcatggccatgggacacaggatgggaactcggagatacacagacatgggagacacgggacacagtgactggggagctagaacatgggggccgtggccacagaggacacagaccatgacgtacaaggtctgcagcacacgcagggacggggatgtgaggatgcagggacaagggggcccaggggacacacagagggtggcagcagattatggaaaacccaggatgtgaaactggagacacggggaatacaggccatggggacaggaggagacatgggacagtggacatggggaatgcaaggcttggggacacaggagaagggaacacgtcagaccaaggcacacagtgatttggggcacaagtcacagatatggggacatggaagattgaggattcagggccagaggatatgaaatatacacagaaacacaagacactgagaagacagagcaggcgagtgtgggacatgagggacatgggagggggctaaaggctacagggaatggtgcatggagcttcctagtaggtggggaaaagcatggggaaaaccaagaaaaccagggcaccagggagcaggtcggtggcctcaggcaggcagcttccggcccctctgaataaccccaccccttccctgtccccagctgtacctggcaatcgctctcattgctgtggttgtcgtcaccggctgctttggctactaccaggaattcaagagcaccaacatcatcgccagctttaagaaccttgtgccacaggtgggttccccagcacccagccactccagatcccagagactccaaactgctcctgtagcctccttccatcaggcccctgtccctcatctgtggcctccatctctccccatgggt

SEQ ID NO: 36121 - DNA, 900 bp, Artificial sequence
  DNA replication origin
gagggaggggaggagagagggagggagatggagagagggagagagagggagagggagagaagggagaaagcattagagagaaagggtgacacacagagacggagagaggagtagctgaaaagagacagcaagacagagaaggcagagacaaataaggagagagcagcaggagagagacacatagaaaggggagcgaggagagagagacaaagggagagatgaaggagggagggagagatggggtgggggcaggaaccaagagacaaagagatgagaaggagcaggacagaccaagctggagaagggaaactgaagcagggggctttccacggggtgtgcatgtggaggaaagcccccaggaccgcctcgccctgcccctctgtcccagggcctctctgcgagcctggctgctgagctgctgctgcgggatgggcccaacgcactgcggccaccacggggcaccccagagtacgtcaagttcgcgaggcagctggccgggggcctgcagtgcctcatgtgggttgccgccgccatctgcctcatcgcctttgccatccaggctagtgagggggacctcaccaccgacgacaatgtgagccatgttgtggggacaggctcaggacatggggacctggggatggaagacactgagcctgggacttgggacaagaggggcagagaaggatggggatagacgaacacgaaaggcagtctcaagacaggggtcatggagggtgaaggacattgggatatggatggggcagacccaaggacacaggacacagggacactggggtgaatcttgggtatggggacataggtgggggcataaagagtatggcaatgtgatacgtaagagatgggatttggaggccgggcgtgtaatcccatgcctgtaat

SEQ ID NO: 36122 - DNA, 1477 bp, Artificial sequence
  DNA replication origin
aggcacgtgctatttagactgaaagaggacactctgcagccagctgatctggttctcactccattatgtcctagcctgtgatggagccataggagaatgactcaacccctccatgcctcagtttccccatctgtaaagggtcttgtcccctcaaagggttattggaaggttaaataagttagcacatggaagccgtcagcacaatgcccagcgcataatgagcaccttatgtttgctcttcttgttgctgcagcggttcccaggggctccctgatctcagggcaggttgacatggggggatctgggcaggggaggggggggccagcccaggagggaatgcctgaggtgcccaggcctagaggtcaccccaaggagcctgtaatcagctgtggtcgggcggttctgctccaccccaccgccctccctgggtatatcaggactggtccgggcccaggctctgttgggtgggagcacaggcaccgggcaccatggggaaggccgtgagtggggcccaggggtccggggtgcagtggggacaggggttgcagtggaatctgagttctccctccctccatcctgtccattcccaggagaactatgagctctactcggtggagctgggtcctggccctggcggggacatggctgccaagatgagcaagaagaagaaggcgggtggcgggggtggcaagaggaaggagaagctggagaacatgaagaaggagatggagattgtgagctctgactggggaggggcgggagctggagggtaggctgggaaccaggcagtgggcggggagggggccaggagagcccagagcaagcaccctgccccaccccaccacacagaacgaccaccagctgtcagtggcggagctggaacagaaataccagaccagtgccaccaaggtgagctggagactgggagcgtacagaaaggggaggaggagagagggagggagagggagatggaaggagggagatggagagagggagagagagggagagatgaagagaggaagatatggagaaatagagagagggagggaggcagaaaaggaaagagggagggagggagagaggaaaggatggagggaggggaggagagagggagggagatggagagagggagagagagggagagggagagaagggagaaagcattagagagaaagggtgacacacagagacggagagaggagtagctgaaaagagacagcaagacagagaaggcagagacaaataaggagagagcagcaggagagagacacatagaaaggggagcgaggagagagagacaaagggagagatgaaggagggagggagagatggggtgggggcaggaaccaagagacaaagagatgagaaggagcaggacagaccaagctggagaagggaaactgaagcagggggctttccacggggtgtgcatgtggaggaaagcccccaggaccgcctcgccctgcccctctgtccc

SEQ ID NO: 36123 - DNA, 692 bp, Artificial sequence
  DNA replication origin
ccatgggatggggcaagggcagagcgctgatgtccaaatccaagctcaaagattcccaggggagcaaggaggccttgtggttcctagaactgtgaagggtacagggcgattgcaagagggcttctggctcgtgggtctcctgcttctgggctgtctgctgtcacaagaacctgcaggatcattaacaagctcagaacgatggccctgatgctgaagcccaaagctagcctggaatttctctttgtgctgacctcgttttccaaacggctcactatccgtgcctatggagatgaagacaggccgatgggggtgtttttctaagaaggggtgaaattgcagaagggccacctggagtgaaactgaaggccatgatcagggttgggggagggaggattcagcagaggagaggaggaggcaatgcaggaagacagtgcggggatcctgggcacgcccaggtaggagggcatgctgggagaccttgggaagaagtggggttggcagactgtgaacaaagtggggacaagtcccagggcagcaggaagggtgggatggagaaggggttggggctggtatctagagaagaggggaagcttccgaggcatccatggaaaggggtataaggtgggtcaggggatgtttcaccatgggggacagagggtcactctccacccaccaagcaggatggcacaatg

SEQ ID NO: 36124 - DNA, 1314 bp, Artificial sequence
  DNA replication origin
caggctcagactttactgtcatctccattccatccaacaaagaaagggcctgggggccagagagcagccaagagacacccaagcagagagtctccagccagacaaacacagagaaggagaaacacaggcagagagagacagccacagacaagaacatcagtaacaatcaaaagagaaatattccaatagcatgtttctctctgtactcccttcacaaaaggagagaacagattttgccacagaaagatgcagaaagagacagagacaaaggcagagtgagaaggtagagaaacagaaagtcaggagagaggccaactcagacatagcccattgggccaggatggatggtctccccgtccaccgcacatctgaccgttagttccctgttcacactcaccagagggggcctcagtgcagccatggagcccagcgggggccctggagcccgagccattggtggcagcatcatgggtggtccagggggcccaggcagaggggggcccacgagggcctggtgagggggccgtagggccatagggcgggggccggctgctgcagaggagagagcggaatctgtcagggtgttagtggggagttccagggcctggggggagttatgtggcagggatgatgaccctggcccctcacctgctctctgtagcacgtgggggacgaaggctggacgcaggataggggccctctggggggccacagctgtgggagagagagatgggggtgtgtgtcatgggggacaggggcacttgggacaaggtgtgtgtgtgcatgcgtgtgtgtgtgtgcactctcagcatcaagaaatcctggagaagagtctggggagccctcctggagatgtgggggcctctcccctggttcattccatgaaaatttaccactgagaagctcctctggctcagccctgtggcaggcaatgctggggacacaccaacagacccagggttctcagggagctcctggtccagaggaggagggaatggagacatcactagagaaggagagccagtggggaccagcgctggaagcagggaagcccaggcagtgggatcagtgctaagagaggggagccctctgacccagccaggcccagggaaggcttcctggagaaagggacctgtgagctgagacccaaggggcaatgaagtgttaggcaaggggtgagtgggaatattattggcaggaagaatatttataagcaaaacctttcccttttcagtttagtgtaactgtaatagaagtagtggggcttagagagtgtcatgagaagggctgagcagccagcaggcaccccagtag

SEQ ID NO: 36125 - DNA, 1045 bp, Artificial sequence
  DNA replication origin
caggggctctgggacctgcagaggaaaggggagaggtgcaaaggggttggtattggggtctcccactgtcctttggtccccggccctcctgccaccacagtaagggctggatgtgcttctggatgtggggcacatgtgtccgcctccctcccccaggtcctcctgctgtccggtctgtctgtgtggaagttcctgggctcctgtctgccccccgtcccttctgtcccttcaccgctaggctccctgcttacctcaagagccatgaggcctgggggtggctctggccgagggggccggggccgaggacgcagggacaggagttcaggaatgcgcagcgggggcaggaggccgcggacgacctccaacgggaggggcaggggctcaggctcgggcaatggcatggccagggccagcggcaggctgggcccaatgactgcagggccagctggggcacctcctgcccccacggccacagccgcgctagcctcctccagcccagccgccgccgccaccactgcctcttccttctctttcaggcccaaccccaggcctaggcccagctctcggggtgctgctggctcttcctgtgggtaagaggagagcatgaggggggccggctcacaggctcagactttactgtcatctccattccatccaacaaagaaagggcctgggggccagagagcagccaagagacacccaagcagagagtctccagccagacaaacacagagaaggagaaacacaggcagagagagacagccacagacaagaacatcagtaacaatcaaaagagaaatattccaatagcatgtttctctctgtactcccttcacaaaaggagagaacagattttgccacagaaagatgcagaaagagacagagacaaaggcagagtgagaaggtagagaaacagaaagtcaggagagaggccaactcagacatagcccattgggccaggatggatggtctccccgtccaccgcacatctgaccgttagttccctgttcacactcaccagagggggcctcagtgcagccatgga

SEQ ID NO: 36126 - DNA, 886 bp, Artificial sequence
  DNA replication origin
ctgatgttcttgtctgtggctgtctctctctgcctgtgtttctccttctctgtgtttgtctggctggagactctctgcttgggtgtctcttggctgctctctggcccccaggccctttctttgttggatggaatggagatgacagtaaagtctgagcctgtgagccggcccccctcatgctctcctcttacccacaggaagagccagcagcaccccgagagctgggcctaggcctggggttgggcctgaaagagaaggaagaggcagtggtggcggcggcggctgggctggaggaggctagcgcggctgtggccgtgggggcaggaggtgccccagctggccctgcagtcattgggcccagcctgccgctggccctggccatgccattgcccgagcctgagcccctgcccctcccgttggaggtcgtccgcggcctcctgcccccgctgcgcattcctgaactcctgtccctgcgtcctcggccccggccccctcggccagagccacccccaggcctcatggctcttgaggtaagcagggagcctagcggtgaagggacagaagggacggggggcagacaggagcccaggaacttccacacagacagaccggacagcaggaggacctgggggagggaggcggacacatgtgccccacatccagaagcacatccagcccttactgtggtggcaggagggccggggaccaaaggacagtgggagaccccaataccaacccctttgcacctctcccctttcctctgcaggtcccagagcccctgggtgaagacaagaagaaggggaagccagagaaattgaaacggtgcattcgcacagcggcagggagcagctgggaggaccccagcctgctggagtgggatgcaggt

SEQ ID NO: 36127 - DNA, 1137 bp, Artificial sequence
  DNA replication origin
cagagccaggagtccaggcctccgctccctccttccccaggagcctaaaatcttggtcctgggagtgagggaccccagctctcttcctctgttagacccaggagtccaggcccccggcttcttgggagtctagtcccccaggtccttcctaacccagacacccaggcatctagtcctcagttcatcgctcacctctggcgggttcctctgcccccagccgggggtctcagccccatttcataccatgcaccccctcccccaagggcctgggcaagggggaattttccgagacgtcagagcaggggtcgcagccaggctcaagttgcagaggcaggggcggggccgagcctcgaccccagcctcggggataggtgctggcctctggggctgccctgctgcaggggtggcgtgggcttggagcgaggcttggggaacagcgggctgggtgagggcagggcggaggctgggagaagtttacggggtgatgggggcggggcggggggcttggtgaacgggctgtctgcctcagggtctcgatcctgcgacatggggggagtgaggggagagggtctggggtcagctgggctaagctgggcttatctgcaacaggaagagggatttccggccagattcccccacccgcccccagcgtcagctgacgtcacaatcggcagagtaactgcgggggcgtggagcaggagtgaaggcccacccaatcctccaccaggcccagtagggagggcgtcctggggctgcttcccaggagtgccaatcatagcaatattgacatcaacaatttcaacaataacaatagtagcaataacggccaacattaaatgagggctcattgtgtgaaaccaactgtgccataccccttcattgaatccttctatgaggcaagtacaatacatactctcatttgatgaagggggaaggtaaggcaggcatcctcccactgctctccttctccagaccccatgcccttccgcgctgtaatagtttaggacaattggggaaactggagtatgaactgaatatgaaatatcatagaattcttttcttagatttgataatggtattcaggaggaaagatatcatttagaaaatgaactcagagatgaaatgttataatgtctg

SEQ ID NO: 36128 - DNA, 1727 bp, Artificial sequence
  DNA replication origin
aggacgccctccctactgggcctggtggaggattgggtgggccttcactcctgctccacgcccccgcagttactctgccgattgtgacgtcagctgacgctgggggcgggtgggggaatctggccggaaatccctcttcctgttgcagataagcccagcttagcccagctgaccccagaccctctcccctcactccccccatgtcgcaggatcgagaccctgaggcagacagcccgttcaccaagccccccgccccgcccccatcaccccgtaaacttctcccagcctccgccctgccctcacccagcccgctgttccccaagcctcgctccaagcccacgccacccctgcagcagggcagccccagaggccagcacctatccccgaggctggggtcgaggctcggccccgcccctgcctctgcaacttgagcctggctgcgacccctgctctgacgtctcggaaaattcccccttgcccaggcccttgggggagggggtgcatggtatgaaatggggctgagacccccggctgggggcagaggaacccgccagaggtgagcgatgaactgaggactagatgcctgggtgtctgggttaggaaggacctgggggactagactcccaagaagccgggggcctggactcctgggtctaacagaggaagagagctggggtccctcactcccaggaccaagattttaggctcctggggaaggagggagcggaggcctggactcctggctctgagggaagctagggctggggcccagactccagggcctccaagtgtcaccagctcacccattgccatctggacttttcccgacccagaacattcagaaggccttcatcgcatccatggacctgtggaactgggatgaggcatccccacaggaagtgcctccagggaacaagctggcagggcttggtaggctgccgaggctgccacaacgtgtgtggggagggtgtccaggtggggcctctgctgaccctaaccccttatcgcctgcagaaggagccaaattaggcttctgtttccctgatctggcactccaaggggacacgccgacagcgacagcagagacatgctggaaaggtggctgcgggctgggacccctaagtgctggagaagaagcggggaggctgggatcctagggcaaagggaggaggggggcgtgcctaggttcctgggactgggtggggaggggccgcgtgcttgacccctgagggtgaaggaaaagggggcgcggggtgctgaaatacgggctggggggccataactcccagtccctgacaagtagagactagagagtgggtagttgaggggtctctttcattgctcacagtcctccctaaactcaggtacaagctcatccctggcaagcttcccacagctggactggggctccgcgttactgcacccagaagttccatggggggcgggtgagtgtggggagaggcggtgggaggtggggactggggtcccgaggcaccggggctagaggtgtagactccctgatctttgaggactgagaacacctgcgccctcaaggtggcatgacctggatccgggtcagccgggccccaagtgccagggttgagagcttagaccctagagtttttgagggggcacctgggctcccctcactcgggatccgttactcctcacagagcccgactctcaggctcttccgtggtccggggactggacagacatggcgtgca

SEQ ID NO: 36129 - DNA, 1879 bp, Artificial sequence
  DNA replication origin
ctgttgctgctgtagccacgtttatttttaattttttaaatagagatgggggtctcccctatgttgctcaggctggtctggaactcctggcctcaaggcatcctcctgcctcagccttccaaaatgctgagattacaggtgtgagccactatgcctggcccacactgatagttttgagcagtggtatgagatcgtctgcctctgggcctttgatcttgttgttccttctgcctgaaacattctttgcctacctgacttctcaaatcagctgtctcctcctccagggagtctcccctgacccttctcctcctgggctagatcaggtctctccttttggcctccctcagtcccctggagtcttctcatcccaggtcaaaacactctgatgatgggtctgtcttcccactggactgtgagctccttaaggggagggtccagggctgtcttggtccctgctgtatcccccgcatcgctcacagacagcaggctctctttaggggctcagtggctctcagaatggcgtaggctctctttacagtgtaggtctgagtcctgtgtcctccagcttggagtggggaaagagtgagtggtgttggggtgcaagcactagttttaattctttgatgatcccttgcactgggaggacacacagcacagtaagcccttttcagggtctgagtcttctcttcaaggggacacagcagatatactctcatgattgggtctgattcctttacaaatcccgacacagggcagggacacagtaggccctatgggctttgggtttagtttctttgcctctctcatcacagggcgggcacatggcaggctccctgagtctgggtctcctttgatcattgcgcagcactggaggtgggtggttcctcatcccaaaactaaccaccgaggagggaggtccgcgaagattgcggagggagtgaaggcggagtcgagaggcggggcctaagggggcgggaccggggaaactgacagcgtggggcggggcttagggacctgggagcttaagggacttggggctggtggcccgcacttcagggtcttcagggagaagaggactaagacactgcagtcttttagcgagcaaggatccaggcctctggatcatgtgagaggaaagagatgaaggcccagacgcctgggtctccgaggtggggaggccaaattccaacatgtggagctgcacacttaggctccctagctgctgtagtcagtatcagcgggaagaatgctgcagaggagcacgcgcgaagaggtttgaccgggaatttttattgtgtctctgctccccgtccgcctcccgcacagtccggataggctaggctgggcacgcggcccccgaagcggtacgtgtactttcgccccccgctcttgcgcacgatgtcgcggcgatagtagtagcgaaggccccggctcagcttctcgtaattcatgcccggctttctcttgcgctcgccccacagccgagccacctaggacagaggcccgctcggtcggagtgggaaggggcggggcttggcgatagtggggagggccgggcctgggggcggtgtgcagtgcagacctgggcgaggcctcgcagagcccggtggagactgggttggttgaggcaggagtacaggcgggagattgggtttgagaagggttgggcggggcctcgagtgggccggggagcggcggggccgagggctacgcggttgaacctagcccttgggcggagctaaattgaactagaagagacggggcggatttggctgggcaggggagctgccccacctctttggggtcgcacagctggaactcgcggctgttgccagtccaacggatgcagctgctacgcgccccgtcgtggagcagctcc

SEQ ID NO: 36130 - DNA, 1283 bp, Artificial sequence
  DNA replication origin
ttctgggctggccaaggccggagccggctccctcagcttgcggggaggtgtggagggagaggcgcaggcgggaaccggggctgcgcgcggtgcttgcgggccagcgccgagttccgggtgggcgtgggcccggtggaccccgcgctcagagcggccggccggccccgccggccccgggcagtgaggggcttagcacctgggccagcagctgctgtgctcaatttctcgccgggccttagctgccttcccgcggggcagggcttgggacctgcagaccgccatgcctgagcctcccctctccccgtaccccgtgggctcctgtgcggcctgagcctccccgacgagcgccgcccctgctccacggcacctagtcccatcgaccacccaagggctgaggagtgcgggcgcacggcgtgggactggcaggcagctccacctgcagccccagtgcgggatccactgggtgaagccagctgggctcctgagtctggtggggaggtggagaacctttatgtctagctcagggattgtaaatacaccaatcggcactctgtatctagctcaaggtttgtaaacacaccaatcagcatcctgtgtctagctcagggtttgtgaatgcaccaatcgacactctgtatccagctactctggtggggacttggagaacctttgtgtggacactctgtatctagctaatctagtggggacatggagaacctttgtgtctagctcagggattgtaaacgcaccaatcagcaccctgtcaaaacagaccactcggctctctgtaaaatggaccaatcagcaggatgtgggtggggccagataagagaataaaagaaggttgcccgagtcagccgcggcaacccgctggggttcccttccgtgctgtggtagctttgttcttttgctctttgctataaatcctgctgctgctcactctttgggtgcatactgccttcatgagcagtaacactcaccgcgaaggtctgcagcttcactcctgcctgagccggcgagaccaggaacccaccagaaggaagaaactccggacacatccgaacatcggaaggaacaaactccaaacacgccaccttaagagctgtaacactcaccgcgagggtccgcggcttcattcttgaagtcagtgagaccaataacccaccaattccggacaccttaactgctcagataaagtttgaaaatatttagtaggataattctcttctcaatgtacattttatgtccagcagggacattttaactaagatatatttcttgat

SEQ ID NO: 36131 - DNA, 1487 bp, Artificial sequence
  DNA replication origin
ctgccatactcaagtgatcctcctgcctaagcttcctgagcagctgtgatgcaggtgcttgccaccatggccagcgatttttaaaaatttttttattgttttgtagagacagggtctcactatgtagcctaggctggtctcgaactcctcaagcgttcctcccgccttggcctcctaaagtgctgggattacaggcgtaagccaccgcgcccccccgcccggctaggtttttgttttgtctttcattcttttatttttctccttagcacttattagcctctaacatgtgtttttcttattggttttatctattttcccctctagaaggtaagctttatttatttatttattaagctcttttaaatctgggaagagttcctgtaagctttattatctgattcccaggaagcttgtagccatttttctaacaccagccaaggacgcggggaccagagaggaggaattggtgggcgtgggacacctgaggaaagggcaggggtgtgtgtttttacgttttagttaaaaaaaaaaaaaaagaaccaacttgccctcatggaaggagtgtaagcaaaagtggatgtagtcagaggcatgtgcctggcttgattgctatataacacagtttcttatttccattctgtgatctcagatggtgagagagagagcttggctcagtggagcaagagagagaaagagatacctggagaggtggcaaggggccaagccacacgggccctcagtgcgaggtgaggagggcgctggagagccgtggagggttagaggctgaggagggatgcagtcacctggggtgtggggggaacagccatcaaatggctgcctgtccctcaaggggtccgggccctgacatagccctgacctctttgctcccctcttacccacaggagccggcctctgagtttgggggctggggcggacaaacctgtcctgcaggcaggcccgcctgggtgaggccacgctgctgccggtctgactgagccacactctgcaggtatatggtaggatggagcccgaaagccaagtggcagatgtgggtcagagatggcggcctacctacctgactgcccagaggtcagaggtcaggtcaaaccccggcctcccatctagcaagtcctggcctattattattattattgagacggggtcttgctattgcccaggctggaatgcagtggcaccatcacagctcactacagcccctacctcctgggttcaagcgatcttcccacctcagcctcccgactagcggttactacaagtgcgcaccactatggccagctaatttttaaattttttggagagatgaggtctcactatgttggccaggctggtctggaaatcctggcctcaagcaatcctcctgcctcagctcccaaaatgctgggattacaggcgtgagccactgtgcccagccctgacctgtcttactgagaggtgacagcgtgctggcagtcctcacagccctcgct

SEQ ID NO: 36132 - DNA, 974 bp, Artificial sequence
  DNA replication origin
tcactcaggacagagggctctgatctaggaccagcaactcacaccctctcccctcacatccacaggcttgaaatgagatgagatgttcctccctcccctttcaaccatggacctcacactgtggacttcctcttagagcctctgagttaggtacccaagccaaggcacaatgtccctgccccccataagactgcccagcccctatggctctgatcggctggtacagctagcagccaggctccggccagcactctgtgatactctgatcaccgtagggagccaggagttccccgcccacagcctggtgctagcaggtgtcagccagcagctgggccgcaggggccagtgggctctgggagaaggcatcagcccttctacctttgcccagctcctgaactttgtgtatggggagagtgtagagctgcagcctggagagctaaggccccttcaggaggcggccagggccttgggagtgcagtccctggaagaggcatgctggagggctcgaggggacagggctaaaaagccagatccaggcctgaagaaacatcaggaggagccagagaaaccctcaaggaatcctgagagagaactgggggaccctggagagaagcagaaaccagaacaggtttctagaactggtgggagagaacaggagatgttgcacaagcactcgccaccaagaggcagacccgagatggcaggagcaacgcaggaggctcagcaggaacagaccaggtcaaaggagaaacgcctccaagcccctgttggccaaaggggagcagatgggaagcatggagtgctcacgtggttgagggaaaatccagggggctctgaggaaagtctgcgcaagctccctggcccccttcccccagcaggctccctgcaaaccagcgtcacccctaggccctcgtgggctgaggccccttggttggtggggggccagcctgccctgtggagcatcctgctgatgc

SEQ ID NO: 36133 - DNA, 1263 bp, Artificial sequence
  DNA replication origin
ttcccagatcagactccgcgcgccgtggattgcagtggaaggggcgagtgacttgcggtcgcacagcccccaccagtccaggaccggcatgccgcaaggtgtgcccggacaccgagtcctcggggccggctgcctcctggggaggacggggcgcctcgggggtggaagaagtgtccatcccgctggacagcggacgcagggccaccaggggccgctacaggacaaggggcgtgggcgggggtgtgcacagactaaactcggctttctagtcctgaagggagggcacaggaaactctttattatggtgatgagatcgacaatctcccctactgttaaccttcgctcctgcacacttcagtgtcctcactctgtagggctcgctggcctgggcttctgcgacccgcgatcgtccaggagagggcactcggcgcccttcctggggcgcttctggggcggaatttgctaggccgccgtagcagcggtgccaggtcagaagccgagccggcccgcttttcgttctttaattggactcttggctaagacgctaccgacaccccgtcaggtggtggaggaagaaggacaacagggagaggtcgagggccgagacggcctcgaggaggagtagaggaaggtggagcggatggtccatccgggcgggagttggctgggcgagtgaccgcgcatgtgcgcctgcatggaggccaggctgggacagccggccccgcacagggagcagcggtacggagcggccccgtgtgtccgcaggtgcttggtcatggccgagaagtcccgggagcgctgaggacaaaggctacaggagaagggcttctctcctagagcggtcggaaggggaggccggtgaaggaaggaagaaggcggcgaaagctggccaagttaggggtggatcgggccacggggctaggggattgcgcgggaaccgggcacacaggtggagactcaggagcggagttgggaagaaagccgacagttcacacagggcagggcgcccatacctgtgtggactcggtagtgcgtctccatctgatgcttgagtgaaaacctctttccacagacagagcacgcatagggccgagaccgagcaggaggggccgggggagggtgcgggcgaggtgggcagcctgccttgtcctcatgacccgcacaggttgcaagtgcgcctgtggggacagagaaggcaaaggagggcagggccaggaatcccagcgccaactcactgtaccattcaggcaggaaatcaagggc

SEQ ID NO: 36134 - DNA, 1081 bp, Artificial sequence
  DNA replication origin
gggaggggcggcccgtgcgcagggccggggggaggggagagagcgggggcggggcggggcggccgcggcgcacgacaacaaccagcgccgccgcgggagaccgggggccgggccggccacgcgcagggcaccacgggagagggagtccgcggccggccggcgccctcggaccgcacctggggagcacagacccccgcgtcgcggccgcagaggggcgaaccgcgggggcctccgggaaatgtagtccggacgcctcgcttcttccgccggcagccagggcgcgagggccgggacggcggggttcccggccaggacccggaaagcgggttgccgggtctccgggaggtgtggtcctagccccaggctcctcccattgttcttggctaggccggcggcccgcgtggactaccactcccagggtgccgcgggctcgggccccgggacccccgaggccctgggaaatgcagttcgcggctgcaggaggcgtgggctggagaaggagcggtggaaagcatagtcagtctccgttccaggcgcgacctggcggcggcttggcacggtgtggagggaagacgccggagaggccgcggtctcggggtccgtgtgctcccggagaggaggcgggtggccgaaagcagggtcggagcacgcgttcctctctctcccgggccgagcgttcccagatcagactccgcgcgccgtggattgcagtggaaggggcgagtgacttgcggtcgcacagcccccaccagtccaggaccggcatgccgcaaggtgtgcccggacaccgagtcctcggggccggctgcctcctggggaggacggggcgcctcgggggtggaagaagtgtccatcccgctggacagcggacgcagggccaccaggggccgctacaggacaaggggcgtgggcgggggtgtgcacagactaaactcggctttctagtcctgaagggagggcacaggaaactctttattatggtgatgagatcgacaatctcccctactgttaaccttcgctcctgcacacttcagtgtcctcactctgtagggctcgctggcctgggcttctgcgacccgcg

SEQ ID NO: 36135 - DNA, 1845 bp, Artificial sequence
  DNA replication origin
acgggccgcccctccccccgcctccccggcccctctcacggtgccaagatggcggcggcggcgggcggcggcagttgccccgggcctggctccgcgcggggccgcttcccgggccggccgcggggcgccggcgggggcgggggccgcggcggacggggcaacggggccgaaagagtgcgggtagctctgcggcgcggcggtggcgcgacggggccgggcggagccgagcccggggaggacacggccctgctccgtttgctggggctccgccggggcctgcgccggctccgccgcctgtgggccggcccgcgggtccagcggggccggggacggggtcggggccggggctggggcccgagtcgaggctgcgtgccggaggaggagagcagtgacggggaatccgacgaggaggtgaggcggttggaggcgtccccggcgccgggtggggcggaggccggggcttccaggggtctgggttgtcccgggggcggcgtgggcaggccgggtcctcagggttccttcggagagacggggcacggagggagggcggctgcatgcagcttccgggggaaagggcctctggaagtgggtagagaagccccggctgcagccaggcactcgcgcccgatgtcggtcccgctgaagtgtcttgggccgatccttttcggcagctggcaaagctagggcggtggaggtttgggcgaggaggcagtggggactgcatgtccagccagtcgtggttgacagcggcagcgtggccttggcagacaggttggagctgtctgggctcttacctgtgggccgccccgccgggcctcgcaacctcctggtttctccagggccccagtttctcttggcatctcaggtagagtggtggagggcttcctcttggggctcgggttgaacaggagtgggatgaaggccgggactgggcactctagcaggtcagagctcagctcaggatttctcccccagcctttcagaacaggcaggaaggtgtgggttgcgttgccctggacggttaataacaacctgagagctcgcagtggagcctgtacgaaagccatctgatgccctccccgccccttcacttgcgggcccctgttcccaacttaatgcagaaataaattgtggcccgaaagggtgtcagtggaggtcccactttggtctgaattggactctgaaggaatctgagtatggggcctgctgcctttcctgaggagaccctgtcgtcttctctcttgggccagtgaaccatggctttggctgtgctggtgtggtccggcactggggatcggagttcgaaatacctggcgcctccatccctagggagagaccctctcttccactacccgcgacctttgagtctttttcgttctttttaaataggcaggggtatgctaagtgggaactggggatattcctcgatacctcagatggaacgagggctttggcactgactgctgtttctcccctccaccccggtcccctaaatcaggagtttcagggttttcattcagatgaagatgtggcccccagttccctgcgctctgcgctccgatcccagcgaggtgagtgacgggggaactccacctctttagcgtcacaggaatttatcctcgcccttcgtgtcagctcttccctgttcaactagcctctgtcagttgccgaatgtgttctgtgttcagagtccaagctagtctgggcagcgggggaaacacacaagcaagacttagtccctgccctcctggagcgccttcctctgtgtgtagggctggcttgatccatctccccacaactattctccttttaggtcgagcgccccgaggtcggggtcgcaagcat

SEQ ID NO: 36136 - DNA, 969 bp, Artificial sequence
  DNA replication origin
tggaggggctgggggaggagggggcagctcccgggtcagtgaggtccagcgaaatgtgggttcccttaggatggaccgtctcttctcagggagtggaactggggtagatggaggagttggggcacgtggtggagaggggactggtgctggctcctggggaacaggtggggaggtggtaatgggaggtcgcaggacaggtgagacctccacctttgggggtttgggggggtcttcatccataaatcgccggggtgtcttgatgacacgggaggagcgggcactcaccacaggcataataaactgccggatattcttcaggaaggtggtgcttttgggggccacggtgggactgtcttccggagggcctcccgtggcggtgctgggggttggagtgggaggagaggtgccctctggccctgcccgagcagcttcccgctccgcccgctggctgggagtcaggggaggccggcccctcttcctggagcacgtagctgggaccacaggaggaggggattcctcctgctcctcttgggcaggaggcggtggaggggatggtagaggtggtggggacactgggggtggtggtggagggcagagtgggggtggaggagatgtcgaagggggtgggaggggtggaggaggtgaaggggctggaggagtcagaggcggtggtggcagctttgcctcttccttttccgcagctggcatcatctcctcagctacagctctttcttccttctcttctccctccttgtctttttcttcttcttctttcttctcttcttcctcgtcatccagcttctgttcctgctttttccagcaagggctccctccctgtccagatccaactcttctttgggggacatcctgccaactttcctcatgttgaccttgaccttgacctgattcgagtcccaaggacaattgtcccatctttacttttttggcccttgaaacaaacttgatcac

SEQ ID NO: 36137 - DNA, 809 bp, Artificial sequence
  DNA replication origin
ttttccaggggaggcatctgctgtggtgacggcggtggctgcagctgtggctgtggtggcggtagtgcctggggcaggagctgggtttgcaaggcctgcaggggctgcagtagctgagcctgtgtctgtggcccgttgctcagagctggagccccgtgaggggacacctcggccttaacaggagtggtgaccacaggggcgaatcgaggcaggctgaggtggttggtgcggcccactgcccgaggctcaggctcagctggagagtcatcggcaggaggaggctctggctcaggggcttcaggagccccaagaggaggaggagtaagcaccgattcgtagatcttcaggtgggcttcgcttggggtaaactgaggggcccgaaggagtaggggcctccgggaggaggtggcaggagcagggggtggggagggggccgggggaggtggaggggctgggggaggagggggcagctcccgggtcagtgaggtccagcgaaatgtgggttcccttaggatggaccgtctcttctcagggagtggaactggggtagatggaggagttggggcacgtggtggagaggggactggtgctggctcctggggaacaggtggggaggtggtaatgggaggtcgcaggacaggtgagacctccacctttgggggtttgggggggtcttcatccataaatcgccggggtgtcttgatgacacgggaggagcgggcactcaccacaggcataataaactgccggatattcttcaggaaggtggtgcttttgggggccacggtgggactgtcttccggagggcc

SEQ ID NO: 36138 - DNA, 1406 bp, Artificial sequence
  DNA replication origin
accacttttccctttcccacttggctatcctagatgaagactacgagatcctttcaggactgccagactcggtgctgtacacctgcggaccgtgtgctggggcagcgcagccccgctggcgagaggccctgagcggggccctccaggggggcctgcgccaggtgctccagggcctgctgagctccaaggtggtgggcccactgctgctctgcacccaggtctggagggccctggaggcaggatgggccggggctaggcccacccccagccctgctaacttccccgctttgcagtgtgggccagatgggaagcaactgcacccaggaccctgcggcctgcaagctgtgagtcagcgcttcgaggatggccactacaagtctgtggtgagtggtacaccaggaggagcaggtgggtggcaggaggagagggctggaattgtgcagaggggactcagtctctgacaaacccccttacagcacagcttcatggaggacatggtgggcatcctcatgcggcactcggaggagggagagaccccggaccgccgggctggaggccagatgaaggggctcctgctgaaggtgagctcttccggggatgcttgtggggtgggggagtgggaccttcagaccctgcccctgccagctctcctggggaagctggctcttctcatcctgttaacccactccccagctgctagaatctgcgttcggctggttcgacgcccacgaccccaagtactggcgacggagtacccggctgccaaagtgagcaaggctgggtagcagaagggaagccggggagtgagggcaaggccagggcatgcaggggccacgctgggctgagaagagatgagcagaggtagggtctggagcagagctggagaggagggtggtggaacccaggtgagattccctggtggttctagactagcaaagctttgtttctgctttgtgcaggggaatgctggggacaaagcagtgagcgaatcagattgggctctgcttaaagagctcattgtggagccgggcaggcactgaagacccagatggtcagggcagtgatggagaataccagggggcggtgggggcccggaggggtacctgctggagccgaggtgtcagggaaggcttcctgaaagagatggcattggagcagagctggggaggaagagtattgcaggcatgaggagcagcatttcgtatgtccaagctggcacaagagggcctggcttatttggtggactgagagaaattccacatagagagggagtagcgggtgtcatggcgagttcaggctggtttgtggatgggcccccgttcagctgcccttgttgggcacatcagctgctaaccctgcctgtccacagcggagtccttcccaatgcggtgttgcccccatccctg

SEQ ID NO: 36139 - DNA, 1103 bp, Artificial sequence
  DNA replication origin
cctaccatccaaatctcttctgcctcctgctctgcccacaataacctctcccccatctccaagcccattctttgccctgtgccatccagctctcagccacatcccacagccagtgtggctgtaagggggccggtttgggagctgagcagatgcagttccaattccagcttccctagcatgttactgtgttcagccactgtccccttcaaggtgtagtatggcgacactggagagcgctccatgagcacagtgccccaagttagggagctgtaagcactctactccctgcagtcgtccaaaagccagtaccccacctcaagtaggcagcgtgccgctctccccacctcacttcccatgaaaagccgggcacagcccctggcacacaaggcatggcagtaagcgagctgccgttacattacagcaactgaagcaaaagcaagcctcctggactttccaaaagggagcggggaacagagatctgtaggtttgtttagggagagcggtattcaggaagaagacagagccaaagccacacctgaggaaggggcggggctgtgcacaatggtctggttctcctctgcagcctccaggtgagctggctcttccctcggcccccatggccgatactccagaattcggcaccgataccagcagcgcctccgagcatccactgtgctccagtacagacgggagcacctggcatgtgggataagacggttaggatgcttgggaaatgggatccagctatggagtcccctggccccatggatcaccccgaccgctcactggtagccaatggggaagagccgtccctcgcagtccgagagatcagacagagtacccagggagtcaatgcggatggaacctgtggtgcaaagcggaggtcaggagaggcaggcaggacagggtaggaggacagggcggagagcaggcagcttaccaatgagcacgttgatggcatcgggttcaagccccgtcaagaacttccgcttgaagttgatgccctcgaagtccacatagactcggcggagaacatcaaaaccatcggggttcacaatttcctggaagagggggtggcaaagtgaggtggctgcattggtggg

SEQ ID NO: 36140 - DNA, 1310 bp, Artificial sequence
  DNA replication origin
actggagcacagtggatgctcggaggcgctgctggtatcggtgccgaattctggagtatcggccatgggggccgagggaagagccagctcacctggaggctgcagaggagaaccagaccattgtgcacagccccgccccttcctcaggtgtggctttggctctgtcttcttcctgaataccgctctccctaaacaaacctacagatctctgttccccgctcccttttggaaagtccaggaggcttgcttttgcttcagttgctgtaatgtaacggcagctcgcttactgccatgccttgtgtgccaggggctgtgcccggcttttcatgggaagtgaggtggggagagcggcacgctgcctacttgaggtggggtactggcttttggacgactgcagggagtagagtgcttacagctccctaacttggggcactgtgctcatggagcgctctccagtgtcgccatactacaccttgaaggggacagtggctgaacacagtaacatgctagggaagctggaattggaactgcatctgctcagctcccaaaccggcccccttacagccacactggctgtgggatgtggctgagagctggatggcacagggcaaagaatgggcttggagatgggggagaggttattgtgggcagagcaggaggcagaagagatttggatggtaggaagggctttattccaggttggagcatgacaagaagtggacagaggaggagggtacacccatcccgtctggaaaccagggagttttgggtggaggagggagatcagtttgcagaggttgggtggagccaggtaatggagagcctccgggccggggcgggcgggagcgtctgatgtggcttggatgcaccaggcaagtaagaaagtggtaggactggccgtgctggagggagggcagttccccatggcgtgcaaagcctgcagcagaggcagagaggagatggcaaggagcgagtggggagaggccctgaaggccccctggcccaggtgtgtgcaggttttgccaactccacggtgggtttagcctgggtggtcactggaaactggggcctgttgtgactgggtcagggtcggggacctgggaggcatagtggctcaggatgagagcatgtgggcaggctttgacacagagcccctaccaccccaatgccatttctcgcctcttcagagcccccaggtggtgaggaccccccactggacacagatgttcttgtccctggagctcctgagcgccactcgcccattcagaacctggaccctccactgcggccagattcaggcagcgcccctc

SEQ ID NO: 36141 - DNA, 1610 bp, Artificial sequence
  DNA replication origin
acctgtcaggaaggggaaggacagaggtcccagaccctccagggagaggggcctggccactcacccaggactttcttccccagcgggctccccaggccgatccaggtcaaggaccccacgcactgtgggggttttcatcctcacacggctaaacctgggagggcgagcccgagaaggatgagccgcatctcccgcccatctgcccccttgcctgctctgccagcctcagcacccgcactcacccgccactgccaagccctggaacctgaggggtatcctctgaggcctctccatcttcatccagccggggggctttgtatgggggaggtgctggcggggaccggccggagaaagtggacaccctcttgacgcggatggcctggcggggcgggctggctggcccactgctcagcaccagcgtcaggggagggggtggcgggggcggggcagggcggaccactccgaccacgggcagcacgccgaggagggggcctgggggcagagtccaggaggtgggagccgtgggggaaatggtggggggcaaaggtggctgcttcactgggggtgggacaggttcaccctccccagccatcttcacaaatacttgccccagcttgttgacaagtatgattttggatgtggcgggtttggggggctcaggggcagggccaaggcttaacacccggacccctggggcccctgggagccaggcaaatgtgcgggtggggtcagctgggctggcggtcaggccttgggagggctggctgccattagccaggggaggcgccggggggagtgactcctctctagggccagcacctccatccccaggaccccctaggttcttcaacacaaaatccacaatttccgatggcaggtcctcaggaggccgggccctgtcccctgcagccccaaggacccctgcccggactactcctggccccgaaggaggcgtgccctggccccgaggctgctgcaccgcctcagcctcactgtcagtgccgtcgtccacgccgtccagctgttcaatgcggggggctccaggggtagcgctgggggccagaccaggggcggacaccacagtcacagggaagtggatgtagcgggaggtggggctggactcctcctcggagctgtcccccgggcccccgtggctgctccccatggccccagcggctacaatctcttcctggaagggctcagtccccagcaggctggccgcgaagtccaggtcagcagcactcagtcctgacaccacctccatgtcctcgaagtctgggcccaggtcttcagggggtggtggagatggggccgggccagggggagccagctcccctgaggtaggtgtgagggctgtgacgactgaggtaggagggggcaccctgagctgaggggaggtttttagaggaggggaggcccaccgtgatggaggcggcctgggagccaaagggctgggacgacgggaacgtctggggggagctgggaagtccgggtctcccactgtggggatgtggtgggtcagtgaagatggacttcctgtggggggagggttggtgttaccagcagctcccacctccgcggctccacccccaacccccacatgcccggtg

SEQ ID NO: 36142 - DNA, 1206 bp, Artificial sequence
  DNA replication origin
accaggcctcttcccactgccttttccatcccagcctgcccttccctgccatccatggctccgctgtcttggccctcacaccaagcacctccacgctgctcgcccacctcccgctcccgatccttagctgaactctggccaagtgcttgggctgttttgccttcttcaaccatggtctcaattctggacttggacacaacgccccaccctgtgccacctgctctcactggacaccaacgctagactccacaggcctggcagtctctgtggcagctgagatgtgacgactcccttccctgggcctctgggacaccactcttctgatcttcccactgtccctgaccctcatctcggtgctagctgggctgcattccctctagatgatcctagaacttcacctttggctactctaggaagctctctctcagctcctggcaggctaggctctgaggccctcccctaggctcttgggcatgctggacaaagacccttaaaaggatcccacgtagaggcgaaatgtcatttccatgtctgtttctcccacaaggccagaggctccccaaggtcatctctaactctagcaccgagcctcaggcttggcccctgggagtagatactggttttgaaagagggctgattttgcatctgtgagtcacccagctgagccaggcacaggcaaggagggagagggcaaggccggtccctacctgaatagtggtgccactgggactcaagcagcaggtctgggggaccatcggggacctggggaggaccatcttccggaagtggcagcaaaggggaccgttcctggaggggcctgcgagaagagacctgtcaggaaggggaaggacagaggtcccagaccctccagggagaggggcctggccactcacccaggactttcttccccagcgggctccccaggccgatccaggtcaaggaccccacgcactgtgggggttttcatcctcacacggctaaacctgggagggcgagcccgagaaggatgagccgcatctcccgcccatctgcccccttgcctgctctgccagcctcagcacccgcactcacccgccactgccaagccctggaacctgaggggtatcctctgaggcctctccatcttcatccagccggggggctttgtatgggggaggtgctggcggggaccggccggagaaagtggacaccctcttgacgcggatg

SEQ ID NO: 36143 - DNA, 1121 bp, Artificial sequence
  DNA replication origin
aaagtcctgggtgagtggccaggcccctctccctggagggtctgggacctctgtccttccccttcctgacaggtctcttctcgcaggcccctccaggaacggtcccctttgctgccacttccggaagatggtcctccccaggtccccgatggtcccccagacctgctgcttgagtcccagtggcaccactattcaggtagggaccggccttgccctctccctccttgcctgtgcctggctcagctgggtgactcacagatgcaaaatcagccctctttcaaaaccagtatctactcccaggggccaagcctgaggctcggtgctagagttagagatgaccttggggagcctctggccttgtgggagaaacagacatggaaatgacatttcgcctctacgtgggatccttttaagggtctttgtccagcatgcccaagagcctaggggagggcctcagagcctagcctgccaggagctgagagagagcttcctagagtagccaaaggtgaagttctaggatcatctagagggaatgcagcccagctagcaccgagatgagggtcagggacagtgggaagatcagaagagtggtgtcccagaggcccagggaagggagtcgtcacatctcagctgccacagagactgccaggcctgtggagtctagcgttggtgtccagtgagagcaggtggcacagggtggggcgttgtgtccaagtccagaattgagaccatggttgaagaaggcaaaacagcccaagcacttggccagagttcagctaaggatcgggagcgggaggtgggcgagcagcgtggaggtgcttggtgtgagggccaagacagcggagccatggatggcagggaagggcaggctgggatggaaaaggcagtgggaagaggcctggtggctggttttgaactggtgacctctgaggtaaaggagaggagggaaagcaggtgtttatgcagaaactgtaatacatggggtggaggcccctggaggaggcttggctgatggactccttgaagctggcggtggagtggtggagttttctgttggtccctgagggcagtggctgggggagtggctgcggccaggtaagctggtggtcgagcagcctgag

SEQ ID NO: 36144 - DNA, 656 bp, Artificial sequence
  DNA replication origin
tattttagggatggaaaagggagggtgggtgggtgaggacacggcagaggtgggatatgcattcttgcaatctagatccgcagccctgttagtcccctagtggccttgtgggcttctctgataaccggctcagttgggggatgagggctcgggggtagattcccggcttccgaagaggcgtgagaattctgttcccccacatcaccgcgtcctttcttctgcccgatttccccggaaagtgtagcagaggcgctgtgtttggaagtcccgctatcacggccccccagatggggcctggacgatgcctcctgacggccttgttgcttctggccctggcgccaccgccggaagcctcccagtactgcggccgccttgaatactggaacccagacaacaagtgctgcagcagctgcctgcaacgcttcgggccgcccccctgcccgggtgagaatccgagaccgagccttgcttgggcggagcttgcaggtgatagggagcggggaaggggcgaggtctgtgggctacgggccagagaggcttgcttaggggtctaagcggtgggccttatgcagatcagacagggatggcaggcagagcctgtgcagatagtgcgggctaccgtagggcaacagcgaatggatatggctggagaggcg

SEQ ID NO: 36145 - DNA, 1235 bp, Artificial sequence
  DNA replication origin
atgcagccctctgagcccgagccctcaccctccacactcatctatcgcaacatgcagcgctggaaacgcatccgccagaggtgagcgtcccccagcctgcttgcccctcgtagggccctttgcaactgctgagtctcccctctgcctccccaggtggaaggaggcctctcatcggaaccagcttcgttactcagaaagcatgaagatcctacgagagatgtacgaacgacagtgatgttcccaggtccccccacaccagtaaacatcccccagctccacactggtgtctgctccggtccctccttcctggcccaggcacaaagcagttggcagagctctagcacatttattgggagagtaagcctgggaaagactaagggagtggtggcagggagaaaggctgtggggaatcagagcgggtgctcagttgggtcttgaaggagaagaggaggagggtgggaggtgggttgccgaggatatctggttgaagacttgggggtcaagacaaagggacttagggggatggggtctggttagagttggggagggggcctaggacatccgtgcagagtctggggaggttggggtgggagagtctgtacagtttggtgttgggtgttctagttggcctggtgtccaagagttggggcagtcgaaaaagggttccagagtctggtgtggctggctggggtttcacggcagaaaatgggctggagggggcagttgtagactgtctggttgcaggggaaggatcgggtcttgggaaccaggcctggatggtctggagtgggaggtctgtgcagtccaggacgtttggggggtggggggattgtgcctgactggcctggggttgggggagggctgtctacaccataatttggtgtcaaaatagggaagggatggaaatgtagtacccggatgtctttgtagaggactcagaaggaagtagaggaggggtcttaagtggggctatatgccaagaaagtgggtcggtggggctgagactgtcggctgagggttagggtagtgctggtagggtctggaagccggggagttgtcggtgtggggtcggaaagctggagggggtgtgagagcgagggtgtcagtggaagggtctatgttatcaaggcagtgtccaggatggaggtcagggcagaatccaggagtgggtgagaggacagtccttggcgcactcgggacatctggctgggcggagtcagatcggctttaataga

SEQ ID NO: 36146 - DNA, 1228 bp, Artificial sequence
  DNA replication origin
caggcgcttaataaatggccaagtcattgtttgggtttctaaataaggctctcctaatggccgggtctggccacggtcccagtgtccctgggcagccctccgaggggccggcacagggcgcactataaatgagcggctgcgcacgcaggggcactgcaacgcggaggagcaggatggagatccctgtgcctgtgcagccgtcttggctgcgccgcgcctcggccccgttgcccggactttcggcgcccggacgcctctttgaccagcgcttcggcgaggggctgctggaggccgagctggctgcgctctgccccaccacgctcgccccctactacctgcgcgcacccagcgtggcgctgcccgtcgcccaggtgccaggcctggggaggggtgaactcgaccacttccattgccaggggtctggggcagcctggggtgggaacatgtgagagaatgttcgttggccttgggcggggtggagagtccgcagctccgaagggcttccggagtcaatgggaatctgaggcccgcacactgcagcgggtgggaggtccccgtcgctcttaggtggggggcggggtggggggctctcagctctccagagaatggaaggcctgggtcactctaaggggagtcttgcttactctgaaggaggctggtgatccgggaaatctggggaaaaggaggcgggcagtgactcctgaggggaaggaatgttcttagtctcggggaagagttgagagactgtgtgcggtggcccgatatctccagaagaggaggggagagggccctgcgacttgaggaagggttcccggccactctgaagtgggggaaggctaccagtagctgccgaggtcccgtgactcgagtgggagagtaggcagaggaccctggagacggggaaaggggcatcttggcgagtttggcggggctggcggagaagggacccggggctctgaggagggagctggggaatcagtgccctggggggcacgatgacttcggattcgctgacaccgggggagggcagaggttcctgaccttgcaggggaagggagcctcatcactgcgggggagagggcaatcccagatattacagggggagggcgtatccctgttgttcagggtgaagaggtcctgggtgactcccagtaggagagctgactgctcaactccggaggccagagtgagccgcggcacggaaccgacgggggtggggtctccctgg

SEQ ID NO: 36147 - DNA, 1563 bp, Artificial sequence
  DNA replication origin
ggcatcaccttctgcagcctgcagcagcagggcggcctgggcaagcagggcctccgagggggcgtggtcagcagcgggcgggggcggggccagggcctccggagaccccacctggaaggctggcggcgaggccttgactgtggttgcctgctcagctggagagagtgggacctcgggctgcaggcaggctccaggggaaggagtggcttcgctcttccgtatcactgaccccgctgcgggcggcaaggccttggctttcagagactcggccttggcccgacactgggattcagatggagggggagtgaccttggtttggggttgtgtggcctggactttcggagatccagccttgggtggaggggggccctcgaagtgaggaggcgtgtcctccaggctgtcagggaacagccgagctgccactacctggcccaggacacccctgagctgagggccaggtccctggccagctgcagggacttgctcggcagcctctgggcgaggggctctgctcctccgagacttgggccccaggctcttaggctgggcacagctgcttgggtcagggatgggcaggccctgggggacagctggggatgcgagggtggaggctggaggtgcaggggtacaggccaggggagccggggtggaggctgggggtgcaagggtggaggccaggggagctggggtggaggccgggggttcgagggtggaggccagggaagccgggggcgcgagggtagagcccagatgtgctagggtggaggcctgctgcgtgggaggaacagccccaagggatacccaaggcccagactgtggggcccagaagaacccgtgggagctgggggcccaaaagatgtgtggagaggacactgagggaaaaggaggcctctccacatagaaggcctctggtggaccaggctgggccacactgctccacagtgggacatggttaggctgggtccccagagaactgagggtctccactggagcaggagaggtctgtagacagataagagagatctgagacagagagagagagggtggagggtcctcagtccccctcagacccagcccctcctccagctccccccaggctcctccctccctcggctcaccaacgtgcggagggcaggggtcagaggcggcacccaagctctgtcacccttgcttccctgagcctgttcaagcttccgccgctgccgccactggtacagaatgtcatcctctggccgaaggggtgcttgggaggaggctggggctggagcaggggtgggggtctgggcctgggctggtgccggggatgctgtagggggaggtagagaggagagggtgaggcaggggccagggagatcagcaaccccaggacagcctgcacacacgccctccaactgtgcagggggttactcagacaggctctccagatactgtcccagctcctctctggggtgggaagaggggaaggggtcaaagtcaggggagcgagcactcctggtcttctccatctgtcatcattcaagtctttgttcattatatatatatagtcttgttctgtcacccagg

SEQ ID NO: 36148 - DNA, 3153 bp, Artificial sequence
  DNA replication origin
atctgggggcaggttgtcagagtgggcctctgtgagtggacgtgagagagcccactgccctcccacactgccctagctcgtctctgggctgaagttcatcctgaacacatgggtgctgctcagctgttaggtactgagatatgggcatatgaatgaataagcaggctgggccaagctcttgagtaccctggttggcatgaccatggtgaccctcccatgggaccccctggaactccccatgatcctaaaacttagcaaagctaaatgtagcagaagcctactacgtttctaaggcttctccattcattcagattggttgggacttgggccataccagtatttaaatatttctctatcccgctgccttgatgatttcacactgtggatgaggacacactcatgaggcaggggctgagacaacaagcaggttacctgggcagccctggcaccctcggggggcgggggaagctccggaaggcaggagaacctccggtcaaatatgcaccggtggaggtgggcatccagggaacgaaagtcatcgtaactccggagaaccggccaggaacggccctgtgggagcagagggacagaagggagcaggggccccatgacaccgagctgaggactacagtggccattctctcaggctagatgagaggcgggatggcctcacctgacaggtcacctgcaccccgaacaccagctcattctctccagagaggctgggcccttcacggtctggagacagcaggagctgcagagggaaagcaaggcccaggtggacttttgtcccagtcctgacctcctggggatggcactatctagggacgggtttgtgactcccttctggacctccccgaggacagggcctggtgatgtcctggtccctgacatagagcagatacctaacaaaagttgttgttgaatgaataaaagaacaaatggatgaatgaatgagcagctctccccatctgctgtggctcctgcaacttttgctactgactgctcagacgcgtgcagcagccagtcacagggataagtttcagaagcaaagcacctgatatcgttgcaaggttgggtaggatattgtcttccctcctgggtgcaaatgcaaagcccccatacctgaatgtggccaaagtcaacgttctcgtagtggaaatgggcgcagtcagccagccgcgggaaggggcctcgaggagctgagagcctgggagacaggggatgcgtcaccagcagctccttgagtctccccagctcctagctgagccctttcctccctcaccctcacctcttcccaggcttccccttcacactgggccccccagcagtgggtagaggctgcaccgagccctcccctgggccatccaggctgtcagtgctgcgtgcctgtagagcagaaagaatcagaggcccccagagatgggagcaaagagacaacgagagcattgttatctggcagcgcgggtccagagccccgggcgctccacacaccgccctgagcatgaagcaggatggcaggtcgggggaggtgagggctgggctgaggacaggactgcttcttcgtgtgtggtctggggtgggggactggagaagcaggggccagacgtgaggcggggcaacaggatggagagcatgctggtcccatctctccctgctgaaaacccttccgtagcccctgcagagtacagtgatctcctaccactgtctagacaatcacaactcccatctcatcagccttcctgcttccagcctctcccctcctgccagcttttccgcaatagcctggatcgttttcagaaaacacaaatctggctctatttctccatagatcctgggccttcaatgactccctgttgtcttcaagacgaagtctgaattctctggtctgataatcgagacttccctgagctgatttctgtttacctctccagtcccatctcttcccattgcccccactctcagagctcttgaacttctaagagtccaaaaaaagcaccctcttctcatttccttctaggcctttgcaaaggctgttccctcagcctggaacactcgccccacctttccctgggtacattcatcctcactcccacccctcaggtcccaactcacatgtgccctcctccaggaagttctccctgacccttcaggctgcacctggcatctcctctggactctctccatcccctgaggttcccccatcccaggttccatgccttgaccagagcttctcccttcacagctctgatcactctgagatggcactggtggtgacaagttcatctctctcattggactatgaccggcctcccagaaggagggccccagactgagctccccagcatagagctgggcattgagttggtgttcagacatgattgttcctgattcttttctgggtccccagtgccagcccagtcgcgcgcagcagggactgggtaaaatctgatgaataaattaaccagctgccagacagattcactgggctgtagcgtctccctgctccatgtccctgcaacccccagtcaccctcagggtctcaccctcagggtctgtccccctccagcccataaggttccccaaggcaggatgggagctgactctctctgtgcctggagcgtggggcctgcacagaggcggtctcagtgaatgtctgctaagtgagggaatgaatggatgaatgagcgggagcagcatggtgggagagggaaatggtgggggagggggatgaggacaaggagatggagcagacccgaggatcaagggaggtacagtgctggcctgttggggtggagtaaggaaggagtggctggagagacgaggcaaaggctcagactgatgcggggcgggggggattgagaggaactgggatagggtgaaaatgagggagaaggagaagaaaagggtcaggctggggatggagcgggtggggggtggggctcgggaatgagaaaggggctgtggggaggaggagggggctccgccggggagggctgagggctggcagaaggatgccgaggaaggtgctgggatgggagctggggaaggacccaggagcctcaggaggcccctgcaggggccacttgggtggcgcgggtcccttcctggactagccccgcctcctcccagcccaggccctaggtccctgtc

SEQ ID NO: 36149 - DNA, 888 bp, Artificial sequence
  DNA replication origin
atggggggccatcggcatctgctaggcgaaaaatggggtggaagggatgagtgggaggcaaaagacgcaggaggccccaccccttcccacccctccccacacctcccatccatccatggcacttacccgccttcaggcccggacctggccgctctgtgaagagttccacacactcactggggaagaacccgacctgaggaaggtcagggtcagtagctgggccaccccagttggcaggtaccccagccccacctgtccgcgcccagctggactcacctggaagcctcgcttgccccgccaccagctccgatcctctgtgggtggcatgtcgatcaccgagacaatgtctcccacctgggagagggcgggtgggaagagaagggtcagaaggagcagggggtgtggggagcccagctggaatctgcttccccacagcctcacctcaaaggacagctcatctggcgcctgggctgtataccgtttgatcacatgggcggccgccactgcagggatattgagtgacgcctcctcactgaggagcagtcgccggccgtgattgtccagctgaaatagaggtggaatgtggcaaggacaggtcagaagacggtgttagtgcaggcataccaagctcctccgcgctgggtgaggccactgcccgcccccgtcaagagcccctgtcactcagagctattggtcaaacacctagattcctgtttgtagggatgcagccctggcaccctctgcgggtggggaaacctctaagaaaaacccctttatttcccctcacatgtcccaggactctcccacccaaaggcttccccacctgaaggcttccccatccacctctgcaccttcatcctccacagcagatgccacacggttgccatc

SEQ ID NO: 36150 - DNA, 2112 bp, Artificial sequence
  DNA replication origin
cgtctgaggaaccaggcctccacctgcccctcgccacccccagcatcccactcacctttccgcaggtgaggccggggccttgggagttgtgggctccgtgggcgtccccagccggccctgggtgcgtgcctgggcttcctccagcgtcagcaggcgggtggaggggcagctgcccgcaagggacttgggcctggggagcaggcagcggcctggggagtgtggaaagggggcagctgtcagctctggggccgcccaaggccacaggcaaagccaagcgccacagcccaagccccggccccgcagcatgcccacccgggctggcaaggcagggggccggggcggatcaggcgggagcaggcgggcagcaggcaggtgggaggagggcggggcgggacgagctgatgaggaggcagctcccggcagccagcgagggcagcggctctggcttcagttacctcgggccagagggccctccgacgtgctgagtcctgactgggctggggtccggggcagggcggggagtctgggtggggccggggcggggtcaagtctggggacctcccacctcctcccaggtggacccatggccccaagcgcccccaggagctacaaggggtgaaggaagagcggcgtccgggccaagaggtgggaatcctgagcggaggagctgaaatgagaaggaggggggcgcggggagggagaggccggggcgggatcctcaaggagccggagggaggcccagcttcagtggggtggggacgggactgggagcccacctgccctccccctgcagccctgatcgtggtgggcagtagccaggacctcagggggtgggagggcatacctgcagggtcgaggccggcggaggtgaaggtgtcgctgaacaggacgtccacatgggtgagcagaaactccaccaccaccgactgcacccgaacttcccggaacgccgccgcgccacccattcccactgactccagctccatggacctgggtgggaggagcgggagggaggctgggtgccttgagcccagccagcaggttctggcagggcaatgaggggagccaggggaggcagtgactgtctattcaacacctctgacctcaaactgatcacgcctcgctgggctctcaaccttcccccagacccgcccctcctgccttccccatctcagtgtggttcttcctgtggctctggccaaacaccttggggttgccctgagcccccctctttaactcccacaatcaatctgtcaccccctccactgccccccatctggcccagcctccatctcccccagcctggacatcccagagcctccttccggtccccaccctaaagtatgctcccacctgcagccagagggagcctgagaccacctgagttccatcagggcccgcctggctcagagccctgccctggctgcacctcgctccaggcaagagcaaagtcctcactgtgacccatgacctgtgagtcacccctctgtctggtccccgtcacctctctgacctcatcatctcctctccctcagcccctcactcactcagctccagccacaccggcctccctgcagctcctccaacacaccaggcaccggcccaggcccagatgtctgcacctgccgttccctcagcctgtcactccccacgtgcgcacctggggccctccctcatcctctgcaggtcttgactcaaatattgccttcttagtgcagtcttcctcacccactttattcaaaactgtacactcccttctctgtacccctggcctttctcgtttatttttctccgtacatcttacgcccgtcctctgacataccacctgttttacttgtttatgtatctgtgcccccagaagactgtgaactccggcaggggagagatcatgcctgtctcgttcaccatcaaatcctccaggcttattctgctgctggccacagaagacctgccaaagcctcccttgccactctcgctaaaaacttcacactgccctgaccctgcacactgcccttccctcctcctctctcctcctcagcactcatcaccatcagactttactctgtatttttcctgttgatgttcatggtccatctcctccatgagaacatg

SEQ ID NO: 36151 - DNA, 1928 bp, Artificial sequence
  DNA replication origin
gctgagcccgctcagccagggccagggccatgaggcgtgctgggttcttagggggcgggggtggggcacccccagggcgcaggagagacaggggagggggtggcagtggtgactccatatcaggacctatataaatgaatggagaggggttcagctggggccaggccctcagagtcagtgacagctggcggggacaggggtggggtaggctgaggactcaccgagtgggccctgggctccccggagcttgctgcacatctcctgctggcaggcgtcagtcagcggggcctcggctcctcgcagcagcaggggtatgagatgggggcgcaggctccggccggggctgagagctggtgttggggtggctgaggcaggtgctcccccagcccccagcagttctaggacagcgggtggcactgatacagccaggggctctgagatgtctagggcagcaggcgaggcggggctggtgggcccccggggcgagatggcctggggggtcaccctgggtgggaaggcagaggcaggggcggggggtgctgggctggcgggaggtgcgggatcccctggggtggggctgctgcagcggaaggttaagggatcaaagtccagcccccggagtccctccaggcagcggggtgggctgaagtccagctcatcaccatcatctagccaggctgaggtacggtgtgagggagacccagagagtgcccccagcccagctgctgaggactcagaggaggaagaggaggactcagaggaggaggactcggaggaggaggacgaggacaggctctcgcaggagccagcaggtgctgggcccacagggaaagcgtcgctgctggagtggggtcgccgcagcctgtgcagcctctggaggcctggaggggtggggtcagtgagaccatccctgagaacagggcgcacagccccacagaaagctggggaaaggacatgaagaggcgcctcctggagagggccacagtagtgtgaagccaggaagagctgttcagattgacagtggagaccatgaagaggacacttccggcccaaagcacgaaggccctgtggctgccccacaggctgtgagcacgagaccaacagattcacatacagctgctgagccagcaggacagcacctgggctcctgggtatgtgggagggcagtaccccaggagtgtgaggatggcgcggtggctcagaagagcccccagaggcacggctgggtggggtggataagcagccccccgcagaggtcggagagcagcacccagcagcgcggcgggctgtgaggtagcgatggagaaaaagccaagctccccatacagtgcggcatccctttcttacaacgccctttaaatcaagtttccaaaatggctagaactgagcagtatgatccttacacacacacctgtgtatgatcagacctggaaagcaagggcagggtagtctgcaaattgagaggatgcctccagtggggaggaactcgaaggggagaaggaatggggctgctctagttctggctgctgggttcatgggtgtccatgatattattttaaaatgttcaacaggaataataaagacttttaaagggcccgtcatggaccaatgagtaagttaagttcagtgtgtgatgaaccaaaggtgatactgtatccaactcattgtacataaaggccaggttaaatttttcaaaagccccagggcccccaaatgtgaagtataaaatttggaggccaaaccagggccccaattcctcccggctccacatgggcacaggtagcgccccccaattgcccgccttgctcaccagccccgctggcctgcgatgacagagactcctcgctcttggcagatctcagtgtgacggtgtcgggtctgctgcctgcaggagagggagaggtaggagggcactccagcgaccatcg

SEQ ID NO: 36152 - DNA, 965 bp, Artificial sequence
  DNA replication origin
cccctcccaccccagatttgtgcgagggcccccaggatggagggtggtggggggatgggcagacccttcagtccagggtagggaagctgagattataggttagggacccacatcagaagcaagttacaaagttagaaacctggggtagtggtcggggttcaagaaaatacaaaacaagggatttggttgggccaagatccagtgagggtgaagggaaggaaggacggcccctcccagctggtgctcagcagtagcttcgggtctggccctcagagtggagggaccagctgggagtggggtaagggggtgggggaccagccccctcccctctttgccctccatttctgtacaaggaccctcggtggagctcgcccccccttccgtaggctggcggggctgccctgtagagcaggagaggctcaggagggccccagggacccggcaccctatgaggggtacggggtccccagggtgcccgttgtttctggggaaggcgggggactgggggaccgggatctgaacggcttcgggggtgggcaggaggggaagaggaggaggaagaggcaggtgagggacccctgggccctagagctaggttgacgtagaggggctcaggcggtgtagggcgccgagcagggtgctggggggctgagtagccaaggtggtcagggggaaagcaggagggggctggcgggtagctgagcaggaagtcgggggacctgtggagtgggggtgattggccaagcatgccgtaggaggcattgagcctgtcggggggcatggagcgaaagggactccaggagcgggtggggccagaatagggggacccctcacttgccccgatctcatagtacaggttctctcccctgtcgagtggtgcaggggggcccagagagctcctccagactggggctggggaactgggctggaaggatggggggcccagggggtacaagcctggcttg

SEQ ID NO: 36153 - DNA, 1105 bp, Artificial sequence
  DNA replication origin
ccaccacgtgccagggcaggcaatctgcacctgccatcagacagaggaaagactgatcccaggtcacgcagcccagcagtgggagggccagcacccaccgcctacctcatcctggtgccttccacacccccacctcctctcaggcctacagggcattgcacacacaactggtacccacccactttccagtggggggatcgccccagcagaagggctccatgccgggtgctggcccagaagtgaagattctggccatgactacggccacacacccttgtcttccgtgggagggccaacaggaggcggggctgggggctggcacaggtacctgcagtgctgaaggtcagccagtagcacatctgtctgggttccaggggccttcggctgctgcacagtcattttgtgacccatccacaggaggctggagaataggggcggggcagtacaggcctgagacgagggggctttccctgggaggggagcaggagagctggcaagggcacagcggggctctcacttggccatgagggtggggagctgctctcataggtgcagtcaggctctccctgggctgccagcagctccttggggtccacaagggggatgcccgttaccagccccggtggccacaggctactcagctagggacaggcaggatcatgaggcacgaagaagacaggggtggttcccactcctacagccactcctgcttacctgaccaaaccccaaggccgggacttgggaggctctcctgatctgtgctagcctcagcatcctggggtgggggcaggccgagggtaagtctggggtggctgggaatggttgggcgggtgggcttcaggatgtggacggttacctgtctgcctgcatcagcctcagggaggacagggagccaggcgggctgttcccaaatctggcctgcaactggtccagagatgccatgggtggcaactcaccgtcatgcacgaacgctgatatgtgggcccggcagagctgcaacaactccagcaactggaggagggcacgtagggtgaggcctgatgggtgccggccctgatccctcactcccaccagggccactgctcacctcccagttctgcttggc

SEQ ID NO: 36154 - DNA, 808 bp, Artificial sequence
  DNA replication origin
tgggggcaggccgagggtaagtctggggtggctgggaatggttgggcgggtgggcttcaggatgtggacggttacctgtctgcctgcatcagcctcagggaggacagggagccaggcgggctgttcccaaatctggcctgcaactggtccagagatgccatgggtggcaactcaccgtcatgcacgaacgctgatatgtgggcccggcagagctgcaacaactccagcaactggaggagggcacgtagggtgaggcctgatgggtgccggccctgatccctcactcccaccagggccactgctcacctcccagttctgcttggccccaccctgctcagcccagtcttgtggtgtgcgaccccgctggtcatgcagttgcaagtcaccccctgcctgcagcaggggcaccatcactaaagaaggcgcctgcaggcacgggggtgctgccatccaggcagcggttagagcagaacaacgcggtgggagtcgattagggaagggactgaacagggacaaaaaggggcaggatgggggccctgggggatgggaggagtcaccatgtcatgggaggtgaatatgaggatgggaggggtcacatgagggcaggatggggtctttagggaatggaggatcactacgagcatggaggcactgggagaatgggaacagtcactggggaatgagaaggggttaattgagagaataaggagggttactggggggacaggagggtcaccagggaatggaagaggcatctcgagggagagatgcctcaggggaagagagccctagctctcaggctttctgg

SEQ ID NO: 36155 - DNA, 1364 bp, Artificial sequence
  DNA replication origin
ccaagctcggatcctatcctcgcagcccttctgccaccctggcacgcccgaccccagccctaagccccctcccagactcccgattgccttagatccccctcagctctcagcctccctgcgaccccagaccttctggtgtgtcgccctcccagagccacccccttttctcattcagccacctcccttcccatcagacccctcctaaatcccgttcccgtctagactgcgcccccaggacccccagccagctctgtcttcattgttttgttgtgcccaaagttccagtccttcacatcccccttccctgatgagacccccctagcggatccctgcccaggagccgactgagccgcagcccacagatgccctcgcagccctttcgcgcttcccagtggagctgggctccaagagggatctagacacccaggtgggccgtctgcaccacctggctgtggctgggggcccaggatggggcccggccaggctcctgcggagaggtgagggcctggctgcaggtacatctgtggcggcaggatcaaggagctgtatggagggtgtggcttcagttggccagtcagcagtggtaccgaacaccgactgtgtcccgagctctgtggtccctgatggggctttaagggtgaacatgacccttggaccattgggaatgaaatgcagtgggatgaggatgagaccctagacagtatggcctttcaggtggaggatgcttgagtcttacagtataagagtcagccacgcaaaaaaggtgaaatgaagtggggagagatggtggggtgcaatggctcatgcctgtaatcccagcagtttgggaggccgaggcaggcggatcacttgaggtcaggagtttgagaccagcctagccatcatggtgaaacctcgtctctactaaaactacaaaaatcagccaggcatggtggcatgtgcctgtaatcccaactacttgggaggctgaggcaggagaatcatttgaacccggaagacagaggttgcagtgagctgagattgtgccattgcactccagcctgggcaacagagcgagaccccgtctcaaaagaaaaaaaaaaagaagtggggagtgatggaagaggctgtgcaaacgctctgaagtcaaaatgaactgcccatgtatgagtagcagcaggacttggagagacgtgaggctgaagtggccacaagtccacacagttaagggcctctaaaggagtgtgagttttgttggattttgtgtgtgtgataggaaactgttggcattgtaagcaggaaattaacataattaacattaaattaggctgggcaacctgttccacatggctcacacctataatcccagcactttgggaagccga

SEQ ID NO: 36156 - DNA, 1735 bp, Artificial sequence
  DNA replication origin
tggctaggctggtctcaaactcctgacctcaagtgatccgcctgcctcggcctcccaaactgctgggattacaggcatgagccattgcaccccaccatctctccccacttcatttcaccttttttgcgtggctgactcttatactgtaagactcaagcatcctccacctgaaaggccatactgtctagggtctcatcctcatcccactgcatttcattcccaatggtccaagggtcatgttcacccttaaagccccatcagggaccacagagctcgggacacagtcggtgttcggtaccactgctgactggccaactgaagccacaccctccatacagctccttgatcctgccgccacagatgtacctgcagccaggccctcacctctccgcaggagcctggccgggccccatcctgggcccccagccacagccaggtggtgcagacggcccacctgggtgtctagatccctcttggagcccagctccactgggaagcgcgaaagggctgcgagggcatctgtgggctgcggctcagtcggctcctgggcagggatccgctaggggggtctcatcagggaagggggatgtgaaggactggaactttgggcacaacaaaacaatgaagacagagctggctgggggtcctgggggcgcagtctagacgggaacgggatttaggaggggtctgatgggaagggaggtggctgaatgagaaaagggggtggctctgggagggcgacacaccagaaggtctggggtcgcagggaggctgagagctgagggggatctaaggcaatcgggagtctgggagggggcttagggctggggtcgggcgtgccagggtggcagaagggctgcgaggataggatccgagcttgggaaaggagtcggagggctcaggaggaggctctgaaggctgcggtgggaggatgaggcgcctgtggtttaggatctgagaggcggtgagaggggtcatggggaggctctagggacagcgtctgtggggtccgtggggtggatggggtctgagggcagcgggcgcgctctgaaggaggagagggcgctgatggcaggatctgccgactgtgcgggggtccgcgggtgggacgcgtggactaaggactagggaagtgtctgtgtgttgggggtgggggctacaggctggggaagggggctctgaggacagtgtctggggctggggaaggggtcagtggaatggggaaagggttcgctaaaggggcgggcaggggtgtggtctgagggccgcggaagagaaggacagggtgggaggggcctgagggctgggggaagggtctgagggtgatctgagggcccagaaagctctgggaaagttctgggcccacaccccagtcctggtggctttgcactcaccgttgggctagatagtggtcgccacctgactgccacatgatccggccggctgtatgagcgggaatccgaggtgcttgagcaccagtggcctcccgcagcgcctgcgcagtagcatccccttccccaacacagccccagccactcagcctgggccccacagccctgaccagtcggggctgtcactgtctgaggacggggctgtctacccacaccggactaagccctgtaaggcagggccttgggtcgttcttgtcactgttgtgttcacagcgttgttcaccccagaacctagctcaaaagaggcctcattcagtgcttttattctcactctgtcgcccagg

SEQ ID NO: 36157 - DNA, 975 bp, Artificial sequence
  DNA replication origin
tctctactaaaaatacaaaaaattagccgagcctggtggcggccgcctgcaatcccagctactagggaggctgaggcaagagaattacttgaacctgggaggtggaggttgcagtgagctgagatcgtgccattgcactcctgggtgacaaagcgagacaagaaaggaagggaagagaagggaacgggaggggaggggaggggaggtaaggggaggggagggaaggggaggggaggggagggaaggggaggggaggggagaggagggaaggggaggggaggggagagaagggaagggcagcggaggggagagaagggaagggaagggcaggggaggggaggggagggaaggggaaagagagagagagagacagagacagagagagagagaaagacaggaaagaaaagaaggaaggaagggagggagggagggagggatcctcttactgggctgttattatgaagcctgtttttaaaatcacttttattgagatatcatttatgtacaataaaaatgcacccatcttaagtgtaaagttcaatgagttttgacaaatctgtgcacccgtgcaaccaccaccacaatcgttatatagaatatttccaacacctcagaaagttctcccatgcctttttgcagtcaaccctcctctcatggccccaggaaacctctgctgtgctctctgccaccgtagattagttttgcctattttagaatttctataaacgaaagcacacacacagtacatattcttttcctctagcttcttttgattgtctgtttattttaatgcttatggagcatacttatgtttacatgtgtcatagtttatgcctcctgtgttagataactgtcggaaataataaaataataggtaggatgcaacatggattcataaattccacttattattagctatttcagacgtcatggaatgcaaaatgaacagagtttttcatatgtctttccccactt

SEQ ID NO: 36158 - DNA, 1131 bp, Artificial sequence
  DNA replication origin
cctgctacacacacaattctggaagcccactcaactcactctaattatcacagaggcatagtggagggtggagacaacctcaccaaccttgagaactctcctccaaccctttggtattaagggcagattgtgtccacacccataactttcctggaacccctaagacatccctcccacctggggccctctcacacccagacctgtctgggcccaagtgtcttccccaagcctctgccttccaccagatgctcccaccatccgtgccctccaggaccccactgaggtgaacgtcgggggttctgtggacatagtctgcactgtcgatgccaatcccatcctcccgggcatgttcaactgggagagactggtgaggatccagcctttggtgaatagaggtggggtcaaggggttgtggtttcttgactgtgagttccttgggagtggggaccacatacatctgtatgacccttataactatatactcgccagggcatgctcccagaatgaataactgttggtggcaaaatgaatgcatggataaatggctagacagccaggcgagtgggtaggtagatggatagataggtcaaaaggtaggtaagtggatgaacaggtggatgaatgagtgagtggatggaggaacagatggacaagtgaaaggatggataaatgggtgagtggatgggtgggaagatgattgaaggagaaaaatcagtggatagagggtagatgatggacggatacaccatcagaggaaagatatctatggaaggatgatggatgaattgatgaatggatgggtgggtagatcaatggaaagatgaataaataggtagctgggtaaatgtctgaacagatgcatgtatttatgggtgtgcaagcgtgagtgaatagttgagtgaatgggtggagagctacaggggtggatacatgggtgcagagaaggaagacaaatgggtggaggaatgagtgagtgaaccgatgagtggatggaaagataaatggatgaatggagagataagcagatggataaatgaatggatggacggatagatggttccaagcataagtggttgggtgaatggatgggtaggtggttgcctggattggtggatgaaaagatggattgag

SEQ ID NO: 36159 - DNA, 869 bp, Artificial sequence
  DNA replication origin
ggacttccagaacgggagggttccaggatgggtggctatccctgggtgggcggagctcccacaatgaggagactccacaatgggcaaggttccttgggtgggtgtggtttccatggtgggcggggctcacagtgcacgtccagccgcagccgcgcttccgcggtgccctcagagttctggcagtgcagctgatagaggccgtcgtccgcgcgggtcacattccacagatgcagagccccgctggacaggatgcgatgccgggggccgcccgctggggaaggccagaataagggacctggcaggacctcccatccccgggacccctccccatgaccacttccctcacctggactgaggcgatagccgcggaaggtccagttgaaggcctcgggggcggggttagcggacacggacacgggcagcaacgcctcgccctgctccaccgcggtcaccaccagcacctgctcccccaggaactctggacggtcttcagagggggcgccgcagggagtcaagattgttgttaaggttagggtcaaggacagattggagatcaggcacaggttcaagggttaaagttggggtcacgacggggtttaaggttgtggacaaggtaacaagttcagagctaagctcaggggtaaggttcgggatagaagttagaatacagtttaggaaaagagcagaagccagggtcagtttgaaggatggaaacaggagtcatgaggggggttaggagagaggacaaatgcaagatgggaggaggcaggataggagttggcccaggaccacgggtcaggatgaaggtcgggagtttcaagtttcaggatggggttaatgatagagtgatagtgtcaaagcaaagaccc

SEQ ID NO: 36160 - DNA, 1854 bp, Artificial sequence
  DNA replication origin
gacagttgggacccctacctcgactcccccagcctcaaaacccctcctcaaaatatccctctgttcccttgttattgctgcaaactacagcacgtcctaagacccaggaatccaggccctcggcccctcctttcccaggaccccgcagtcccagcccaacccctctccccactcggccggccgggcccctcggcctggttgcccggcgacggctgggaggcggcggtgccgggccggggcaggcagggaggctgggaaccgcgcagcttgtcctgacggctccatgcagcccagctggggcgttcccacgctgcgcagctggccgagcaggtgggagggaccccgagcagcctgaaggagggctggggggctgggaccctgatctgacattcctggacctgtaagaactggagggtccacattcagattctccactgttcttaggctcagactccgtgtccctaaatgggggagtggggttgggagtgggggttggacttacagggttataagggactggtggttcaggcctttgctggctgagacgctgatggcctgatctcccggttccttgagaggctggagactcaaggtgcactcaagtgcatggtgcacttggaagagggtgacaggggtcagaatatctggtcttaagtcttaagagtcggtggatctatctgccaatctctccccacccccacacaggcccaggaggatttggaaatcagaccgtgaacatctgtcctaagtcctgtgtgtatgtgtgtgtgtgtgtgtgtgtgtgtgtgtgtgtgtgtgtgtgtgtgtgtgtatggggaggtgcgggggtgggtagtgtggccaggaggatcagaggcccaaattcccgagtccttggagagaagggactgagaccccagggtctgagaggggagggatctgggggcctacactcccggcttctgtgtggcttatctagtgcctggattttgaaataggatggacatggggctggaactcctgagtcttagggaggaactcaagtcatggggctgtttttccaggcacttgacgccgcttccccttcctggctctctggggctacggacatggaaagatggagagcccaaggtcccaggagcatgcagagaaggaaaacagccaaggtggagggtggaaggtttgtgcttattaaaggccccagcaagggacagctccacgctctggcacctagggacaccatctggcgagggcccccaggacagagccactcccccagctcggcatccagcccatttcccagggggtgtagagagcagttgggagaggggaggtgggaggagggcaaggagtcaagcatgtgagggaagatggaagtccagcatcgaggatgaagctgggggctgaggccagatgcctcatcttgttcctgggaacgatattggcgggggtcttggggaggtagggagaaaactagcatttccaattcccgcaggagataagcaggcagaagaagcttatcccaggcaagtgtatgtgcacgcggggagggcaggcccaccagcatatggttataaaatccagggatgtgatgagcagagccactcggagatggagagacacataagagaaagaggcgtggtcagagtgtggctgagaacaaatatttatggagctcctggtgtgtgtgagacagactgtggggtgaggggagcgacagaggtgagaacagagacagagaaacagaataacagagacatatagagatggagagacacagtgaaataaagattgactgagatttaacaacttaatatagagagcgagagagtctcaaacagatggagaaagatagaaagataaatcagctgggca

SEQ ID NO: 36161 - DNA, 1440 bp, Artificial sequence
  DNA replication origin
agtcgaggtaggggtcccaactgtcccccaggtatcggtgtgccctcttcccgacacgcaggcccgggggagccccggaccccgcatcccccagggcgcggaaactggcgaggccccaggagctcccatttatagctcagtttccactgagcgcagtccctctaggacctgggctgagcaagtttcttccactctctcccttccctcctcctcaccccttgcctgcccctcaaccccggcagggcgcaggtgtccaacccagccgggaccccctccctcctcgaacccaggtgttccggctcccagaccccaattgagctgggggcgcccacccgccgggggatcccgccctgcgtcccccattcatccgcgtctcagccgcgggagtttctcaacgggaagagggcggagctcccggggggcggacccgggcggggcgagcgggatcgggccctcttggggtctcccagagacccaggccgcggaactggcaggcgtttcagagcgtcagaggctgcggatgagcagacttggaggactccaggccagagactaggctgggcgaagagtcgagcgtgaagggggctccgggccagggtgacaggaggcgtgcttgagaggaagaagttgacgggaaggccagtgcgacggcaaatctcgtgaaccttgggggacgaatgctcaggatgcgggtccccgccctcctcgtcctcctcttctgcttcagagggagagcaggtaccgcacgaggggagcggaggaatatggggtgggggtggggagttgcttgcgggctgcctcttcactagcgagaagggagctgggggctgggactcctgggtcctgaatgaggaggcccctgaaggtgctaagctcagccctgctgccccgaactctcctaggcccgtcgccccatttcctgcaacagccagaggacctggtggtgctgctgggggaggaagcccggctgccgtgtgctctgggcgcctactgggggctagttcagtggactaagagtgggctggccctagggggccaaagggacctaccaggtaagagtgttctctccacgctgggacgggctggctagggggagagttgctgggctcggctgtacctgcagtttctattttgacattttcaagtttgggaaattgatgggctcgggtaaacatttaggagtcctgatttttgagctgcttctttgggggtgacccacggagtttgggaattattatgttattgcaaaatagtacataggccaggtgcagtggctcacgcctgtaatcccaacgctttgggaggttgaggccagaggatcgcttgaaaccaggagtttgagaccagcctgggcaacataacaagaccttatctctacacaaatgtatatatatattttaaacaaattagccgggtatggtggtgtgcatctatagtccc

SEQ ID NO: 36162 - DNA, 847 bp, Artificial sequence
  DNA replication origin
cttgcgccctagagggtgtggtgtttctgtggggctggctgatcccaggtcagtggctgcattccgccccggccatgtgacccctagtctctttcgtccagttgggccgattctgcaggcaaagccggagcccgtgtccgtggacgtgggggaagacgcttccttcagctgcgcctggcgcgggaacccgcttccacgggtaacctggacccgccgcggtggcgcgcaggtacagccctaaatctgaggcggtggctggagggggaccaggcttccttacaaatccggcttctgacgccccttccctgtcgcaggtgctgggctctggagccacactgcgtcttccgtcggtggggcccgaggacgcaggcgactatgtgtgcagagctgaggctgggctatcgggcctgcggggcggcgccgcggaggctcggctgactgtgaacggtgagaaggcggggcttcctaggggacctggcccgtcctgggatagggagcggacagagggggcaagggctaatgcagtgggagtggcctggaaggagctttacacccagcgggggctggagaccggacctattgaaggcgaggcttttaggagaatcggagtttggaggcggcgtggcctgattgattgaggttagcggagagtgcgctggacagacccggctttgttacagcctttggggagggcaagacctctcctctgagtgacctacagtctccatcccagctcccccagtagtgaccgccctgcactctgcgcctgccttcctgaggggccctgctcgcctccagtgtctggttttcgcctctcccgccccagatgccgtggtaaggaaatgtc

SEQ ID NO: 36163 - DNA, 928 bp, Artificial sequence
  DNA replication origin
ccatgttgctcccacttggggcatctcctttggctgagctgactgtatacaaatgctcctgacaaatgtaatgatctttccctccccttgtgttcagttttggaggagtaaggtcgccaacttgtcctggctcctcagaaatcagaacaatccattatggcaagttggagatcccaggactcttccattggaaagatgtcacacgtgagtctggagacgcgggtggctaggtgtggggaaggcagcatatgggaaggggggagtcccgggggccagatctgggggcccaaaggatgtgggtttgatgtagctggtgaaagctcgagggtggggtgtggtgagatagcctgccctggctctgtaaagtctgcagggggggaccatgcccaggtgtgggttgaagtcatagaaggtaggggtccctgggggcccaaggggggagggtggtggcaggaagagacctcctccaggggcttcgccaaggctcaggctcacactgactcctcggaccttgtagtaaccgttggttgggtcctgaggggacaaatgggactcagtaaagtctgtgagcgtgcaggggggatgagggtcactgatggagagacacactgaaatagaccagaccttgagagagacaaaaagagacaggagtgggcagagacacagagacacacatggactgggagagagagaaagtgagacagaggaacagtgataagaggcaaatggataggacataggcagagaaaggtagagacggagggatataggcctgctgaggggtgtcggtgtggaaggtgcagagggaacaggagagagacactcacctgcccaacagcctctaggctttgattcagtgtcacaccctgtgttgctgctacaaggcatgtcactaggatagaactggaccctgtcctcacagaatccc

SEQ ID NO: 36164 - DNA, 844 bp, Artificial sequence
  DNA replication origin
cctcaagtgatccgcccacctaggcctcccaatgtgctgggattacaggcatgagccactgtgcccagccatgggctcttttaatatacatcttcacacacacacacacacacacacacacgcacacacacacatgagttgcaaacagaaaagacacacacataggcatgtatgcacagacacacgcatagatgtccacacagttgcacacaagtgacagggctgccccaggggtcctggggaagactgaattctaactctcattagaggagacaaacaagtgagccctgaagtggagcagggaaggggagactatgggtaggaaaatggcaatcccctggtccttacagcaagcgtggagatccagaccctaatcctgaggtgctgcatccacagtgggcatggtgctggtgcctgcttggatgatccttaaagaaaggtcctgggggctttggttcatggatccttgagctaggagttaaaggtccaggcccctgggacccttgggaagcagagcaagaagagtgaactcctgggtctgaaggagaatgggctgggggcttggtctctggtcctgagagagaaggtgcccagacttctggatctgaaagaggaagggactaggtctcaactgctgccttcttgactggggacattttggaggcctgtattcctgagccctcaacagaggaatgtactaggggatgggggtctctgatgcttgcatccttggaaaaggacaaaactgtgagtgtctgggtctaaagagggtgagagtcctgcgggaggactcaaaatccacaacgggcggagcccatagccggactcctggctgggcccttca

SEQ ID NO: 36165 - DNA, 952 bp, Artificial sequence
  DNA replication origin
cgggcggagcccatagccggactcctggctgggcccttcatggggcgggacgcctggaatctcgaggggcgggggcctggcgcaggctcccgcccggggttcccgagctgctccactctgcgcgaagccgccacgctattgtcctgaccaggaaggcggggccggcgcggggcggggctggcggcgccggcgcagcccgggggcggcgggaggaggaggtggcggcggtggcgctgggagctcctgtcaccgctggggccgggccgggcgggagtgcaggggacgtgagggcgcaagggccgggacatggggcccgccagccccgctgctcgcggtctaagtcgccgcccgggccagccgccgctgccgctgctgctgccactattgctgctgcttctgcgcgcgcagcccgccatcgggagcctggccggtgggagccccggcgcggccgaggtgaggccgggccgggtcctgggggatgggggaaggggcgggaccgggtctctggacgccggcgcggacatgtccagggcagaaagcgcggtctttccagccaggtggtcagcccccaggcgcccccaatcacatttatgaacccagggttccaggccccagctcccccatcatgcgacgtcccagccccctcccatctcgagcataggaactggtctattcagagcccctggtcccagaagtccagccccctctccagacccaggtgactcggccccaaccccctcccgcctggacataggacccaccaagcagcgaggcatttagatccaataatccagaccccttgtattctctggacccatatggaggcccttgcagcctcccaggacccaggagtccagtccttcagtcaccacccaccccaaccagatgtagctctccagtcctcaaggacctggtgtccaggactgtaggcccctgaagccaggccttgtca

SEQ ID NO: 36166 - DNA, 1420 bp, Artificial sequence
  DNA replication origin
cgcgattcaggtttaaccccttcgggctccagagcggctgcgctggggtgggggcggagtctgtctccgcggcaacaaggcagaaagaatcccgggggacccaggtcgccatagcaacgggagcgctggggcgcccccgccctacgggagctgtttcccagggaacggtgcctccatggaggcggtgtgcggtgcttgggggagggggctggtgctgggggtctcggtcctagggagcaaagaaccaggggaccctcatgccaacgccccccgagccctcactgtcctttccacttccatccaggccccggggtcggcccaggtggctggactatgcgggcgcctaacccttcaccgggacctgcgcaccggccgctgggaaccagacccacagcgctctcgacgctgtctccgggacccgcagcgcgtgctggagtactgcagacaggtgggcggggccgaacgggagaggcggggccgcccatagaaagctagacttgaaaaaggcgtggtccagggtgctgcgcgatctaaggcgtggaggctggggggcgtggccaataaagaggcgcaactatgctaggggcaggggacctgttttgagatactaagtcaggaaaaggggagagccgcgagatagccagagaggaagtggaatttaggaatctggtggtctttgtaaagagtagaggtgtaggggggagtggcgaaaggataggcggggctaagacagaaagagaccttaaggaccagcaagatggggaaaggggtggagcccaatgagagcgcggagagctgggggggcgtggccatgaaaagacaaatttataacgggaagggagagttttggagaggcggaatagaggaaaaggcggggcctaaaggagggtgagacctttggggagacgaatctgactgcggggaggggtgaccagagaggtgggcttagagggaccttcagaaagaaacagcacaggaaaagagatagggcttaaagatgacgggacttttaagggaaaactgctagtgggcgtggccaatgagcacaaggagcttggatatctaaggctggtgctagggagaagcagggcctagggaagcgatgtcctcatgaatactagagccttgaaaacggacctggccgggcgcggtggctcacgcctgtaatcgcagcacttggggaggccgaggcaggcggatcacctgaggtcagaagttcgagaccagcctggccaacacggcgaaactccgtctctactaaaaatacaaaaattagcctggcatggtggtgcgtgcctgtaatcccagctactcaggaggctgagacaggagaatcgcttgaacctgggaggaggaggttgcagtgagccgagattgtaccattccactccagcctgggcgacaagagcaaatctccgtc

SEQ ID NO: 36167 - DNA, 1048 bp, Artificial sequence
  DNA replication origin
ccagcaagactcccccagatctttctccctctatggtggagaggccccaggggttcagagactgcctcacctttgccgaccactgcaagtgtatgggagcttgggggtgggaccgtttcctcttcctcttcagcctgcggaggctccacgaagtaatcatctactggctgtgggaaggattcctcctcttcctcgtcctcagccccctctactctgctccccgggggccaggaccgggtggaggggtcactgagggagcaggagaggacccaggcagtaagaacccaggcctgggctcccaggcttccatcccctgcctcaggaaccttgagatgggcatggagggttccctcccactcacccaactgctgtcccagatgggtcgggggtccctggagggggacagcacacatactccacaccacggaaccgatccgagccacagggtaagagcatgcccgagccgtgcaggatgaggccctgggagctgcaggcctgtaggaagagtgggcccagatgccaggattgtgggatgggagggggtagatggggaactgggctgccagggttgggggttgatgaggctgggagcctggattcctgcttctagaggaaggggttgggggatgaaattcttagatcccaagtgcgaagaggatgctggtggcccagactcctcggttctggtggcggagggtgttagaggtcccagttcctgggttgtgggggctggggacgggtgggccaacgtcctgacctcctgtgcctcctgatgcctccgggttgaactctcacattggtccatgcgctcctggtgcaagaaccggcagccttcaggcaccagcagggcctcactcacaaattcaccagctggggaagcacgggacaccagggtgagatcctcctatagccaccaaccccaccctcctcagaatccagatattttatcctcagaggcttctctgccccacttaggacacaagcacccagccccttaatgtaggcctgagagaggggctcagaaccttgcccctcagaaactcccacc

SEQ ID NO: 36168 - DNA, 876 bp, Artificial sequence
  DNA replication origin
aagagagcctggaaaggcagggctacatggggttggggggcgttccaggggtccaggcctgggcagaaccaaaggttatggactggaaggggtgggctacagggccaggcagagtggaggtgggactaggcccactgggagccaatgtgaggatgtaaactgtaagattgagtgggagcaatctgggagcagaactgaccaatgttaaggtgaaagggacaaagccttgcagggctcctggcctgggcagggtcaaactggagacaggctgtgtataaatgacacgataggggtgggacaaagagctggaatgggggctaacatgagtggggtctccatggggtaggtcaggttaataaaggtgagattggcccagcagagccagaatcagggggcggggcctgatagagacataaatgcatcaaagagagaccaagaaggccctggctgcatctgcagaggccctggcttgggacaggactccagagccagccctgagaggcaagtcaagtctgtagatggggccgaatatggccaatctggggaggagagcagtgtcaggtcagatgacggctaagaggggcagagctgcatgtaggcatggggccaggaaaggctgagataggtgggaaggggtggaactggatgggcagggcacagccagagccaggtgaaactgagtgtgctccaggtggtggacaggcatgagtaggacccactggggctgtcctacctcattcagggcctgtctgtcggctttaggcaggttcttggactggttgtctgccatggcccattcacgcatcacctgcatagggaggggagcttcaggatcccagaatccaccctgatccacctggcaagtcccccaacccc

SEQ ID NO: 36169 - DNA, 797 bp, Artificial sequence
  DNA replication origin
gtgccttctcgggatccacggcggccacatgctggtagtggcgcagcgtgtgcctctgttccttctgctccgcacgcaggtagcgccgcagggccaacaggacacgctccgcctgtggaagggacacaggatgcccaagcccgccctgacccttctcaccctctgctctctgcccccacggtccccgcacctgaggcggatctgcctgcagggctgccaggaagccctccaaggcagcccggcgctggtcgttgataagggcgatgacgcgggtggcgtgggtttccaccaggcgctgtcgctcaccagacacctgctcctccagagtctgcagaatggactggaagtgctggggagcgggtgggcacagggtcaggagaggagaagatgggtcaaagcctggtcaaagagagcctggaaaggcagggctacatggggttggggggcgttccaggggtccaggcctgggcagaaccaaaggttatggactggaaggggtgggctacagggccaggcagagtggaggtgggactaggcccactgggagccaatgtgaggatgtaaactgtaagattgagtgggagcaatctgggagcagaactgaccaatgttaaggtgaaagggacaaagccttgcagggctcctggcctgggcagggtcaaactggagacaggctgtgtataaatgacacgataggggtgggacaaagagctggaatgggggctaacatgagtggggtctccatggggtaggtcaggttaataaaggtgagattggcccagcagagccagaatcag

SEQ ID NO: 36170 - DNA, 1049 bp, Artificial sequence
  DNA replication origin
tcgggtttccggaattcccgattcaatctgggggtgcaggcccccgaggtggaggttagggcgcggggtccggggcggcggcgtcccggctggcttcctgggctgcggcggaggctgactgggagggaggggaccggctgcggtggggaggggggcgaccgggcagccccagggccgggtggggcgaggcctgggagcggagggacggtcagacagactgggacacgcgggatgggggcaccgcagcgcaggcgggggcgcaggggggaggggccgcgctcagagacccctcccccgccggggccgaggcgggggccgggcgggggccgggctgggcgggccgggtccaggcgctcccgcggcctcctcgccggcaacccagggcagcgcgcgcaccggcgcttaaaggcgcaggctccgcgcgcacccgcgcttaaaggcgtaggcacccgccccttctctcaaagacgcgccccggccccacctcccatggagtcgcactggcgctgctgggaaagagaatccctggatacagagagactgagacagagagacagagaagaacggagatacagaaaggcagacaaaaagatgggcaggcttagattgatggatagagaggagaaaatggaaagaggcagagagacagattgaaacacacacatattcgagacatggaaatgcacagagacagcgagacacagagagtgatggagagacaagagataaggacaagtcagagaaagacagaaacagagatagagacgtgcgtgcgcgcgcacacacagacacacacatacacactcacacgctctaagacgcagcacctgggctgtgagaatggtatgtgtgtatgtgcattcagtaactattcctagccttgagtgtagcgcttcattccagagccactggccccccaaacctgtctctttctgccccccttatctcagcaccacctccctggaatgtcctttccacggttggagtttccttacctggccatgcccagcaataggcttgatctttcaggccagaggggctccttccca

SEQ ID NO: 36171 - DNA, 3036 bp, Artificial sequence
  DNA replication origin
gaggcgggcgagccccggggcctggcgagcaggggcaggcgggagaagagtgggtcgggtgggattgtggtcaggcggttggaggtcatgtccagccgggccagcttgtgcaggcgggaaaaagcgccggcgggcacagaagccagcaggttgtggtcgaggcccaacgtgttgacgttgcccaggcggcccagggcctcccagggcagctgctcgaggttgttgtaggagaggtcgaggtcctccagtgtctcggcacaatcatccagggcgccggccgccagcgctgccagctggttgttgctgaggatgaggtggcgcaagttgaccaggccgcgcagctggccctcgcccagtgaggtcagccggttgccatccaggtgcagggcacgcagggcccgcaggtcggcgaaggcgccggcagccacgtggcggatggtgttccgcgacaggctcagatgcagcaggcctgtcatgttggccaggtcgcggcggcgcacggaggcgatgaagttgtctgccagccgcagctcggctgcccggcggtccagcgagggtggcacgaacaggaggcctgcccctgggcacagcacgcttaggggcagcgactgtgtctggcagcggcagcggcggggacatgggctgggtgtggctgactggggtggggatgaggcaggggccagcggcagcaggcacaggagcaacgggaggatggccatcgcgggcaggggtgtcctgcggagaagaggggaggcgtgagggcagaagaggggttctgcaggggctgggggtggtctgagaccaggagagaaggtcacagtgggctgagggcagaagggctggtcaaagaccgtcagatgtgaccaaaagccagaggaaggccaggcgcggtggctcacacatgtaatcccagcatttggggaggctgaggcaggaggatggcttgaggccaggagttcaagaccagcctgggcaacaaagtgagaccgtgtatctattatacaaaaatttttaaaaattagctaggcatggtggcgcccacctgtggtcctagctacatgggacactgaggtgggaggatcaatttgagcccaagaatttgaggctgcagtgagctatgattgcgccaccacactccagcctgggcaacagagcgtgactctgtctctccaaaagaaaaaagtaaagaaatggtcagagaaatgacagctggtctgggtgagtggcaggaaaaccagagggctttagacgtggtcagagatggtaaaagctggccatggggagacggggcagccagggtggcaacaatgatcagaagtggtcagatatgaccagagaagagaaggggttacagatggtcaggaagatgagcagtggacaaagagaagggagggcatgggttgggctcagatctgggggagatgaccatgtcagagacacgtggtcagaaacggcccaaagccagcaaggtggtcagagaggaggaaaaggacagacatggcagagtcagtgggagcccaggacagctgctcaggaggatggtgcggggagaggtcatcggagagaggaaaggcagcagagatgttcgagatgatcagagggcatcagcaagtgagagaggagaggtggccagagattatcagagggcatcagtgagtgagagagagagaagaggtggccagagatgatcagagggcatcagcgagcgagagaaaagaggtgggcagagatgatcaagagggcatcagtgagtgagaaagagagaagaggtggccagagatgatcaagagggcatcaatgagtgagagagagagaagaggtggccagagatgatcagagggcatcagtgagtgagagagagaggagaggtggccagagatggtcagacagttgcagactgggagttagggtcaggggtgggaggagggcaagagcagtgggagagatggccagagaaagggaaaggtggccagaggaagctagagaggagagatggacagaggctgctggagagaagagtggtggacagcaatgtcaaagatggatggggacggtcacagacctaggcttagattcaggggtggagaaggagcaagagagctggtgaatgatgattagagagaggcacagtggacacagatgtcagcgatggtcactgagaagcagcaggcagaggcgactggagagaggacctgtggacaggggtgtcacaaagatgatcagagagagaaaaagggaacagagatggccattgagaggacaggtggagaaaggagcccagagagaggagtggtggacaagagaggtggcggagacggtcggaccggatagacagcgaaaggctgtaagggttgcaggggtcagagacctggaggtcccatcaactgaggcagggaaggtcagagaggggcaaggatggccagtgtccagagagtgtttggagcagagcaggagctgaaggcagacccatgggggaatgtctttttttctggagaaaccccaagagtgtcaaagggtacctggtaccgtaacccgcagccacaatgctcctcccagcccgtccccaccttgaggtttcagcagccttacctgagctagaagcagccccagggagcagagtcctagctccaggggagtcagaggtcagggctctggagggagcatctggtcatgcttttcctgtccccaaggcttctgtagagggactgtgtcctgactcggctcaaatctgtggcaacggagtctccagaccttaatactcggggttccagacccctaaatattgggcctctagggtccagttttacgggtccagtttgggttgttcagggtcagggtctcccaggtccagtcttgggatgctaagcagccaaacggtggggtttagagtctgagatccgatcccggggttctgcattcagatattggggtgctgagtcaagattgggaggtctcaagccccagatttaagcactcaggtctgcagcaaggacttcaggcccaaactcgggttcaggccccttggaatcccacagt

SEQ ID NO: 36172 - DNA, 823 bp, Artificial sequence
  DNA replication origin
ccgggcagtgggggacccagagccccgtgtgcgttgggtgtcaccccagggccggctgctaggcaactcaagccgtgcccgcgccttccccaatgggacgctggagctgctggtcaccgagccgggtgatggtggcatcttcacctgcattgcggccaatgcagctggcgaggccacagctgctgtggagctgactgtgggtcccccaccacctcctcagctagccaacagcaccagctgtgaccccccgcgggacggggatcctgatgctctcaccccaccctccgctgcctctgcttctgccaaggtggccgacactgggccccctaccgaccgtggcgtccaggtgactgagcacggggccacagctgctcttgtccagtggccggatcagcggcctatcccgggcatccgcatgtaccagatccagtacaacagctcggctgatgacatcctcgtctacaggtgcagggtccaggcactggggtagcttgggtgggggagtgaggcaaggggagggttgagggtacacctactaataccctacaccgaagcacaactgataagtgatgctggaaggttccaaaagaaatcagagagcaaaagtaaaagaaatcaggcagcaaggataacaagactctggcagaaagggtcaatgaaatctgacagcagtgataaaaagaagtcagacaagaaggacgaagtaaatgagacagcaaatgttaaaatatatcaggctacagggctaaaaaagatcaagcaataaggataaacgaaatcaggctgcatgagtaaaaagaaattaggcagcaagaataaatag

SEQ ID NO: 36173 - DNA, 1319 bp, Artificial sequence
  DNA replication origin
cccactgagctcattctactccctttctcagacatgactcggaagattgcacggaagtcctgcccctgaaaatcacacaagtcggccaggcgcggtggcttaacccctataatcccagcactttgggaggccgaggcaggtggatcaccaggtcaggagtttgagaccatcctggctaacacggtgaaacctcgtctctactaaaaatacaaaaaattagctgagtgtggtggcacgcgcctgtagtcccagctactcaggaggctgaggcaggagaattgcttgaacctgggaggcggaggttgcagtgagccgaggctgtgccactgcactccagcctgggtgacagagtgagactccgtctcaaaaaaaaaaaaaaaaagtcacacaagtcctggccaccttgccaggtggggaatgggatgaatgctgtcctagacagtcaccctgccccaggcggccacggagttccctgtacctctctcattagaatagcctaggaataaaacaggtgataagtcaactctccaacagggtgcccaactacaaaagaaactatagtgaaattgggtggtaaggattaaaaggaaacaagaaagaaaaagataaatagaaaccagccaacagagataaaagagaagcaggtgacagagccggaaagaaataaggcaacagggagaaaaagaaagcagtagtgacggaggcacattagtttaatgaaaagggaatcagacgacaggactcattggaaaacaggctatcaatacagtcatcataataaggcaatagggctagggggacatttattggcaggttacaaggaaatcgggcaacaggggtacagggagatcaggtggtttgattggagagaatcctagctgtacactagaggaaaatcaggcagctggaaaagggaaatttggcataggctgcaggaaataggggaaccagagggaaattggcaagcgtctggaggagactgggaggtaaaatgtgggggaaattggatgggggtggctagaagacaaaaggattaaattagatggaaattggacagggttagagcagaattgggtggtgaactggagagatgactggcagtgggaccagagtgaaatcaggcagaggattggggcaaaattgggcagggaggctagagcggagctgggctgcaggctggagggaaattgagtgggcagtgcaaaagggaaattgggcagttgggtataaaatgaaaccggcaaggtgtggtggctcacgcctgtaatcccaacacttaaggaggccaaggcaggaggctggactgccttgaggccagg

SEQ ID NO: 36174 - DNA, 964 bp, Artificial sequence
  DNA replication origin
aataggggaaccagagggaaattggcaagcgtctggaggagactgggaggtaaaatgtgggggaaattggatgggggtggctagaagacaaaaggattaaattagatggaaattggacagggttagagcagaattgggtggtgaactggagagatgactggcagtgggaccagagtgaaatcaggcagaggattggggcaaaattgggcagggaggctagagcggagctgggctgcaggctggagggaaattgagtgggcagtgcaaaagggaaattgggcagttgggtataaaatgaaaccggcaaggtgtggtggctcacgcctgtaatcccaacacttaaggaggccaaggcaggaggctggactgccttgaggccaggagtttgagaccagcctgggcaatatagcaagagcctgtctctacaaaaaatttaaaaattagctgggcatggtagtgcacacctgtagttcctgctactcaggaggctgaggccggaggatggcttgagtccaggagtcagaggctgcagtgagctgtgatcatgccactgcactccagcttgggcaacagagcaagaccctgtctataagaaaacagaaagaaagaaagaaaagaaacaggatggattggaagaactcacgtggtgagctgttagagaaattgggtggtgggactagagtgaaaatgggcagcaggctatgaggacgtgtgagagggtgggctagagtgaaattggccaacagactggaggggtatcagtcaggtggctgaatgggatgtcagaccaaagggaattgggatgttggtgagagggagctcattgggtagaatgaaatgaaggagtggactggtgggaagtctagccccgcagggagtttggtgggggaagcacaggttgggggctgggcagcctgagacctgacccccacctgcctgccctgcaggatgatcccggcggaga

SEQ ID NO: 36175 - DNA, 2181 bp, Artificial sequence
  DNA replication origin
tcaggccggacctacgatctgtgcgtgctcgccgtgtatgaggacagcgccacggggctcacggccacgcggcctgtgggctgcgcccgcttctccaccgaacctgcgctgcggccatgcggggcgccgcacgctcccttcctgggcggcacgatgatcatcgcgctgggcggcgtcatcgtagcctcggtactggtcttcatcttcgtgctgctaatgcgctacaaggtgcacggcggccagccccccggcaaggccaagattcccgcgcctgttagcagcgtttgctcccagaccaacggcgccctgggccccacgcccacgcccgccccgcccgccccggagcccgcggcgctcagggcccacaccgtggtccagctggactgcgagccctgggggcccggccacgaacctgtgggaccctagccaggcgcccccccctctaagggtcctctggccccacggacagcaggacccggacaccctgtgggacctggcctcaaactcaccaaatcgctcatggtttttaaaactctgatggggagggtgtcggggacaccggggcaaaacaagaaagtcctatttttccaagcttgggcgaagacccttgccctcgtctctgtctatgggggttgggggacggagcaggggtctggagctggggaatgcctcctttggggagacaccccctccccgcccagttcagtctgaggaccccggaggaggctgaggatggcgatccattcagacaatagatgttccctgcgtgtcggctctgagcatgccctgggttgggggatgctgtggtgatccagatagccctgagccctgcccgcaggggcctaaagtcaaatgggagacagacacatccccagacagtgatagcacagagtgaccagggatgtggggatgagggaagcctgggggattgtgacagtccagaagaggtacccttgctcagccccaggtgtggtcagggagggcttcctggaggaggacacatgtgatctgagaatgacatatgaaggagataactgggcaaagagcagaaggaaagctctttcaggcagagggcacagcacaagcaaggtggtggtgtgccctgggcactgggggtgctatggtagaggtgaggcaggagggttgagcagggtctaggacctccaggctgaggagctcagactctggcctgatgataccagggagccatggagggttgtatgcaagggaggaatggggtcagtttggggcttcaggaagatccttctagtgctatgagtagggtggacccaaggggaagactgaagctgggagccccaggggaagctggggcagggacctgggtgggtgaggacgaagttggaccagctgggctagggaacaagaaaagggagtgggttgacagagacactcgggaaactgtgggaagctgaggcggtgggttatggagctgcggggccatggggtggggcaggaagatggtggggactgccctcatataggaccagggaggaggagcaggtttgggaaagatgatatggccagtggggaacttggtaggtgtagggggccctgaggatgtccaggatgtggcattcaggagggtgcaggacccctggtctgaggctgaagctggaaatagaaatgagggctttgtcagcagagatgggaactgacgctgctggggttaagacggcttcttgtgggggatgattccaagtccccactatgggacattttttcttttttcttttttttttttacagatggggtctcactatattgcccaggctgatcccaaactggcctcaagtgatcctcccgtctcagcctcctgaattgctgggattacaggcatgagccactgcccctggctagggactttccatatttaagggtgacgcaaagaaaaacctaaccaagactaaacaggaccagcaggcagagggacagggggaagaagaccaagcaattcagacccaagaaactcttgtgttcaatgatataaataaaggctgcggtgaccccccagagagcagtgttagggggtcagttggggcagatggcagattcagctgatttgagaggagggggtaagaaaatgtagctagagggtgcagcccctgtcaacctgtgggcctggagtcccatgtctttgcagggtgggtccttactctgtct

SEQ ID NO: 36176 - DNA, 885 bp, Artificial sequence
  DNA replication origin
ttttgtatttttagtagagacagggtttcaccatgttggccaggctggtctcgaactcctggcctcaagtgatctatccaactcggcctcccaaagtgcagggattacaggcatgagccaccacgcccagctggaacccactttccttcaatagcttcatctgtcacttgcttaagatcctccttcatcacaagcagaggatgtggttagtgtttccttcctgcctgaggtggggaacaaacatatgtgctagaaacagagctggggaagagggatggcgtgggaagggctgggatgctagaggctgaggagctcagactgtcccaggaaccctggggagccatgggggtgcctatacagaggagggtttggctttaggaagatcctggaccagagaagagactgaggccaggagcccagtgcaaggacccagatgggtgaggccagaactagcccaggatggggccggggcagggaggaaggggaggtgggggacattcaggaggctgcatgggggttgctctcccagacaggacctagaaggaggcataggtccgagaagaagccgaggtgggtgtgggatccagtgggtgtgaggggccccaggggatgtccaggaagaggggtccgggaaactgaggtaagccaggtctggacttaggagagatgctggggttgaggatggaaatatggaggttgtagcctggtgaggtggctcaggcctgtaattgcaacactttgggaggctgaggcgggaggatcacaaggtcaggagtttgagaccagcctggccagcatggtgaaaccccgtctctactaaaaatacaaaaattagccaggcttggtggcacacgtctgcagtcccacctactcgggaggctgagg

SEQ ID NO: 36177 - DNA, 1913 bp, Artificial sequence
  DNA replication origin
ggctgcaggcgcggggagcacggggagagtggcgcccacgcagggagcgctgtcaccagcatcgccgtcgggggccctgtgggcggtggcgacatatatagctggaagttgggcttctcagcgcccccgttttccgagaaagccgtgatgaagcggcagccctggaaacataaaacacagacgtccgtcgggcttgagggaaccaggagcccagaggaggcagtcaagaataatccggtggatttggaagctaaatgcgtcagattctaattctgactctgccactttctctccctctctccctccctccttctctccctccctctctccctcccttccttccttttctttttctgttttagagaggagactcaatctgttgcccaagctggtctcccaggctcacgcgatcctcccaccttggcctcccaaagtgctgggattacttacaggcgtgagccaccttgcccagccgactcggccactttctagccaagtgaacttgggcaagtcacctcctttcttggggcttaagctgctgtgtctgtaaagggggtatcggtgcacacttcacagaatgatggggagcttgatgtcaaagccatggcatgaagtcagctatatcaatattagcttaaacttgcttcttttgcaccatctgtccccaaaaggcccgcccagcctcctcagaaccagttttgccaatctcctggcacacagtctgcccaaatagccccttgtccagctggccagggccctgtcccaagaagttccactgtggccaatcccctgtcacagagccatgccagacagcctcccaacctgagccagcacaaccagcccctccctaccccacactctgctgcaaatccagaccaactcaccagctttctgtgttccttctggggcactcaccctgtaggaaacccaaggcaccgaggcacagctgggggtagagggagatagactggttagtgtggttcctcctgccagccttccctccaggcctcccactgcaggggcagtacggggcacaagggagacctcagagaagggctcagcctcagagcccagggcccgggggtcacctgccagagcagggctgaggccaaccacattgcaggggcatttatagtcctaggtgcctgggcctggccctcagcacccaccctgggtctacacacaaatgtacccattagtactggctccagcctgacctggtgccactgatcatacagaggcctaagtatgggggtgctgggtggagaaaggaggggacagagaaaggaaagacagctatggggaggtggggacagagatcggcatagagagtaaatgtgggagagggaaagatacacaaaagttacggtgaaggccaggcacagtggctcacgcctgtaatcccagcatttaggaaggccgaggcaagtggatcatctgaggtcaggagtttgagactagcctggccaacatggtaaaaccccatctctactaaggacacaaaaattagccaggcgtggtggcgtgcacctgtaatcccagctactccagctactctggagagtgaggcaggagaattgcttgaaccggggaggtggaggttgcagtgagctgagattttgcactccagcctgagcaaaactccgtttcaaaaaaaaaaaaaagggttatggtgagatgaagagatggacgaggggagagggacagatagggtaaggaatggagaaagagagaaggaaaaagaccagctgaggctccggcggactgctggcagacatggccacttcccgcttaccccagcaacactaatgttaaagcagttcatcagaaggcaacaagttcttctcctctacagaaggattttccaaacaattcagcaagttccaaatgattctgatcgcaaatacctgaag

SEQ ID NO: 36178 - DNA, 1166 bp, Artificial sequence
  DNA replication origin
aatcagcctgggcaacgtagggagactctgcctcagttttcttttttttttttaaaggttattaaacggttaaaaaaaatcattgcccttaaggaatgtatgtgttgtagacagataatagaaaaagtaattatacagaaagtgatatattctgtgaaaaaattctgggaaagggctaggtaatgttgggggtgggggattacaattttattttatttttgagacggagtctcattctgtcgcctaggctggaatgcagtggcaccatctctgctcactgcaacctctgcctcccgggttcaagtgattcttctgcctcagcctcccgagtagctgggattacaggcacgtgccaccacgcctggctaatttttatattttttggtagagatgaggtttctccatgttgaccaggctggtcttgaacacctgaccttgtcaagtgattcacccacctcggcatcccaaagtggtgggaattacaggcgtgaaccaccatgtctggcctggggattgcaattttaaattgggcagtcaggttggcctcagtggagaggtgacatttgagcaaaggcttgaaggaggggagagagtgatccacagggatatcatggggacagccagtgcaaaggccctggggtaggaagaagaaagtaaggcaaccagtgtggctggagtacagtgaggcaagggagagagatgagatgagcagtgtgctgggaacacatcatgtaggaactcttaaaccactgtaaggactgcttttgctgggagatgggataattgccaaggagattttgagtggaggagggacagacttgtattttaaaactacctctctgggccgggcgcagtggctcaggcctgtaatcccagctctttgggaagccgaggcgggtggatcacctaaggtcaggagctcaagaccagcctggccaacatgctgatacccagtctctagtaaaaatacaaaaattgagggtcgggtggggtgcaaagcaaaaccaaaccaaaacaaacaacaacaacaaaaaaaaaccaccaaacaaaaacaaaaacaaaaacaaaaaaaactacctctcttgttatataagcaatggaatgtagtgttatgattttctccaatcctaatatccacgaatcccattgccggttcacctccccaa

SEQ ID NO: 36179 - DNA, 848 bp, Artificial sequence
  DNA replication origin
ggaggggcaggcagggaaggggtttggggaggagccaatggcagctgttggggagaggggtcacttccagatctaagaggaggagaaagaacggggagatgaagacttggggcaggagagagtggtggggcgtgctggcgtggtgaagtgagggaggaggggagtgggggagacacagtgagactgggctgcatggagcaggaggtgcggccagcaggggactggctttaatcagagcagggctggcactttaggatgggttaaggtccaatgtggaccatgagggccaggcacggcagctcatgcctgtaatcccagcactttgggaggccagtggatgagctgtggccaggagtttgagaccaacctggccaatgtggtgaaaccccatctctactaaaaatataaaacttagctgggtgtcgtggtgcacacctgtaatcccagctactcaggaggctgaagcaggagaattgcttgatcccagtaggcggaggttgcagtgccattgcactccggtctgggcaacagagtaacactccatcaagaaaaaaagaaagaaagaaagaaataaggaaagggaaagggaaggagagcgatacagaagtgcagatgggagaagggaggagaagagtggaaattagggtgttggcaaggggaagggaaggaaggcatcagagagccatacacagagatcctgtccaccggaacagagatgcaaagttgctaaaatgaggtaaatgacaggacaagggttctcttgactgtccctggttaccgaggtccacaccaaagtagtggccatgcacacatagcagcagcacatggcagaggccggacagtcccag

SEQ ID NO: 36180 - DNA, 1140 bp, Artificial sequence
  DNA replication origin
tctccagcctatgcccagcacttagtaggtcctcaatccgtacctgtggagtcactacagaccagacccaggtctcttgcaggccctgcctcatgctggctctgtccgctcttgggtggagactcacagcagaggcccaggccctccaggacagcacactggtaccagccatcagctcacaggcaggcatggggcactttgtggttccagggatgtggtccacttcggccacgcaggcctggaagaaggactgtctggtgacaggtgtgtgtgacagggtgccagtgggtccctggctaggcaagaggctacaggcactggaccacatcgtgtctgtgccagggtcctcggtggctgccggacagactgaccttgggcaagtatgcggcggggcgcagggctcgggcctcggcagctgccaagtcatccacctgctgtcttacctttgcagttgccatggaggccacggggaatcagaggtcggaggcggtgtgccaggactggtgcgggaagagtggagggggatcagatgcatgtgagaaggaacatgggggtgaggtatgaagaaacacgggactgtgggggaggggagagccgaggcgagggggttgtaggcaacactcaggatgggcattgtggagtacgaccagcaccacggcaggaagtcaggggaggggcgtggagaccaagggaggaggagagagagtagtagggtgggcagggcggtgtggggagaaacagggattagcattagggacaagggagggatctagagccagggaggagtctggagagactaagaggacgaggggctattctgagaggaagggttggtggtgagggaggggcaggcagggaaggggtttggggaggagccaatggcagctgttggggagaggggtcacttccagatctaagaggaggagaaagaacggggagatgaagacttggggcaggagagagtggtggggcgtgctggcgtggtgaagtgagggaggaggggagtgggggagacacagtgagactgggctgcatggagcaggaggtgcggccagcaggggactggctttaatcagagcagggctggcactttaggatgggttaaggtccaatgtggaccatgagggccaggcacggcag

SEQ ID NO: 36181 - DNA, 952 bp, Artificial sequence
  DNA replication origin
aggggtcaaagagaaccttagtggctggttaatggggggagtcattagggatcataggaggatttggtgggaggtaagcttggggctcaatggggggtcagtataggattcaaagggggatccatggcagagtggttggatggccagagttgatgagaggtcagtggaagttcaatgaggggcaataagagaatggataagagtcagtgaagaggggccagcagcggggggcaaggggaggatctagaaaagggcaatggaggaagggatggacaactccgtggatcactgaggaccgaggcttagtggctttgggcgacaatgggggctcccctggagagtaaatgggggtggagtcagaagggtagtcagtgactgacaaacgctgctgggtttgtggatggcagttcaaggttaatgggcaacatcctactgggaaggatgcctctatgatcaatgagggcctagtgagacttggacagtgctctaggagaaggtgtgccaatgaatgaatgggacactatagaaaactcaacagggtgagaagatgagtcaaagagaggctcaattagagggataatagaaaagcaggggaatgcagtgcaggagttagtcatatccagtataggaagctcagtagagaatcagtagatggcaggggtgggggcttgatgggcaggtccacagggggtaaatgaggacattaataggccagtcaatggatcactgggaaggtcaacaaactgctcagaaagcatcagtgtgggaggtcgggacggtgtcgggtggggtcaataggacagtaaatgggattaatgggcaagtcagtataacagcagtaggattggtcaggtatggtggctcatgcctctaatcccagcactttgggaggccaaggcaggaagatcatttgagcccaggagttcaagaccagcccgggcaacatagcgag

SEQ ID NO: 36182 - DNA, 1190 bp, Artificial sequence
  DNA replication origin
ccagaccaatcaaatcaagtcatacccctgcctgtcttgccgcatctaatctggtcctaactgttctccagtacccacccttcctcgcctagccccactgcccaggcctgaacttctgttggtcctgacgcgaccgtcccctggtggcccatgtcagggctcttcagagcttacccctctctcgaaagcacactcgtgacagaaggcagactcccagagccctgcaagccacagtgtaggcagccagggcccagtatatggttcagtgggcgctgtattggtggcacacagtgggccaggcacttgctgaggaatgggcctggtcacagtgctgcatagccgggctccaagggatccaccgccactgccagccacactcactgcccattcctggtgaatagggcatgcacggccatctggcaaaatccagggcagaggggcccacagacctggctgcaacctggcaacttagcaaccttccgggcattgggcaaggatgtaatagggtcactggggccagagtctacacaggtagggtccatatggccatggcagcatcacaagtgccaggctgtcccagtcatagcaagaggccaaagtctgtgtccatgtacagctggcagccccaaagttgggtgtggaggtggtggccataagagaagggcagcgattcccaaattccgtctacctacacagagggcatgcaggcaggttgaacagcagcaggagatggtcactgagtagtgggggagtcagcagaaaggatcagagaggggtcaaagagaaccttagtggctggttaatggggggagtcattagggatcataggaggatttggtgggaggtaagcttggggctcaatggggggtcagtataggattcaaagggggatccatggcagagtggttggatggccagagttgatgagaggtcagtggaagttcaatgaggggcaataagagaatggataagagtcagtgaagaggggccagcagcggggggcaaggggaggatctagaaaagggcaatggaggaagggatggacaactccgtggatcactgaggaccgaggcttagtggctttgggcgacaatgggggctcccctggagagtaaatgggggtggagtcagaagggtagtcagtgactgacaaacgctgctgggtttgtggatggcagttcaaggttaat

SEQ ID NO: 36183 - DNA, 1083 bp, Artificial sequence
  DNA replication origin
ttaaagacatacactttttaattttatttaattcttttagagacgaggtctggctctgttgcctaggctggagtgcagtggcgccaccatggctcactgcagcctcgacctcctgggcttaaggatcttcctacctcagtctcttgagcagctgggaacacaggcgcgcaccacccccccccccccccgcctaatttttaatttatttttttgagcccgggaatggtgcgggccagcaagggagagcacaggggcggagcgcgggggcgggggccgcaggggcagggtaccagacggtgcccagcggtgggtgtccgcctgcaaggaagcagccgcattcggctgcgggcactcagaggcgccgctcagcgggaagccctggccgcatactcagcgctcccggcagggctgtcacccgcgcatgtggccaggtagcgcgcagctcagcgcgaacgcagcgggcaccgcaaagctggggcgggccgcgggggtgggagggtcagggacagagacagagagaggtgggggagacatagccagggtcggatgggggaggcggagatggaggatgcccgcagagagcagcacgggtgtgcccggggaagaaacaacgaggaaccgagagaaggggaacgggaacaggggaaggggcggggcagagggaggtccagaaagagagacatgcagagagccagcggcacggaggagacatagagacaccgaaaaaagaggcataaaagacagaaagaccttgttaatcaggccgggcgctgtggctcacgcctgtaatcccagcactttaagaggctgaggagggagagccgcttgcgcccaaggattcgaggcaagcttgggcaacatagtgagacccctgtctctataaaaattgttaaaaattttaaaaagaccttgttaatcaaaccagaccaatcaaatcaagtcatacccctgcctgtcttgccgcatctaatctggtcctaactgttctccagtacccacccttcctcgcctagccccactgcccaggcctgaacttctgttggtcctgacgcgaccgtcccctggtggcccatgtcagggctc

SEQ ID NO: 36184 - DNA, 1532 bp, Artificial sequence
  DNA replication origin
ggggttccttggactgtcgccgtcgtcaggctggcaacccacgccgccaggctccccggtcggggcccgcgggcgtacgaaggcgcccatggcggtggcgtggcccgagcgtagcagctgcagctggcgccgcccgcggcggtacaggtactcgatgcgcagcacgtcggaccgcggcaggcccgcatgctgccggaactctgcccgcactcgcgcctcggcgcccggcttcccacgcccggcgcgcagcagatcgcggtacaggctcagaacctgcctctgcagccggctgtgccggctcatgaccgcggctaagcagagacgctcagcgaacgacctgcgaaccgcggagccgccacacagccagcaaaggccaaagggcaaagccacagccacttccgcccagcgcttcccttggcctccaactcccgcctcccgccatccggcgctgccgcgtctgactggctgtcgttgcagttacgtaacagccggctgggagaagtgggcggagtcgctggtcgcggcctcccacgtaggggacgtgtgttcttgaggggacagcagttctggggatcctggcaccgcctggagggcgttatgtgttcggactcctaggtcttgggttggagggaacagagggtcctcacctaactcctgcattctgggagaagaggaagctaggggtttttttgtgtgtgacggggtctcgctgtcgcccaggctggagtgcagtggcgcgatcttggctcactgcagcctcgaactcctgggcccaagcgatcctcccacctcaactcccctagtagctggaaccacagacgcgcgcaaccgcgcccgctatttatttatttatttatttatttatttatttatttattattattattatttgcagagatgggtctccctatgttgcccagaatggctcgaactcctgggctcaaacgattctcagcctcccaaagtgttgggattccaggcgtgagccaccgcgcccggctaccggttcggactttgggtcccaagggcacggggcactgggagagacgccgggcacaagcgtgcttttgccgtcagttactgattcaaaccatcttgggaagctccgtgcgttccctcgtccggggcaggtctgtgtctggggtcccagccctgggcacgtgcagagggacgagaccccgtagggaaatggctctcggccggttggacaggcttctcgggccaggggaagacaagcagagagagtgtgggcgccaagcccccagaggcagcgtgtggctctaggagctgggttggtcgcgccctctgcgggtgggagtcggggcagtggacagcggtgtttgggtccttaccgactgttaaagcccggagtccgggacaccctgaacagtcgactagactgcaaccccgttgtcctcccaggagctttaggtggtaggccgcaatgccgttgttgtccccgcgggccgcctggaggtgtcctcgtagcgctagggaggcccgcaaggacacagcatcctcgggccccacca

SEQ ID NO: 36185 - DNA, 1959 bp, Artificial sequence
  DNA replication origin
acgacagccagtcagacgcggcagcgccggatggcgggaggcgggagttggaggccaagggaagcgctgggcggaagtggctgtggctttgccctttggcctttgctggctgtgtggcggctccgcggttcgcaggtcgttcgctgagcgtctctgcttagccgcggtcatgagccggcacagccggctgcagaggcaggttctgagcctgtaccgcgatctgctgcgcgccgggcgtgggaagccgggcgccgaggcgcgagtgcgggcagagttccggcagcatgcgggcctgccgcggtccgacgtgctgcgcatcgagtacctgtaccgccgcgggcggcgccagctgcagctgctacgctcgggccacgccaccgccatgggcgccttcgtacgcccgcgggccccgaccggggagcctggcggcgtgggttgccagcctgacgacggcgacagtccaaggaacccccacgacagcacgggggcaccggagacccgccccgacggacggtgacaggcgaagagccgaactcgctcgatggcgtggtggagccaggaggctcgcctgactgcatggggggactggggaacccgcctaaggtgagaggtcttaagagactagcttgacgaattggggatgtcagagactcctccttggcgacgcagggggcctagagagccccgtgatggacggcaagggaggcccgccttttccgatgcttggagacaggtcggtgctcctcccccatgagggcttggggcggcctgggacgctggcgggctggacagtgtcaagccaagagctacttgcccgaaggtacggggagccaggacgacccccggtggacagggagagcctgagacgcccttctcttgacccctgagaacatacccacttctggctcctcaaggagtctcccctctcctgtatttaactctgagaagtgcagactttttgctgagaacgttttgggaaggtgccctgatgagcggtgagaagcccggaatccccttctggaaaactttcccccattaattgtgacaagccaggaccatgaggaaggggtaggggtctatcaccctggttgatcaactgaagacccccaaaggcccctacttgatggttttgaggggcaacattgactcatttgccccttccctctcggaatgttggacaaagggaataaaattggggatatgtctacttccctgttggtggtcttaaagcttttatatatttcaggatttttgaaacacccccagcccccctgccaccacacacacacgcacacagacacctggaagggaccatctgggaggtgataggtgtggggatctgactccttccggagccctgtagactggcacattgattgaagcggcatagttttctcccctgggcagatctgtggagggggctcatcctggcttaacccccaaagataccccagttggctccctaatggagggcaagtgatttaacatctttgtgtggaagaggaaatggtggagctgagaactggctcggagcccctgaggcagtagtgagggtctcagacctggaaatttctcaaacctggctgaagggtccagcctcagctacagtgaacgacaaggccctggggcaggagaggggagatgaaccccatagatcacagatatactccctccggtgtccccatatgggcctgccctagacattctgtggagggatgcattttgcatcgctgagctatatttgcacccatatcagttaaataagtggaaatgagttcttgtggatgtagctgtgggtaggaggaccacaggtaaggagcatagacctcagaccaaagggaggatggacggaagagaaacagtcactgccctaatcccggtgggggagccacattcccaaatggttataaagtggaattgcagtttgaagaattaattgccgggataggcttctaggca

SEQ ID NO: 36186 - DNA, 1054 bp, Artificial sequence
  DNA replication origin
aatggggtaggccctggaggtccgatttctgggttcccagtggggcagaatccagggctcttgaggaggtggcgcaggggttctatctggaaccctcttggatggcgtggagtgatgctgggagatttagctactggcctgctagggaggaaggagttaagtgactcttctgtcacctgagctgggcatcaaatggccgggtccaggttcctcttggaaggggcggagccagacctgtcctgggcctctcctgcagcctcaggcccgggtgactccagcggaggagctctgggacacccttgtctagggaagaggtcttactggctgccctcacctgactttgtgtccccaggcccccagccatggccctgtccctgcctctgggccctagacttggctcagagcccctcaaccacccaccgggagcacctagagaggcggacattgttggatgcaccgtctgccccgcgtccggagaggagagcacgaggtgggggccggggctttggaagcttgttcccaaaagggtaggcgtggtggcaggggccatgtgagggtaggaggtgccatggctgtgatcgcctggggacataggagaggccaccagggttggggtgacggtaggctgaaaagtgaggtgtcgagactcacccagtcaccgccccctgcctcctagcccagagcaggcccagaccctgggacaggactccttgggccctcctgagcacttccagggtgggccaaggggcaatgagcctgccgctcaccccccgagatggtcaacaccctcttcctacgaggacccagctgggggcaaacactgtgaggtgagctgaggtgacccagaccccttgtgccagccccacctcctctctgtcccctggagtctggcctccatactgaggaccgggtgatgattctggaaaggtgttgggtgtctgtagggggagggaccttctggaaaagtgtttcaatatctgaccaactggggagacgtatttctttctttctttttttttttgagatggagtctctctgtcacctaggctggaat

SEQ ID NO: 36187 - DNA, 2189 bp, Artificial sequence
  DNA replication origin
tcatttaagaccctagatgccgctcccctcaggaaaccaagcatctggcccctaaaaaataaaaatataaaaccaaggaaagatttttttgtttatttggtatggggtcttctgtagctcacacaaaattattgggaaaataaataacccaggggagccccctttgcccacggttcctaggtcgcggagtcacagcagccccaaaggggcaggaacctgggaatccgaggggtcccggccctggcggtcacttgcccagcaggaggccggcgcgcagcacgcggggcacgcggcggatggtcagcgagacccgggtgccgcgcaccaggcaggctcccggccgcgccgacgggcaggctgccgcattgggcggcgaggaggcggcgtccagcgcgtctacgcgggcggcggcgatgccgtggagaagacgcgtgtaggcggggccgcggagcaccagcaggctgcgcggttccagcagtagcgaggtggtgggccggggcggaggccgaggctgcagggcgggttgagggtcagcagggctcaagaagtcggggggtgggggtgggcgagaggtcggtagcctccggggatcagctagtccccaggggcaaaagctgaagagcaagtgtgctcacaatgatggaggctttggtggttcaggagtgaaaattgctggggcctgggctggggctgctggaaagggagggcgagggctctgccgtccctcgggagggggcaggatctaggtggcagatgggggcgtcaaagggtcagcggccggtgggagctgcagctgggatctcaaaggggctgaggctggggctgggacccaggaataggcagtccccaggaaatacaggcagagctgggctgagagagcatggctgaagccaggaccaggtgaggagagagtgaggcagaggttagaggcagtgggggttcccaaggacatcaggacattagaggacaaccgcacagctgagggagtgtcagagcatccaggagcatgcagggctcgagggcaagcctcaaggagtgggtcggcgtgttcaggggcgtttctgtgaacactggggtgctagaaatgcatcactcagagaaattgtgtcaaggggtcaaggagaatctgggggtgtcctgcaccccaaatcacattcctggagtagcaggacgtctggggcaccctgagcaggggcagatagagcatctgggaggaggtgaggccccccgagttaatggcggtggggtatctaaggatatcagtgtctgctggggagtcaggggtatccattcagcaggttggggcatcggggagcctgtgaaaatcatggcatgtgggacagacaccctgtaagcagatgggttgggtgtctgggaggaagtgggtacaccccatgaggggacaagggaaggtatctgggagagtgccaggagtaccccgaaggcatgtgggaccaggtcatcttggaggatgtgcgaggttgaagtgcctacaagcagctggggcagtgtctgggggcccacctgttctgtagggtcatcgtcctctggccgccgcggctcgtagaagtccagcacggtgtgggagcccaggctgatggtgctgacagtcgggtagtacagtggtccgtcctcgtggggctagggagtgggcaccagggctgggcagggcaggagtccacaacccccaccctctgggtcaaaggggggcttcccaagccagggacagggaggtgaatgcctgtttgggagatgtggctgcctaatgagtgagggtgggtacagagtcccctgccccagcacagctcagaagtctgagtggggggacacgggccgagggtgtgtggttaccatgatgccctccccaggcagatactggttcacgaggacatggttagctgggaggcctccaaagaggctgaggtttgacactttgtccacgtagcgctggagccatgggggcagccgctcaggaaccatccctcggggatgaggaagcccacctggggaaggcaatggggtcctgagggcccccctatagcaatagatcccccattagggattccacagtggctggaagcaccctgatcctctcagggacccctgaccgtttggagatagccactgggtccttcagaggtttcctcacttctccagaccacaggtccctttcagatactcccaactca

SEQ ID NO: 36188 - DNA, 1479 bp, Artificial sequence
  DNA replication origin
cctgtcctcttcaataaagacgtttctatggcctctctgtgtcgggtcattgggggtttcccttgctgggagaagacgggaaaggaagtgcttccttcagtctcacctccctgcggcgtgggcaggtgatggcgctggccgcgggaagtccttctagcagcctctcatgtcttcccgcggctgtcacggctgccgcccccgtcccacccatcggggtccactccgccaatggccaggttcagttcctaagttctgagtggccagtgccagacgacgatgccccgcccacgccctcctgccaatggctcagaggccaggaggcgcggcctatccttaggcgagcatgaagggggcgggcgaatactgagtgagagcgccgattgggtggaaggcgggcccttgaagcctctgggagctcccattggcctgcggactctgcgtctgtaatgtggggcggaaatggctgggagggggatggggatgttgaatttggaaattggaggggacgctggtggacggtcagttttggggagtgctgggggtagagatggatgtcaatagggctgaaagtggggatccgggggagcccagagtaggagtccgaggaggctcagagcttggagtcctaaaaggctcggagtcggggatctgaatggttcagggagggaagaagatttgggagtcagcctcagagctaaagatctcagggtgctggagtgaaggggcgctcaggaggggaaatccgaggggcgtccaaatggggggatccgaggaggctgagggtggacatgtctgaggaggctcagattggggtcacaggagtgcacagaatgggattcggtggggggcgggggtcgctgagtgttgatagccgggctcacagttgcaggtctgaagcggggtctcaaggtgtttaaaggggctctggagtgcagccctgggggctatgtgtagagcttttgagaaaggctccctgtgtgtggggccagagaatgttctctgtgggaggattgagaaggcatatgtgtagttggatgggcccttagtggacagagtaatgggggattattcttggggctcattgtgtccgggcatggaacgtaggggctctctgtgtggcttgtaagatgctgaagactcagattttagagaccaagtgcgtttcagaagagggctgaggtgaggcctggcctgtgatggggtggaatgctgcatcatggtgttagggcgggaggcctagtgacttcagtatgtcctcccctccctacaggattgggtgcaaggagttggtgttgatggaggagcaggacgccagagtcccagccctggaaccgttcagagtggagcaggttgtcagaactcagggtgcagagggtgaaggaggcaggctgattcctgagttcttgggttgggactgcccccttccaccaaattcattcttactgtcagagtccattctggaatggcactggtcccttg

SEQ ID NO: 36189 - DNA, 1474 bp, Artificial sequence
  DNA replication origin
ggtgagaacactggggaaaccagggggagaggggatgcggttccccacatgtgtgggtgaccctccctgctcccctggtactcacagattctgcgccgaggctgccatgtgaacgatcgtgacgggctgaccgacatgacactgctccactatgcgtgcaaagctggggcccacggagtcggtgagggccccctacccccaagtcataagccccaaagcctaggcccccagacccaacacgctgaaaaccacccagaactcaggccccatctggaacccgaagcttcggatcccaaagtatagtccctgaagcccagggtcctccccgtgcactgggcccatgctctggaatgggggttccaagctgacccggcctatcgcgcaggggaccccgcggcagccgtgcgcctctcgcagcagctgctggcgctgggcgcagatgtgacgctgcgcagccgctggaccaacatgaacgcgcttcactacgcggcctattttgatgtgcccgacctcgtgcgtgtgctgctgaagggtgcgaggccgcgaggtgaggaggagagccctggctgggagggggcaaggacctgggtgagggacgcggagacccaggtgaggccaggctgcgaggggaaggaggacggtgatctgaggagatagcgggaggttggaggcgtgggagagggggctcagggactaccactctagggagggtcggggctgccaagggagaggggggctccgaggtgggggcggggctctgcgtcggaggctctgggacctgcaagttaagagatgagccccgaggtgggaggagggctggggtcccacaggcgctcacccggaacccctcctcttgcccacttccagtggtgaactccacgtgcagtgacttcaaccacggctcagccctgcacatcgctgcttccagcctgtgcctgggcgccgccaaatgtttgctggagcacggcgccaaccctgcgctgagggtactgccacccttgcccagaacccgttaccctcctgctcccttcctcccccacttccctccagcaggtctctgcgtttcccgtgactccccaaatactacaaatgccgtctgtacattcagcaaatgcaataacagctgaaatatgcctagtgttcattacatgtcaggtgaagtctattataagccttgttttacaatggggaaactgaggcagagattaagggatctgcccagggtcatccagcctatcccatggcagtgcataacagcatttcaaggtcatgaggaaagttgggctaggccttctgtgaatgagagggttggtcctctcctaagccctcaatatgatctttgacctctgacctatgcattaccaggctccatccacaatgctaattaccctgcagccgtccaggcacatgtatgttggggtaacatggcctgtgcccctgagaccctgcctctccccattttccactggcccag

SEQ ID NO: 36190 - DNA, 1516 bp, Artificial sequence
  DNA replication origin
gccctcctcccacctcggggctcatctcttaacttgcaggtcccagagcctccgacgcagagccccgcccccacctcggagcccccctctcccttggcagccccgaccctccctagagtggtagtccctgagccccctctcccacgcctccaacctcccgctatctcctcagatcaccgtcctccttcccctcgcagcctggcctcacctgggtctccgcgtccctcacccaggtccttgccccctcccagccagggctctcctcctcacctcgcggcctcgcacccttcagcagcacacgcacgaggtcgggcacatcaaaataggccgcgtagtgaagcgcgttcatgttggtccagcggctgcgcagcgtcacatctgcgcccagcgccagcagctgctgcgagaggcgcacggctgccgcggggtcccctgcgcgataggccgggtcagcttggaacccccattccagagcatgggcccagtgcacggggaggaccctgggcttcagggactatactttgggatccgaagcttcgggttccagatggggcctgagttctgggtggttttcagcgtgttgggtctgggggcctaggctttggggcttatgacttgggggtagggggccctcaccgactccgtgggccccagctttgcacgcatagtggagcagtgtcatgtcggtcagcccgtcacgatcgttcacatggcagcctcggcgcagaatctgtgagtaccaggggagcagggagggtcacccacacatgtggggaaccgcatcccctctccccctggtttccccagtgttctcacctcattgccgatgacgtctatcttgtgctggacttggggcacccactggcgcacaatggcaaacagctcggggatggtggtctgagggtcaaacaggatctcctggcacgccgggtcattgggatcgaagaaggtgaaagctggggtggcaagaggtccaaggtcaccccacgcaactgaccccctccttccagcctcagtaggggagctgtaggtctttgccttttagagcctctaatgcagggtctcaagctggtggcacatgggccacagtcaacccacaggcattttctgtgtggccagcatgaggtttcaaactcaggtgggttcacataaaaatctcgatgcccagtgtgtcttgaaaagttggaagatcaggcaattcccatatagcagcaaactccaccccctgaaacaaaagcctgacagagagtgcagtaccttggagtctgcatgtccagggggactgctactgacctcacccactgttgccctgtgagagtatgagtgaagtttggctgaatctccagagcaaaaataaataaagccagaagtcctggtttttaataaaactctctcaattgtttcaaataccatgcagtccacatcaaatgtatccatgactgggcacagtggttcacatctgtaatcccaatgcgttgggaggctgaggcaggaggattgcttgagcccataagtt

SEQ ID NO: 36191 - DNA, 857 bp, Artificial sequence
  DNA replication origin
ctttgggaggctgaggccagcggatcacctgaggtcaggagtttgagaccagccatggccaacatggtgaaaccccatctctactaaaaatacaaaaattggctgggtatagtggcatatgtctgtaatcccagccactcgggaggctgaggcagtagaatcgcttgaacctgggaggcagaggttgcccaagatcgagccactacactccagcctgagtgacagagtaagactgtctcaaaaaaaaaaaaaaaaaagaaaaaaaaaaaaaagaaaagaaaaaaagaaaaaagaaaaagaaattaaaggtggagatacgataatgactagggggcagctacctgcaggggtagtcagggctgctctttctgagtaggtaacatttagtttgggacccagagcatggggaggaatcagccataagagagctggaaaaagagtgttccaggcagacagcagcaagtgcaaaggccctgaggcagaattgaacttggaacagaaagatcctggagctgcattcagggaatgatcgaggttgaggtgagaggttggcataggccagatctggaagggccttcaaggctacagtgaggactttggttatattctaagtgggacaggggagaagagtggcaaggggagggtgtttaagagcagaggagtggcaggtctgatttgtagtttgaaagctccctctgggtactgggtagaaggggatggagtgcagccagagttggatgtaggaggggaatttggaagatatgcaggctgggaatccccggcagctgtgaggttcagaaaccaggttcagagagtcagcgttgccaggatagagcaagacagatggcatccatgga

SEQ ID NO: 36192 - DNA, 1085 bp, Artificial sequence
  DNA replication origin
cccgtccctactaaaaatacaaaaattagctgggtgtggtggcacaggcctgtaatcccagctactcgggaggctgaggcaggagaatcacttgaacctggaagacagaggttgcagtgagcagagatcatgccactccactccagcctggggaacagtgagactgccatctcaaaaaaaaaaaaaaaaaagagccagtgcaaaggtcctggggtagggagaagcaaggaggccagtgtggctggggtggagtgaacaaaagagggtgagaggaggtgagtgcagagatgatggggcaggttcacataggcccttgtgggccatggctgagagccttggcttctacctggagtgaggtgcagcaggcagacccctctgagggaaagagggctccaaagtgacaggtgttcatgggtccctgtggctgcatgttggaggaggacggggacagcaggtaagaggctgctgccgtagtgctggtggcagaagaagaaggatggaccaagatgagggcccagggtagcggtggggagagtgagatcctggaaatcttttggagatggagctactggacctgtgcattagaaggatgaggtgttcaaggctgtcacccagccccatccaggctgggatgatttgaggcagagcaggctacagctccaggtgggaagccaagccatgacaatggagccaggaccctgggctggcttcaggaggcctccgtggggaagatacaggttctgagagagttggaggggtcaatcggcagatctgtttcccagacactgctacaggcatgtagcatggtgattaagaatcaaagctgggcatggtgactcgtgcctgtaatctcagcgctttgggtggcaggggcaggaggatcccttgaggtcaggagttcaagaccagcctgggcaacatggcaaaaccctgtctcaaaaaaaattctccagacatggtggcatgcacgtgtggtctcggctactcgggaggttgaggtgggaggatggcttgagcccagaagtttgacgctgcagtgagccaagatcacaacactgcacagtagcctgggtgacagagtgaga

SEQ ID NO: 36193 - DNA, 1041 bp, Artificial sequence
  DNA replication origin
gtctactcaagtagaatgagcaccatgagggcagggattttctcagctgtgtccaccatggtatcatgaactcagtaccaggcttggcaaaaagcgtgggactccttagaaccaggtatgattctcccaaacaacccttgctctgctctgaggctgtcgtactgatttgcaaagatctgagccgggggtggcagaagcctggtacccaggggattgggggctgatgagagacttgggcccaggtcacccctaaggttcaagagatccctaggagtggggtggtagaacccaggcccttgagggaggcactgctactacccaggcgtgggcggtggggctgggccaagcccacgtataatgtctttcctcctccatcttctatcttttgtccctcgacattgtctgtcttgatccttatgcactggggatccgagtgtccaggagctccggcttggcatccactgtggcaggtgcagggtcctgggcaaggaccatggctatgtcaggccctccacagatgatggtgaaggtttgggattcctcaggtccaagggtctgggctgttgtctaaggcaaagaagtggtagagatggggaacattacgaagcaagttgcgggagagacagacagataacggtgaggaacagggaggcaaaggtggcaggagggcgtgtcaggaaacagagagagatgtggggagagatatgaggagacaggaaagcagatgtgagggccagagagacattcatgggaaaggaaagaagggtggggaaatgggaagagaagtgcgggggcacagacgcagacacgtgggggaaagagatgtgcaggcagacagacgtacagacagggtcagagatatgggggagacagaaaatatgcagataaagagagacacagggaggtggggaaacaggtggcggacagagatgatgggcagaaagacaatgaatgttggggagggaggagattgggaggtagggatagatgagtaggagacagagattgaatgacaggaggggaggcagagagaggcagtca

SEQ ID NO: 36194 - DNA, 1401 bp, Artificial sequence
  DNA replication origin
ttaattttctgtagagacagtgcttgctatgttgcccaggctggtctcgaactcctggcctccagcaatcctcctgccttggcctcccaaagtgttgggattacaggcgtgagccactgagcccgggaaagccagaaatttggaaacacggctgaatgttctgatttttgaataggggatcctagacaaaatgaaaacacactgcaggccaggccaccacccatggatggggctgccaggctggggtgccactcaccaggcgctgcagaccccggcgtgcccgtgccagcaggctctccccgtgtagctgctgtgccagccgttccagggcctgcagctgcgcctggtgccgctcctggcaccgttgcagcctccgcacccggcgttgcagtgctcccagcactgggcccagcccggtctgggcctgttgggcagggacttcaggttgtgaccgctcaggagttggcgcaggggccaggggggtcaggagcatggtggccacagtcttggggctccccgatgtggggcccagcaccactaggcgcactgggccagagactgggatggcagggctctggggcaggggtgtattcttctgtaggggaggcggcggcgagactggcttctgggtgcttcgggtcctccgctgactctggaagacaaggcatggggtgcaggggtgccgtggtcagacttcgactcaggaggaaagggatggagggtctgtttccaagggggacttgcctaggtaaggccagacctcagggaggaagtgtcgtcaggaggggagggccaaagttcagactcaaggagggacttcccttaggcagggaggtctgggggttggattccagcagcaggacctcccagcgctcaccttggcaggtggtccccgggagaagatggagggcactgcatcaggccgcaggtagcgcacaccccagcgccactggaagcaggagggtgtgaagtgctcgctgcacaagtgctggtggcagctgggcacccagtgctcacagcccatgtgctgcagccaggcctgcagccggggaccatccttcagtgggaacctgcatgggtggttggggggctgggtcagtgctacgaggttcagacttatccctcccagaggatacccaccctggaggtctctgggctccaagcctgtgcctccctagggctaggaagtagacctgtcttgtgcccaggctttctctatctcatacacacaaccacaacccttttttcagcttcatcttttagtagtagtattttgtgagacggggtttcgcacttgtcacccaggctggagtgcaatggcgcgatcttggctcactacaacctccgcctcctgggttcaaacgattcttctgcttcagcctcctgagtagctgggactac

SEQ ID NO: 36195 - DNA, 862 bp, Artificial sequence
  DNA replication origin
ttggcgcaggctcagaaacgccgtgacgccgcccttccccccaacacgtgatgaaagtcggggtgacgaagggccggctttgcgcaggtgcacagtactcgctatggcccattcgtcacgtgacgagggcgggactgtggcactgtggaggggcgcctagtaggcaggcgctctcagctctctccccggtacgtgacgagactccacggacgtcacgtgaggcaggcggcgagcgcgggtggggcggggttaggcggcgctccgcgagaaccaaagtgcagccgctgacccggcaaaactcagcgggggctggatagccatgcccaagtactgcagggcgccgaactgctccaacactgcgggccgcctgggtgcagacaaccgccctgtgagcttctacaagtgagcgcagcgcggggcggggcttgagggaggcgggaccctgagaggggtggggcccgagcattagtgctgctgtgcggggcttctggtcttgcttgagggtgttaggaagtggggttaaaccatgaggagatggccttcctggcagtgtccattgcacatacaaaggtgcaggcgtgggaaacaggagtagacgattgactacagatagcgagcgaagcgagccgaagagtgaaagggatgtaagaagtgaagtcggtgcaggctgttagagagcctgcagatgcccacttgccctccccacgcatttgagccatctgaaactcagagcatccgaaactgagcttgcgatcgtgtctccccaaaaccttccagtctgtcttatcttagtagcgtgcttcattcttcttgttgcttaggtttaaaaaatgtcatccttacctctttcgtcatacttggg

SEQ ID NO: 36196 - DNA, 1087 bp, Artificial sequence
  DNA replication origin
tagcctcgtaaaaattaaaacctgtatgtttcagcgaataatgaaaacgcagtctggatgaaagaccccatgacgcttaatcaggcatccagtacactggctgtggccccgccccgccaggcactcgctccgcctcttcgcccccattggttctaagcgccgcccggcatccctgcgattggctaggccgggcccgtcgcgtccaataggcggtggcgccggctttcccgcggctgttcgctgttccagtgggtcgtggcggtggcggcagcggcggttaggggatgtaacggtcgcccgcctccggcgtgacgatggcggccgtagggtccggaggctatgcgcggaacgatgcaggggagaagctgccctctgtcatggcgggagttccggcgcggaggggccagtcctccccgccccccgccccaccaatctgcctacggcggcggacgcgactctcgacggcctccgaggagacggtgcagaaccgggtgagaagctgctcgccatgtctaccccagttccaggcttcctaggtttcccctagtcccgtcctgagaactgtggccccgacatcagcccccggccagtcccctcaggttgttccctgccatgcctcgtcccctaacccccgcccctttagccacggcccctcccactttctcctcgctgctttcccggctccaccctcagcgttggagcaattcgggggttcctcgctggttcccacccgtggaaatgcattttgcttctgtaaatcacagcctagtcctgctatattttaacccccgttctatcgcctttagacgtcacgatcatagctcactgcagcctcactgccctggcccccgctgagtcattaaggtcccttcgagggttcggtccagagtgttacctgccccaactcttcctcgcttctaccccgccttctctcaccttctgcgatctctatcctttttcctcaccaaggtgggattcttaatccatattgtcactcaaaactatgagaaagacgtgagaagttatttataaaatctctgcagtgctgcctggggaggagggcgtacagaacagttccctaaatcct

SEQ ID NO: 36197 - DNA, 1340 bp, Artificial sequence
  DNA replication origin
ggtgaggagcgtctctgcctggccgtcccatctgagaagtgaggagcccctccgcccggcagccgccccgtctgagaagtgaggagcccctccgcccggcagctgccccgtctgggaagtgaggagcgtctccgcccagcagccgccccgtcccggagggaggtgggggtcagcccccgcccggccagccgcccagtccgggagggaggtggggggagtcagcccccgcccggccagccgctccgtccgggagggaggtggggggttagcccccgcccggccagccgccccgtccaggagggaggtgggggtcagcccctgcccagccagccggcccgtcagggagggaggtgggggtccgcctccgccctgccgccgccccgtccgggagatggggggtgcctctgcccggccgccccttctgggaagtgaggagcccctctgcccggccaccaccccgtctgggaggtgtacccaacagctcattgagaacgggccatgatgacgatggcggttttgtggaatagaaaagggggaaaggtggggaaaagatagagaaatcagattgttgctgtgtctgtgtagaaagaagtagacatgggagacttcattttgttctgtactaagaaaaattcttctgccttgggatgctgttgatctatgaccttacccccaaccctgtgctctctgaaacatgtgctgtgtccattcagggttaaatgcattaagggcggtgcaagatgtgctttgttaaacagatgcttgaaggcagcagactcgttaagagtcatcaccactccctaatctcaagtacccagggacacaaacactgcggaagcccgcagggtcctctgcctaggaaaaccagagacctttgttcacttgtttgtctgctgaccttccctccactattgtcctaagaccctgccaaaccccctctgggagaaacacccaagaatgatcaataaaaaaaaataaattaattaaaaaaaaatgcaatcctctaccagccagagtgctcaaaggagaaaagaaatgtgaagtagatcaaatagtcatgggaaaacaactgtcaccttgagcccatttcagggtaccaagcaccgtgctcactgccttgcctatgttatctcacgtgacttccttatcagctctgcggggagggcagcagtactcccattttacagatgtggaaccttaagctcagagagtgggcgtcattcaccactagtcacataagcagaacctgtgtggtcaatgctgatgagcacccctgcagacacatatcacgagaaagagtctgtccagctgatggcagagagggaggtggtaccttcagg

SEQ ID NO: 36198 - DNA, 880 bp, Artificial sequence
  DNA replication origin
cccggacggggcggcggcagggcggaggcggacccccacctccctccctgacgggccggctggctgggcaggggctgacccccacctccctcctggacggggcggctggccgggcgggggctaaccccccacctccctcccggacggagcggctggccgggcgggggctgactccccccacctccctcccggactgggcggctggccgggcgggggctgacccccacctccctccgggacggggcggctgctgggcggagacgctcctcacttcccagacggggcagctgccgggcggaggggctcctcacttctcagacggggcggctgccgggcggaggggctcctcacttctcagatgggacggccaggcagagacgctcctcacctcccagacagggtcgcggccgggtagaggcgctcctcacatcccagacggggtggcggggcagaggcgctccccgcatctcagacgatgggcggccgggcagagacgctcctcactttctagacggaatggcagccgggaagaggcgctcctcacttcccagattgggcagccgagcagaggggctcctcacatcccagacgatgggcggccaggcagagacgctcctcacttcccagacggggtggcggccgggcagaggctgcaatctcggcactttgggaggccaaggcaggcggctgggaggtggaggttgtagctagccaagatcgcgccactgcactccagcctgggaaacattgagcactgagtaaacgagactccgtctgcaatcccggcacctcgggaggccgaggctggcggaccactcgcggttaggagctggagaccagcccggccaacacagcgaaaccctgtgtttggtggagacca

SEQ ID NO: 36199 - DNA, 1036 bp, Artificial sequence
  DNA replication origin
agaatcgcttgaacccgggaggcggaggttgcagtgacctgacatcataccacttcactcctgcctgggcgacagagcaagactctgtctttaaaaaaaaaaaatgtgtatgtcacatcagaagatgggacttggcatagagaaagtaaggaccatgggatagtgagggaaggccctggagagtgacaggcacacacactaatcactgtctcccacctgccttcctaatcctccgtggtggctcaggacactctgtaaatactcatttgcagagtaacaaagggtggatggggtccagccagagaggctaataactcctgcatccctccagcagcccacacagggcaacctgacctctgctcccaggggccctgggacgctgggctgcccgctctgccctaaggccttccctctgcagcgcatgctgacaaggcacctcaagtgccacagccccgtgcgccgccacctgtgccgctgttgtggcaagggctttcatgacgccttcgatctcaagcgccacatgaggactcacactggtgagcagtggcagggacagggaaaagttgctgggccccaggtggggatggaaggaaatggagagaggtgctgggctgtggagtgtccatggtttgtgtatgtggggtatggagaatcaagacatgatgtctctcggaccccagtgggtgggtgtaaggtggcaccaaaataggggcctgtcacggaatgcagagtgcagacggatgccggttatacgattcaggctccagatcgaaaggcaagggaaggcctccctctccatcccccaggggagggagcatcctggtgagggagagtggagacacaggtgtctggcccatgtctgcactgggtgacggtagcagatggtgggtcatgggcggaagagtctgaagagcttggaataggtaccagaaatgctcaacactggaaagcagggtgggggcgctttagtccagagcccattgccctctctgtccagccctcccctctgcgcccatctgtgcagggatccggccct

SEQ ID NO: 36200 - DNA, 959 bp, Artificial sequence
  DNA replication origin
tccccggcaggtccacctgttcccagcgtggccccgccctgccccctgcctctgtgatcggactccctgttcgccctccgctgcacctcaagtgatcctgactctcatgtcctgcccatccccaaagagagtcctgtcgtcatatcctccgggatcaccctgccctctcctcccaatcttgtctggaatccttccgtgaccccctttcccccacactcgccctctcgtagtgccggaactgtgattaccagcaggaggccgacaacagctgcatctatgtcaacaagatcacgcacgaagtggagtgagtggcgggccctgagctgggggcgggggtgttggctctggaggctgggtctgagcgtaattttgcacccccgcgtccctgcagcgaactgacccagattatcgccgacgtgtcccaggaccccacgttgccgcggaccgaggaccacccgtgccaaaagtgagcgttcagctggtactggggaggtaaagtgaggctcgtctcctcactgggcgaagggaggagggaagggtgtgaagcctccggtgaccgagcccctaccctctcaggtgcggccacaaggaggctgtgttcttccagtcacacagtgcgcgggccgaggtaagtggcgcgagggctttctaagtatctggggcttgtttggtcctttctgggggcggggatatcaatgtgggtgaccctgcgcttcttggaactctgccgggcccttacctattggtgaagttctcttgcctgttcttttggggtaaggcgctgctgggtccaaatccttcctaaccatgcatcatttctgccaggacgccatgcgcctttactacgtgtgcacagccccacactgcggccaccgctggaccgagtgacctcctctctcccccgagtgtaataaacaccagattccatgcgtgagttttctgtgtttatttgcctcgtg

SEQ ID NO: 36201 - DNA, 1106 bp, Artificial sequence
  DNA replication origin
ttattacactcgggggagagaggaggtcactcggtccagcggtggccgcagtgtggggctgtgcacacgtagtaaaggcgcatggcgtcctggcagaaatgatgcatggttaggaaggatttggacccagcagcgccttaccccaaaagaacaggcaagagaacttcaccaataggtaagggcccggcagagttccaagaagcgcagggtcacccacattgatatccccgcccccagaaaggaccaaacaagccccagatacttagaaagccctcgcgccacttacctcggcccgcgcactgtgtgactggaagaacacagcctccttgtggccgcacctgagagggtaggggctcggtcaccggaggcttcacacccttccctcctcccttcgcccagtgaggagacgagcctcactttacctccccagtaccagctgaacgctcacttttggcacgggtggtcctcggtccgcggcaacgtggggtcctgggacacgtcggcgataatctgggtcagttcgctgcagggacgcgggggtgcaaaattacgctcagacccagcctccagagccaacacccccgcccccagctcagggcccgccactcactccacttcgtgcgtgatcttgttgacatagatgcagctgttgtcggcctcctgctggtaatcacagttccggcactacgagagggcgagtgtgggggaaagggggtcacggaaggattccagacaagattgggaggagagggcagggtgatcccggaggatatgacgacaggactctctttggggatgggcaggacatgagagtcaggatcacttgaggtgcagcggagggcgaacagggagtccgatcacagaggcagggggcagggcggggccacgctgggaacaggtggacctgccggggaagaccccggcgctcaccgcgtagagcagaatgcggttctccttgtcttccttggggtacagcatgttgttactgtggggagggggaggtgccaggggttagttctggagccattcctcgcccgccttctaacatcacccgctccctccgcctcaccattcctggcagaagcgaatacccacgaagcccggct

SEQ ID NO: 36202 - DNA, 993 bp, Artificial sequence
  DNA replication origin
aaccgtgaactatggaaggcccctctggattggctgggctggcccaagagtaaggagagccctcttcctggcggtggggaagggacggcggcgattggcggacgctcctggcaggagagcgcggattggtcaggcacggagcaggaggcggggctgatagcccagcagcagcagcggcggcggcggctgcggagcgggtgtgaggcggctggaccgcgctgcaggcatccgcagggcgcggcaagatggaggtgacgggggtgtcggcacccacggtgaccgttttcatcagcagctccctcaacaccttccgctccgagaagcgatacagccgcagcctcaccatcgctgagttcaaggtgtggccatgggggcggggtccggaggggcggggcgaagaaattggggggttcccggaagggggaggctgggaggggccggggagtgactgggcgggcccggaggtgatcccaggctgcggaggctggggacccggtcgcggcggggcgggtccggagagaactcgagagtgcagagatgagggccgggtccagcgaaaaatccgacggtccagagggcgggggcaagaggcgaggggctggattgcggccccgtgcgtcctgactggggggtcttttggaggaaaagggacgtggcgatggtcattgatgcaaggggcggggcctccgtggcctccttcttctcaccctgcctcctcctcacagtgtaaactggagttgctggtgggcagccctgcttcctgcatggaactggagctgtatggagttgacgacaagttctacagcaagctggatcaagaggatgcgctcctgggctcctaccctgtagatgacggctgccgcatccacgtgaggactctctatctgggacactcccccaccccacctttcatttggttattcaacagacacttgctgggctttgccctcagtcatacccgagataggtcctgccttcgtggagcctccagtg

SEQ ID NO: 36203 - DNA, 2379 bp, Artificial sequence
  DNA replication origin
attttctaaaattctttttctctttataaatatcacccatattcattgtttaaaataacagaacttcaaatttgtgaaaattctcaacagaaattctcagtgacgcttcatccggaggtaaaggccattcctattttgccatgttagcccagtggcttaggccagacacctcagggtgttccttgggcccgctctctccctcacccccacatccactctcatcaaatcctctcggctccacctacaaaaacttccctgaccctggtccagcctccatccttcccccaacctcgccatcccggcagcttcctccctggcctccccgctccccatctcagccagagggagcctgggaccacctgagtcaggccagggccctcctagctcagagccctgccctggtggcacttcgctccagataaaaaccaaagtctaggccaggtgcggtggatcgtgcctgtaatcccacccagtacattgggaggctgaggtgggaagatcacttgaggtcaggagttctagaccagcctgaccagcatggcaaaatgtcgtctctacttaaaaatacaaaaattagccgggtgtggtggtgtgtgcctatagtttcagctgcccgggaggctgaggcaggagaatcacttgaatttgcagtgaggcagaggtttccgtgagctgagatcacaccaccacactccagcctgggtgacagagcgagactccgtcaaaaaaaaaaaaaaaacccaaagtctccagcagtcccttgtgtcttccactctccctctggctcgctccaccccacccgcaccacccactctagagcgtgaaggacatttctacctctggccgtctgcacctgccgttcttgctcatctttccagccttggctgaaacatcccctcttttgggaagcctaccctcccatgctccttaagcctcttccctgtcatatttttctccatagccatcctccagtgtttcataggtacctgttcctttgtttgtggttggccttctccctgcacaatgagcacagcctgagggcagagtgcgtctgtgtttacactgagtccccagcatgaggcccagctgggcccctgggagctcggaaaccaatgaatgaatgaatagtgggggcagaacaggaagagatgctctggggcctgaggttggggccagcttaggagagtcccagaggcccatcgaggagatgcgctgtgcacagggctgtgggcaaggcctgagctctgccggttggactctgtgactttggggcccttggcgatgttgatgccagcaagcggggaacttctggggacagaggcagcctctgggagcttggatgggggtgaggaaggggaggtggccagtgtacgtagctacttctcccttccgctgggctcaggagagaagagaaggctgcagtacaggcgagggagggagatgcgtttttcccagatggagacactgaagtccctgcacccagcacccaggcctccctggccagaccctgatccccacggagcccctcccctcacacaggtcattgaccacagtggcgcccgccttggtgagtatgaggacgtgtcccgggtggagaagtacacgatctcacaagaagcctacgaccagaggcaaggtacgggcaggtgggcgtcgaggggtgcgtgggggccagagggagtatgtgcaggtatgagggcgggcaggttagacagggcccctgcagggaggccagtggtgtagacggggggccgagagcttgggaggatataggggtgaggctgggagtggggacagacggaggcctggggtgggaatgagggccgggaggtgtcaggggtatgggcagtcagacgtggtcgggggagggctgggaaagtggagggagttgaggggtaggtgtgggggctgggtgttgtcagggtcagatgggggcatggggcggtcggacggggtgtggagggcaggacaggtggaatgcgagtggacagggtggcggtcagtgagggcgcctgggacggatcgagtgttgggggagaccgggggcctcagggccggaggagggcggaggaggaaggcggatgatgaaggcagatgtgcgctgaaggggtgagagaccatgggtcctgtagtgaggggtgcaggcggcaccccttccatttacgattgtggagttggggggcctaggagtcctgggagaggctaaggctgtggtgggagacctggggcttgggtgacagccctttgtcacctggaagagagagttcctccgtgaacgtgggcccctcgtgggtggagcgtcatcctgttaggcccggccgacaccccaactgaccccagccccctctgcccacagacacggtccgctctttcctgaag

SEQ ID NO: 36204 - DNA, 1126 bp, Artificial sequence
  DNA replication origin
caggcggcaccccttccatttacgattgtggagttggggggcctaggagtcctgggagaggctaaggctgtggtgggagacctggggcttgggtgacagccctttgtcacctggaagagagagttcctccgtgaacgtgggcccctcgtgggtggagcgtcatcctgttaggcccggccgacaccccaactgaccccagccccctctgcccacagacacggtccgctctttcctgaagcgcagcaagctcggccggtacaacgaggaggagcgggctcagcaggaggccgaggccgcccagcgcctggccgaggagaaggcccaggccagctccatccccgtgggcagccgctgtgaggtgcgggcggcgggacaatcccctcgccggggcaccgtcatgtatgtaggtgcgtggctcgcgggcccggtcccgggctccagggctccaaggccgggaggaaatgttgggggcacagtggagcctcggagaccacgctctgcctaggggcgcggggttgggggggactcgaaacgatctcagtccctggaggtgacggaaccatctgccgacactgacggcccagagtgtttgtggagggaagtgggaggcgcaggcggagtgatctgtccagcgagggaggaagcagaagccagaggcacgcggcctgtgcgcttcgaagcgtggggcagtgtcagtcgcggtggggaaacgggcggcgtgaccaaggcaggagtgagggaacacagggggctgtgtgagcccagaggaagcacctggaggctgggagcatctgaaggaaaggaggcagcagccaggtgaaaagggaggaagagttcccgccagaaggagtagcgggtgcaggtgagcagagcgcaggaggtccacctggggaaggggagcgggaggagaggggagaagtgtagtcaggggcatgggcagggcggcgtcacagtggagagcagtgtggatttttttaaaaagaacaggctaggcatgatggctcacgcctgtaaactcagcactttgggagaacaaggtgggaggcttgcttgagccccggagttggaggttacagtgagctatgattgtgtcattgcaccctagcctgggcagcagagaaagacc

SEQ ID NO: 36205 - DNA, 848 bp, Artificial sequence
  DNA replication origin
cttggcctcccaaagtgctggaattacaggcatgagccaccatgcccagccacacagaaatttataaaagaatgttcaggcctagcatggtggctcacacctgtaatcccagcactttgggaggctgaagcaggacgatcacttgagcgggaagagtttgagaccagcctgggccacatggcgaaatcccatcctacaaaaaaaaccacaaaactttagccgggggtggtgatgagtacctgtattcccagctactcaggaggccgaggtgggaggatggcttgagcccaagaggttaaggctgaaatggccgagattgtgccactgcattccagcctgggcaatagccagatgctgtctcaaattagaaaaaaaaaaaaaaaaaaaagaagaaggttcatagcagcattattcataatagccaaaaagtggaaatgaccctaatgtccactaactggtgactggatacactgtggtctaggcgctcaatgcaggactatttggcaacagtgtggcactgacacaggcatgccacggatgaaacttgaaagcattctgctcagtggaaggcgccagttacaaaaggccacagactgcatgatcctattcctatgaaacatccagaatcggcaaattagagacagacgtaaattagtggctgaagacgactgggggatgggtacacacaggcataaagacggaaataccagacagtggggatgccagaaacaggagggtggtgagggttgaaaaattatctgttgggtacgatgttcacaatttgggtcatgggtacactagaagcccggtccccacccactagcaggcaacacacccatgtaacaata

SEQ ID NO: 36206 - DNA, 1361 bp, Artificial sequence
  DNA replication origin
aggttagccaatgcaggctgagcccagacccataagccccacccgccaaaactccacatcagtcccctcaggaccacattgtcctggtcccacacaatcagactactcccatatcaagcaccgcccccaatgactgatatccgcctcactggggtccacccccttacagcagaactctcaaaccaggcctccccggcctaattcatgtacccaggttagcctccaggttaatcctattctatttttagaccacgcccctcccagaccacgcctcactgaggctcctcccattcccaggccccgcccctctgatagtctccgccttacctgatggcgctgatgactccgcctaggatgcgcatggccgttccaccgccaccgccgcctccaccaccgccgccgccgccgccgccgccgccgccgcccccggccccgctgatcaggcctccaagcacatttcccaggcccccacccaggcccccgcctcccccgccgccgccgccgccgcccttcaagaacgagttaaccaggaacatggctgcgactcactgctggggggaaaaaaggggaccagtgggtgcttcgcccctgagcccacaccctcccttcaaacacgcatttccggcagctggacctgggaggaatctgaagcctccgggtgggggtctgagtttgcgagggcgggttgtccgcggatgggtggggcaggtatgggggatcaggtttgcaacctcctcaggtctaaaaggcacccgtggggcttgagggagcctggactgggtgcacgcgtgaaggggagggtgcagatctggtgggggttctcttggtggggaccccaagttggcgtaaggcgttcccgacatgtctgggcgctagaatgtgagatccagagcccagcctgaatgtagaggtccttggcaggtcatgggcgcggagcaaacatccacggcctaaagggccccagggcggggtttaggaaatcccaaatgtgggcttgagaatttaggtattcccagcggcaggattccagtgtcacctctggctctgtgggctcgggtctaagatcgtggctgtgagctctgggttcccggacaatggggttccccgctggaactgggggcacagatctacgatcgcggttcaggacaccccaaggaagaattcacagggtatctctgaaacctatgggcctgtattttggatcatgagacagagggtggagaagggtccccgggacggcataaaaggagatcgaacaggtctgagggttcgaatctgagaccatggatctggggggctcctgaggccgagacttcacggtttcgccgggtctgggggccgccaaagtcggagttgcgggg

SEQ ID NO: 36207 - DNA, 1326 bp, Artificial sequence
  DNA replication origin
cccagacatgtcgggaacgccttacgccaacttggggtccccaccaagagaacccccaccagatctgcaccctccccttcacgcgtgcacccagtccaggctccctcaagccccacgggtgccttttagacctgaggaggttgcaaacctgatcccccatacctgccccacccatccgcggacaacccgccctcgcaaactcagacccccacccggaggcttcagattcctcccaggtccagctgccggaaatgcgtgtttgaagggagggtgtgggctcaggggcgaagcacccactggtccccttttttccccccagcagtgagtcgcagccatgttcctggttaactcgttcttgaagggcggcggcggcggcggcgggggaggcgggggcctgggtgggggcctgggaaatgtgcttggaggcctgatcagcggggccgggggcggcggcggcggcggcggcggcggcggcggtggtggaggcggcggtggcggtggaacggccatgcgcatcctaggcggagtcatcagcgccatcaggtaaggcggagactatcagaggggcggggcctgggaatgggaggagcctcagtgaggcgtggtctgggaggggcgtggtctaaaaatagaataggattaacctggaggctaacctgggtacatgaattaggccggggaggcctggtttgagagttctgctgtaagggggtggaccccagtgaggcggatatcagtcattgggggcggtgcttgatatgggagtagtctgattgtgtgggaccaggacaatgtggtcctgaggggactgatgtggagttttggcgggtggggcttatgggtctgggctcagcctgcattggctaacctggagatgaacgttaaaggtgcggagccaatgcgtctgagtgacattttacggaaggggcttgacttatgagtgtggtcagaggttttaggtgggttaatgaggaggtgagcccaggaggaagcaagacctaatggggtagggtaaatggcccagaatgggctgggcttgctgggaactggctggattaatggagaaaaatgccctggtagggatagggcaggttggcttaattagccacggccacttagcagtgatcccttgaaggggcggggaccaatggctggggtaggatgttgggaagacgggcatttaggaagcgggccatggagtagggtcttgggcagatggcacctgaggaggataaggccttgggaagctggggcagagcctctatgaagtgagccctccaaggggcggggtcttttgattctacgtgggattttttaggtttaggg

SEQ ID NO: 36208 - DNA, 936 bp, Artificial sequence
  DNA replication origin
ccctctgcctctgaatctaccctattccttaaccccggtcacttacgtcgtgtcacaaccttattgagaatgttcatgagttctgtggcgctgacctccatgtcctgcgggcggaagttaggggcaggtcaggggtgactgaaaggggtctgagaatgtcatggagaatgggaacactgggattgtcatggtcaagggtgtgtgtgcaagggcagccacaagggaagggatggaacggttaggacggggccagggaccccaggttacttacatctccagccagctgggcaaagagtctccggaactgccggacctcctcactctcgttggcctcaatgttggagtaatgtgtgcgtgggggctgcaaagggaggagagctcagagcagggggaggggaacccggccaggacggctccccaaacccaggtaccctgggtggggaagtcagagtgggctgggcagcttgatgaggaaaagaatgaggggtggtagtgaatggggtgcacgtatgtggggcatggctaagacccatggcgaagctgcagacacggcatgggaggaactggcagaggaatttcacaagaaggggaggaaggtggggcttctctacaggaacagggatgggacctcgaagaggccttggcaggagaagggggtctggttgcagagggggcttaccgggggctccgggttgtactgcgcagccgcctcgctgcgaagagataagggggaggggttagtgccaggggcggggcctccaacgggcagcactacagaaccatcagccccaacgctccagaccccagccgttatcttccttacttggttgctgtgcctttcatttgttcttgtcctcatctgtcccaatccacactgccctggtcgtgcccctcttctcccttcctcaggccaaccccaccctcgaggaaacccag

SEQ ID NO: 36209 - DNA, 740 bp, Artificial sequence
  DNA replication origin
tctttcaggaaactgagcctcagtttcctcttctgtaaaatggaatataataattgtgcctgtccaacagggtggttatgacggttcggtcactttatataattaaagtgccagctgtgacagctggcattgttatgatttaccgccacatgtctgcaggtgactgtgttctgatgaatgcatttccacatctgtggatatgaaagctacatgttggcttcccaaacatactctcaaaaaactctctgtccacccagggcctctcccacactgcccccaaggatacatccatcacggccaccatgctgcgacatgtgtcaatgccaaaaccatcagtcttcagatcagggtctgtgggtaacaggttgaaagtcagaggccagaggtcaaatcctctctgacccctctgcctctgaatctaccctattccttaaccccggtcacttacgtcgtgtcacaaccttattgagaatgttcatgagttctgtggcgctgacctccatgtcctgcgggcggaagttaggggcaggtcaggggtgactgaaaggggtctgagaatgtcatggagaatgggaacactgggattgtcatggtcaagggtgtgtgtgcaagggcagccacaagggaagggatggaacggttaggacggggccagggaccccaggttacttacatctccagccagctgggcaaagagtctccggaactgccggacctcctcactctcgttggcctcaatg

SEQ ID NO: 36210 - DNA, 1149 bp, Artificial sequence
  DNA replication origin
tgagtaccccaaacagcacccataggctccccctcgggacccggggacgtggggtggtgtcctcaagtgggaaggaagacactgagcatggtccatgacacaacagaggcagaggccaagtgtggatggagaagctgcaagaggggcaaacatggccttgggggacagggccaggagtggcattgagacctccctccagcccagactctggaagcagaagcagagatcactggggcttctgggtcctgtctcagcctccacagctcaggatgagacaaaaaatgccgacgagaaaaagacgaggaaatccacggatccagccctggggacgaatctactacctcccctgctccccaggacccagagcccgagccacccctcctctctcgggtcagatcaggaggcagatcccatagagatcagcaactggggcatgtttatttcctcctgggcctggcaggctgggagcagaatatagacaaaggcactggggcacctgggtctggcacggtctggagcttggccgcctgggtagcaaccgtgaagggtgtgccagggcgtgcagggactggagtcatcctcccagaactgagagagggccctcggggcatggaggcatcacaagtgctaggcttggcacaggtacaggggagaggttacggagtgggtgtgtgcagggcctggtgggaatggggagacccgtggacagagcttgttagagtgtcctagagccagggggaactccaggcagggcaaattgggccctggatgttgagaagctgggtaacaagtactgagagaacaaaagcttgtgggtcagcaggccccacaaagatgtgactgcagacaggatcggccctgggagagaccgaggctccaggtgactcctatagcaaggcagtgagggggcgggtctggggctccagttcaggaatacatagtcagctgcagccactggggagaggagggtggagagtgaggacagggaaccccaagagcaccagcccctttgccctcacccagggacggctggcaaaataggaggaaggggactgcagctcagagctggtatgaagggctgaggggtggggtcctcccaggcacccataccccaatatgggggtccttacctcctggatgttcacctgg

SEQ ID NO: 36211 - DNA, 1653 bp, Artificial sequence
  DNA replication origin
ttaatccaggaaaccctcccccaacaaaaatctcaggacttaggccccccagaacaaagtccttctgggtcctctcccttccaggaccctctaggcagcccggtcacccccaggccagactccagggcgagtcccctcccaacccagctggcagttcgcgggtaacagaatccaagctattaccctcctcgcctttgggacgctcgctagggatggggctgtccccacgtccaggcctcagagagcggggtcccacttcaggacacccctccaggtgcctccaatacccgcccacctcccaccccgcaggtgtcccaggcgctgatccgctccttcagctccaccgcccggaaccgctttcagaaccgagtgcgcgagaaacagaagctcttccaggtggggggtcggggggggtggggatccgacgcgccagccgggagcgcgccgagccggggcaggcggggcgcgctctaaggagcagccagcacccctttctcatcagacacccccacatccaggaggacaatgacatcccgttgtacctgaagggcggcatcgttgacaacatcctgtaccgagtgacaatgacgctgtgtctgggcggtgagcgcagggcccgtctgggctgcgggggaggcggggctggacccagagtaagaggtggctggtttctgggcaggactgaccaggatctgggttgggggttggcgtttaggaagggggtcgagtactgagctggagtcaggcctgcagggaggggagtaactagggtttgggctcttgtcccaggacgggggctgggttagtggtggggctgaggcccagggaggagtcggggagaaagctcccagcccggtctagatcaaagccagggggctttacaataggagtccaatctgggaagggagctggagtccgaactagagctggggtccaggctgggaaccagggagcctgaaggccttaaaagcctgggatgtccagggaggggattaggtctcattctgtctccaacgcttcccctttctaggcactgtctacagcttgtactcccttggctgggcctccttccccaggaattaagaccaagaagcctggggggcctgagagacttgaacaagtgtcaataaacgctggcctctgtgtgtgtctgtgtttgtgtccacccctccccaccaagcccatcctcccaccagccagggatctctgccctgtggactgcccactgcccccagccctcggtgcctcatgctggaccagggatactcctaggatgttgctacctctcagccctctgctgagtaccccaaacagcacccataggctccccctcgggacccggggacgtggggtggtgtcctcaagtgggaaggaagacactgagcatggtccatgacacaacagaggcagaggccaagtgtggatggagaagctgcaagaggggcaaacatggccttgggggacagggccaggagtggcattgagacctccctccagcccagactctggaagcagaagcagagatcactggggcttctgggtcctgtctcagcctccacagctcaggatgagacaaaaaatgccgacgagaaaaagacgaggaaatccacggatccagccctggggacgaatctactacctcccctgctcccc

SEQ ID NO: 36212 - DNA, 843 bp, Artificial sequence
  DNA replication origin
gctcccggctggcgcgtcggatccccaccccccccgaccccccacctggaagagcttctgtttctcgcgcactcggttctgaaagcggttccgggcggtggagctgaaggagcggatcagcgcctgggacacctgcggggtgggaggtgggcgggtattggaggcacctggaggggtgtcctgaagtgggaccccgctctctgaggcctggacgtggggacagccccatccctagcgagcgtcccaaaggcgaggagggtaatagcttggattctgttacccgcgaactgccagctgggttgggaggggactcgccctggagtctggcctgggggtgaccgggctgcctagagggtcctggaagggagaggacccagaaggactttgttctggggggcctaagtcctgagatttttgttgggggagggtttcctggattaaagggaggaaaccaggtcccgggaacgtggggaccggaatggaggtccccgggagcgtccaggctgcctgagaaggcccgggtgaggccagtgttaagggttcccgagatgtcaagttcaaacccggggctttgggccggggtgggggtccccagttgtctccgaagagtggattgtgggggaagggacccaggctgtttagcggggagtcccaggccctgaaggtggctcacgttccaaggccctagatgcgggggcacttggagagtcgcgtattagggcggggttttctgggtggggggctccggcccagcccatgggggcctcacccgaagggcctgcattctgccttgtcctcttccgccggagtcacctcccttctccgcccaaggacacgcgtagt

SEQ ID NO: 36213 - DNA, 1237 bp, Artificial sequence
  DNA replication origin
tactgaattaccttctattaccagcaacgtcgcttctcaggccttggactacatttcccttgaggctttactggtcgactctctgtctcctcccctccccccgcgaacttggccgcctccttctgtgacgatggagctcttgaggtaagtagtcctttagcgtcagatgacttcaagcttgctggaaggtctggagtggcgacgccctctccgaagactcgtgggcgcaaaaatgtcaaaacgagccaggccccgactcagagataagagaacgccattctgtccgtggccgatctagctctggactacaattcccagagcccacagcggcctgacgttacgtcgttcttgacgtcgtggcgagctagttagctccgcaaggacccggacgcgaccaggggaggcagaaggtgaggggtctgggagtcctgggcggggccggggcgtgtccggagcctcgaatctgtgcgcgcaggcgggagctggctgcggatgcgccgttctgaatgtgtctttgtggctgtgtggctgggtgtgggtgtctgcaactgtgcacgtgtaaccgcctgtctccagggtgtctggtggtttttgtgtaaccatgtgtgatagagagtatcggggtgcagggtccttgtgaccgggggtgatactgcgtgtgtccccgttgtatatgtggcctgttcgccctgttcctggggtgtgagtacagttgtgactgtgtgaccactgcgggtgtgcggttgtgattcatgtctccaaggtgtgtgcgtggttttggttgtgtgacactgtggccgtgtgcaattgcctgtgcctgtgactgtgtggtgacgccgcttgtgtattcctgtatcccttggtgtgtgtgtttgtgtgtatgtgtgtggtgctgtgtatgcgggagtggggtgccactgcttgtgtgggttgcttgtgtgagtgtgactgtgtgtatgtccacagtgaaagttcagttgtgactgggtgccgtaaagtaccagtgatggcgtgtgtcccctgagtgggtgtgtgactgtgactatatgaggcatttgtgggtgttggtgtgtggggcttgtgactatacgggagtaactgtatcacagtggagagtagattgtgtgactgggtgtgtcttagcgggtgtgtgattgtgactggaaagatattgtgactggaaaggtatagaggtgtctgtgattgtgtcctgtgtctcaggagtggatgtagggcc

SEQ ID NO: 36214 - DNA, 2317 bp, Artificial sequence
  DNA replication origin
ctgccctccagagaacaggggacgtttgtccaaagacatacatgcacactcccattcacacacacagccccagcaatttttttcaggggctgcagcctgatccagagcagagcgcagtcagccttggcaaggcgcatacacaaatcgcgagcggatgctcacgtcacagagaccgccaccgttgcctggagatgagttcttcactctctgcgaaggaggagccttctgtagcagcgcatcggctcggggctaagtctagtcctcactggggcgtcgacgggatggtatccggaggccaggattcgcggaggttcgaccaggaggaagaaacctcaggcggagcgtctgggaagcagcgcagtatcccaggctcaggcctgcgtggacggtgtgccggtgagtctccccaaaagtcgtgcccttgcgatctccaggacaggtctgcttgtatgcccaagggctgctctctcaccccagggtcgttgtcgctcagagcagaacccagaggcttcaggggctgcctggagatgaatgttactgtgccactgcagtatgtctgggttgtgtctctttctcttatttctgttttcattctccgtctatcactctctaccagtttccgtccgtgtgtgcgcgggtgcgtgcgtgtgttgggatgcatgggcaatgaagggcggtttcttgtaccttggcctttcttctggtgagtctctcctcgcatctctgtctgggtcatgtggccgggtgtcattcgttttccaggcggttacagtttgggttcgtgaccggtgggcaacgtggggagctacatgagacacggcggggattaaatcagctcccaatcatgagcggcctcattgctagaatcaagacaactacaccccagcaaaggaaaaaattctcacaaaagctcatcataaacctgcttatgcaggtcgaggtgcccatcgacctcactcctctcaatcctctcgcgtgtgccctcactgagaaatctagccacagctcgatacagggacggaaaaggaagccggcaacgggatggggcaaacatctctgtggctccaacgctggccttcgtggccaagtcacccgtttggcactcctccccggatggccgtggtggtggcattgccgccaatcctgcctgggctctggcctctgctctgtcctccctcttgctctgtctgccctgtttctgagaggcctaggggcttgttagtctggctcaatgtcttcaacccagaagacttcccagtccatccgggagaaagttcctgggggtcggtgtcatgattgtttccttctccaaacctctttcagcatgattgggcaggtgtggtgatcctggagctctgggctttcatagctgtctgggacagggaagctttctgggtctctgtggccccgtggtcggtccaggaagagcgggaggcaacccgaccgttcctgacatttgccttctaggaaaggcggtgtggcatgccacctgcacttcctctctgattcttgagggccatcgggttcctctgctcctggggaaagagacttctagcactgaatcttctggctgccacggatgtcagggagccaaagggactgggttttgctgggtgcaggggaggtcgcgtcgggggtacctacccggtcgcggggtgggggtggggtgtagtttgtggaaagctctcggcccctctggcaggcatctctgaatgtggcttggattcgggcgcaggccctgtctcgcaggttttcaggtgcgcttggcttttcctcagctttgttgcggaggtctcccgtggcccccgggcgcacggctggacaccactgtccgtctcgccatcgccccctacggcctcaaagacacctgctcactccatctgcttttggggacgtcggtgccacgtgtggtcacactggctccatctcggactcgcctatgtctgtctttgcacgtgtcgcgggaagcagtgtcggtatgccggagcccccgggccttggagatgaaggcaggccactgctccacccaggaaggagggaggcagtgggctcgtgtgtcagttcattttccgccgacagcacgccttggggctctggggatctttctgtgccccagcgagacccttcccgcctcactgcattgcaaccccattctcgatcacccggtgggatccatcctcggagccgaagaggagtctgcacagcccagccggcaccctgaagctcctcctccactgggaacgaagcagaagaccgatcaaggaggtcctgacggcaggacccctacgggtccgaccctgggtctcccgcaggcccc

SEQ ID NO: 36215 - DNA, 1605 bp, Artificial sequence
  DNA replication origin
agacccttcccgcctcactgcattgcaaccccattctcgatcacccggtgggatccatcctcggagccgaagaggagtctgcacagcccagccggcaccctgaagctcctcctccactgggaacgaagcagaagaccgatcaaggaggtcctgacggcaggacccctacgggtccgaccctgggtctcccgcaggcccctctggcaatcctcttcccacccgccgcctcgggctgcgctgccttcgccgccgcaagcgccgccaccgccgccccggtccccgcaacctgccgcgtcgccgccattttttaaagggtccgcagcctgactctctggggcgaggggcgagtcggcctctccagtgcgcatgcgcgaggccggagccgccgctttggtcacagggatcaccaccgttgccccggggtgagtccctgagactgggccaagtaggaaccctctgtgaccgagcgtcagagtcggggctgagatcagtcctggccagggcattaacaggatggtctcggaggccgggattcgcggagggtcgaccagcagggagaagcctcaggaggaagaaacctcagacggatcgccggggaggcagcgcgggatcccagcctcaggtgtgtgcggacggtgtgcccgtgagtctccccaaaagtggtgcccttgtgatgtcgaggacaggtctgcccgtgtgcccgtgggctgctctctcaccggtgggtcgtagtcgcggagagcagaacccagcagcttcaggggctgcctggggctgggtgttacctgctgtatgtgtgtctgcgtttggggtgtgtgtgtgtgtgtctgtgtgtgtctgtgtgcccacttatgtctctctctgatatctctctctctcccttctcgctctttccatcgctctcttttactatctctgtccatctgtgcctgcgtgtttgctgggacacaggtgccctttgcaccagagggtggtttctcccacgtcagcctttcctgtggtcagcctctccccgggtctctacctgggttgtgtggcccgttggcagacgttttcccggcggttccagtttgggtttgtgaaggcctgggcaacatgggcacctgcgtcggacccgcagggattttcatcccctccctatcctgagcagcctctttgctgggatcaagacgaccacaccccagccaaggacaaagtcctcagaggggctcattgtccacccgcaggagggtgcccacagatcttgaagaagacgcttctcactcctcttgccctttgccctccttgagaaatgtagccacagctcgacacagggacggagaaggaagccggcaacgggatggggcaagcatctctgtggctcaaacgctggccatcttggccaagtcacccgtttggcactcctccccagatggccgtggtggtggcattgccgccaatcctgctggtctctggcctctgctctgtcctccctcttgctctgcctgccctgtttctgagaagcctaggggcttcttagtctggctcaatgtcttcaacccagaactcttcccagtccatccgggagaaagttcctgggggtcggtgtcatgactgtttccttcc

SEQ ID NO: 36216 - DNA, 1432 bp, Artificial sequence
  DNA replication origin
attgaaaggagaaagaggttggagggatagtgagagaagttggagagtaaaaagaggccgcttaccggaagtgaaattggtgagatgtttcttgggctggtgagtctgaggacctgagctcataggtggatctctctcacggagcaaagagcaggaggatgggggattgatctcctaagggaggtcccccgatccgagtcacggcaccaaatttcatgcccgtccatgtgaagagaccaccaaacaggctttgtgtgagcaacatggctgtttatttcaactgggtgcaggtgggctgagtctgaaaagagagtcagcaaagggagatggattaccattagttcttataggttttgggataggtggtgaagttgatagcaatgttttgcggacaggggtcgatctcacaaagtacattctcaagggtggggagaattacaaagaaacatcttaagggtgggggagattacaaagtacattgatcagatagggtggggaaggaacaaatcacaatggtagaatgtcatcagttaaggctattttgatgtcttttgtggatcttcagttacttcagaccatctggtgtatatgttcaagtcacaggggatgcgatggattggcttgggctcagaggcctgacactggccttccaggcaaagtcacccatttggcactcctccctggatggccctggttgtgggattgccgccagtcatgcctgggctctggcctctgctctgtcctccctcttgctctgcctgccctgtttctgagaagcctaggggcttcttggtctgcctcaatgtcttcaacccaaaagacttcccagtccatccgggagaaagttcctgggggtcggtgtcatgattgtttccctctccaaacctctttaagcatgattgggcaggtgtggtgatcctggagctctgggcttctatagctgtctgggacagggaagctttctgggtctctgtggcccaagtgatggctgcgtggtccgtccaggaagagcgggaggcaacccgaccattcctgacatttgccttctaggaaaggcagtgtggcatgccacctgcacttcctctctgattcttgagggccatcgggttcctctgctcctgggaaaagaggcttctagcgctgaatcttctggctgccacggatgtcagggagccaaagggactgggttttgctgggtgcaggggaggtggcatcacgggtacgtacccggtggcagggtgggggtgggagtggggtgaaatttgtggaaacctctcggcccctctggcaggcatccctgaatgtggcttggattcggtcgcaggccctgtctcgcaagttttcagctgcgcttggcttttcttcagctttgtggccgaggtctcccgtggcccacgggcgcacggctggacatcattgtccgtctcgccac

SEQ ID NO: 36217 - DNA, 877 bp, Artificial sequence
  DNA replication origin
aacccagaggtgaaagagcagcccacgggcacacgggcagacctgtcctcgacatcacaagggcaccacttttggggagactcacgggcacaccgtccgcgcacacctgaggctgggatcccgcgctgcctccccggcgatccgtctgaggtttcttcctcctgaggcttctccctgctggtcgaccctccgcgaatcccggcctccggagaccatcctgttaacgccctggccaggactggtctcaggcacgactctgacgcacggtcacacaggtctcctacttggcccagtctcaggaatccaccccggtgcaacggtggtgatcactgacgcaagtggcggctcgggcctcgcgcatgcgcactggagaggccgactctcccctcgctcgggagaggcaggctgcggaccctttaaaaaatggcggcgacacggcaggttgctgggaccggggcggcggtggcggcggtggcgcgcttgcggcggcgggtgggaagaggactgccagaggggcctgcgggagacccagggtcggaccagtaggagtcctgtcctcaggacctccttgatcggtcttctgcttcggttcccggtggaggaggagcttcagggtgccggcttggctgtgcggactcctcttcagatccgactatggatcccaccgggtgatcgggaatggggttgcaatgcagtgaggcgggaagggtctcgctggggcacagaaagatccccagggccgcaaggcgtgctgtcggcggaaaatgaactgacccacgagcccactgcctccctccttcctgggtggagcagtggcctgccttcatctccaaggcccgggggctcgggcatcccgacactgctttccacgacacat

SEQ ID NO: 36218 - DNA, 2644 bp, Artificial sequence
  DNA replication origin
ccttcccgcctcactgcattgcaaccccattcccgatcacccggtgggatccatagtcggatctgaagaggagtccgcacagccaagccggcaccctgaagctcctcctccaccgggaaccgaagcagaagaccgatcaaggaggtcctgaggacaggactcctactggtccgaccctgggtctcccgcaggcccctctggcagtcctcttcccacccgccgccgcaagcgcgccaccgccgccaccgccgccccggtcccagcaacctgccgtgtcgccgccattttttaaagggtccgcagcctgcctctcccgagcgaggggagagtcggcctctccagtgcgcatgcgcgaggcccgagccgccacttgcgtcagtgatcaccaccgttgcaccggggtggattcctgagactgggccaagtaggagacctgtgtgaccgtgcgtcagagtcgtgcctgagaccagtcctggccagggcgttaacaggatggtctccggaggccgggattcgcggagggtcgaccagcagggagaagcctcaggaggaagaaacctcagacggatcgccggggaggcagcgcgggatcccagcctcaggtgtgcgcggacggtgtgcccgtgagtctccccaaaagtggtgcccttgtgatgtcgaggacaggtctgcccgtgtgcccgtgggctgctctttcacctctgggttgtagtcgcggagagcagaacccggcagcttcaggggctgcctggggctgggtgttacctgctgtatgtgtttgtgcttaggggtgtgtgtgtgtgtgtgtgtctgtgtgtctgtgtgcccacttatgtctctctctgatatctctctctctcgcttctcactctttccgtcgctctctgttactatctctgtccgtctgtgcgtgcgtgtttgctgggacacaggtgccctttgcgccggagggtggtttcttgcacatcagcctttcttgtggtcagcctctccccgggtctcttcctgcgtcgtgtggcccgttggcagtcgttttcccggcggttccagtttgggtttgtgaaggcctgggcaacgtgggcacctgcgtcggacccgcaggggttttcatcccctccctatcctgagcagcctctttgctgggatccagacgaacacaccccaaccaaggacgaaggactcagaggggctcattgtccaccagcaggagggtgcccacagatcttgaagaagacgcttctcactcctcttgccctttgccctccttgagaaatctagccacggctcgacacagagacggaggaggaagccggcaacgggatggggcaaacatctctgtgggtcagacgctggccttcgtggccaagtcaccggtttggcactcctccgcggatggccgtggtggtggcattgcggccaatcctgcctgggctctggcctctgctctgtcctccctcttgctccgcctgccctatttctgagaagcctaggggcttcttagtctggctcaatgtcttcaacccagaactcttcccagtacatccgggagaaagttcctgggggtcggtgtcatgattgtttccctctccaaacctctttcagcatgattgggcaggtgtggtgatcctggagctatgggcttccatagctgtctgggacggggaagctttctgagtctccgtgacccaagtgatggctgcgtggccggtccaggaagagcgggaggtaacccgaccgttcctgacatttgccttctaggaaaggtggtgtggcatgccacctgcacttcctctctgattcttgagggccatcgggttcctctgctcctggggaaggaggcttctagcgctgaatcttctggctgccatggatgtcagggagccaaagggactgggttttgctgggtgcaggggaggtggcgtcatgggtacctaccccgtggcggggtgggggtgggagtggggtgaaatttgtggaaacctctcggcccctctggcaggcatccctgaatgtggcttggattcggacgcgggccctgtctcgcaggttttcagctgcccttggcttttcttcagctttgtggctgacgtctcccgtggcccacgggcgcacgcctggacatcactgtccgtctcgtcgtcgccccctacggcctcaaagacacacgctgcctgcatgtgctcttgggggacgacagtgccacatgtggacacactggctccagctcggactcgcctctgtctctctttgcccgtgtcgccggaagccgcgtcgggatgccggagccctcgggccttggagatgaaggcaggcccctgctcctgccaggaaggagggaggcagcgggctcatgggtcggtgcctttgcagccaacagcacgccttgcggccctggggatcttcctgtgccccggcgagaccctttccgcctcactgcattggaaccccattcccgatcacccgctgggatccatcatcggaccccaagaggagtccgcgcagcccagccggcaccccgaagctcctccttcagcgggaaccgaagcagaagagcgatcaaggaggtcctcaccacaggactcctatgggtccgaccctgggtctcccgcaggcccctctggcagtcctcttcccacccgccgcc

SEQ ID NO: 36219 - DNA, 2822 bp, Artificial sequence
  DNA replication origin
ccaggaaggagggaggcagcgggctcatgggtcggtgcctttgcagccaacagcacgccttgcggccctggggatcttcctgtgccccggcgagaccctttccgcctcactgcattggaaccccattcccgatcacccgctgggatccatcatcggaccccaagaggagtccgcgcagcccagccggcaccccgaagctcctccttcagcgggaaccgaagcagaagagcgatcaaggaggtcctcaccacaggactcctatgggtccgaccctgggtctcccgcaggcccctctggcagtcctcttcccacccgccgcctcgggctgcgccttcgccgccgccgccgcaacctccagcaccgccgccccaggccccgcagccgccgcgtcgccgccattttttaaagggtccgcagcctgactctgcgaagtaagggcgggtggagcgggggagtcggcctcgccagcgcgcatgcgcaaggcccgagccgccgcttgggtcacagtgaaagccaccgttgcccggggatgggtccctgacacttggggaagtaggagccctgtgtgatcgtgcgtctgagtctgggctgagaccagtcctggccagggcagttaccaggacggtctccggaggccgggattcgcggagggtccagcagcaggaagaaaccccaggaggaagaaacctcagacagatcgccggcgaggcagcgcgggatcccagcctcaggcgtgcgcggacggtgtgcgggtgagtctccccaaaagtggagcccttgtgatgacgagcacaggtccgcctgcgtgcccgtgggctgctctctcaccggtggctctcagtcgcggagagcagaacccggcagcttcaggggctgcctgcgggtgggtgttccctgctgtacgtgtgtgttcgtcatgggtgtgtgtgtgtgtgtgttggggggggtgcgtctgtgtgtgtgcgcgcgcagtgcctgtctgtgtgtcgacttctgtctctctctcacgtctctctctctctctctctctctctctctccctctccctctctcccttctcgctctttccgtggccctctctttctgtctctgtccgtctgtgtgtgcgtgcgcctcgggacacatgtgccctgtgcgccggagggtgggtttcttgcacgtcggcctttcttctggtcagcctctccccgcgtctctgcctgggtcgtgtggccggttggcagtcgtcgtcccggcggttccagtttgggggtctgtgaaggcctgggcaacgtgggcatcggcgtcggacccgcaggggttttcatcccctccccatccggagcagcctctttgctaggctggatccagacgagcgctccccaaccaaggacaacggcctcccaggcgctcatcgtccacccgcaggagggtgcccgcagagcttcaagaaggtggttgtcacgcctgtcgccctctgccctcatcgagaaatgtagccacagctcgacgcagggacggagaaggaagccggcaaggggatggggcaagcatgtctgtctctcaaaggctggccttcctggctgagtcacccgtttgacactcctccccggatgccggtggtggtggcatggcccccccgtatcctgcctgggctctggcctctgctctgacctccctcttgctgtgtctgccccgtctctgagaagcctggcggcttcttagtgtggctcagtgtcttccacaaagaagacttccccgtccatcagggagaaacctcgtggcggtccgcgtcatgcttgtttccctctccacacctctttctggatgattgggcagctgtggtgatcctggagctctgggcttccatacctgtgtgggacagggaagctctctcggtctccatggcccaagtgatggctgcacgctcggtccaggaagaggcggaggcaagcccaccgctcctgacattggccttctaggaaaggcggtgttgcatcccacctgcacttcctctctgattcttgagagccaaccgcttcctccgctcctggggaaagtgccttctagcaccgaatgttttggctgccacggatgtcagggagccaacgggactgggttttggctgggtgcaggggaggttgcgtcaggggtacctagccggcggcgggctgggggtggggtgtactttgtccaaacctctcggctcctctggcgggcctccctgaacgtggcgtggactcgcgcacaggccctgtctcgcaggttttcaggtgcgcttggcttttcctccgctttgtggggcaggtctccagtggccccccgggcgcacgcctggacatcactgtccgtctcgtcgtcgccccctacggcctcaaagacacacgctgcctgcatgtgctcttgggggacgacagtgccacatgtggacacactggctccagctcggactcgcctctgtctctctttgcccgtgtcgccggaagccgcctcgggttgccggagccctcgggccttggagatgaaggcaggcccctgctcctgccaggaaggagggaggcagtgggctcatgggtcggtgcctttgcagccgacagcacgccttgcggccctggggatcttcctgtgccccggcgagaccctttccgcctcactgcattggaaccccattcccgatcacccgctgggatccatcatcggaccccaagaggagtccgcgcagcccagccggcaccccgaagctcctccttcagcgggaaccgaagcagaagagcgttcaaggaggtcctcaccacaggactcctatgggtccgaccctgggtctcccgcaggcccctctggca

SEQ ID NO: 36220 - DNA, 2822 bp, Artificial sequence
  DNA replication origin
gctcctgccaggaaggagggaggcagtgggctcatgggtcggtgcctttgcagccgacagcacgccttgcggccctggggatcttcctgtgccccggcgagaccctttccgcctcactgcattggaaccccattcccgatcacccgctgggatccatcatcggaccccaagaggagtccgcgcagcccagccggcaccccgaagctcctccttcagcgggaaccgaagcagaagagcgttcaaggaggtcctcaccacaggactcctatgggtccgaccctgggtctcccgcaggcccctctggcagtcctcttcccacccgccgcctcgggctgcgccttcgccgccgccgccgcaacctccagcaccgccgccccaggccccgcagccgccgcgtcgccgccattttttaaagggtccgcagcctgactctgcggagtaagggggggtggagcgggggagtcggcctcgccagcgcgcatgcgcgaggcccgagccgccgcttgggtcacagtgaaagccaccgttgcccggggatgggtccctgacacttggggaagtaggagccctgtgtgatcgtgcgtctgagtctgggctgagaccagtcctggccagggcagttaccaggacggtctccggaggccgggattcgcggagggtccagcagcaggaagaaaccccaggaggaagaaacctcagacagatcgccggcgaggcagcgcgggatcccagcctcaggcgtgcgcggacggtgtgcgggtgagtctccccaaaagtggagcccttgtgatgacgagcacaggtccgcctgcgtgcccgtgggcggctctctcaccgctggctctcagtcgcggagagcagaacccggcagcttcaggggctgcctgcgggagggtgttccctgctgtacgtgtgtgttcgtcatgggtgtgtgtgtttgtgtgttggggggggtgcgtctgtgtgtgtgcgcgcgcagtgcctgtctgtgtgcggacttctgtctctctctcaggtctctctctctctctctctctcccttctcgctctttccgtggccctctctttctgtctctgtccgtctgtgtgtgcgtgcgcctcgggacacatgtgccctgtgcgccggagggtgggtttcttgcacgtcggcctttcttctggtcagcctctccccgcgtctctgcctgggtcgtgtggccggttggcagtcgtcgtcccggcggttccagtttgggggtctgtgaaggcctgggcaacgtgggcatcggcgtcggacccgcaggggttttcatcccctccccatccggagcagcctctttgctaggctggatccagacgagcgctccccaaccaaggacaacggcctcccaggcgctcatcgtccacccgcaggagggtgcccgcagagcttcaagaaggtggttgtcacgcctgtcgccctctgccctcatcgagaaatgtagccacagctcgacgcagggacggagaaggaagccggcaaggggatggggcaagcatgtctgtctctcaaaggctggccttcctggccgagtcacccgtttgacactcctccccggatgccggtggtggtggcatggcccccccgtatcctgcctgggctctggcctctgctctgacctccctcttgctgtgtctgccccgtctctgagaagcctggcggcttcttagtgtggctcagtgtcttccacaaagaagacttccccgtccatcagggagaaacctcgtggcggtccgcgtcatgcttgtttccctctccacacctctttctggatgattgggcagctgtggtgatcctggagctctgggcttccatacctgtgtgggacagggaagctctctcggtctccatggcccaagtgatggctgcacgctcggtccaggaagaggcggaggcaagcccaccgctcctgacattggccttctaggaaaggcggtgttgcatcccacctgcacttcctctctgattcttgagggccaaccgcttcctccgctcctggggaaagtgccttctagcaccgaatcttttggctgccacggatgtcagggagccaacgggactgggttttggctgggtgcaggggaggttgcgtcaggggaacctagccggcggcgggctgggggtggggtgtactttgtccaaacctctcggctcctctggcgggcctccctgaacgtggcgtggactcgcgcacaggccctgtctcgcaggttttcaggtgcgcttggcttttcctccgctttgtggggcaggtctccagtggccccccgggcgcacgcctggacatcactgtccgtctcgtcgtcgccccctacggcctcaaagacacacgctgcctgcatgtgctcttgggggacgacagtgccacatgtggacacactggctccagctcggactcgcctctgtctctctttgcccgtgtcgccggaagccgcctcgggttgccggagccctcgggccttggagatgaaggcaggcccctgctcctgccaggaaggagggaggcagtgggctcatgggtcggtgcctttgcagccgacagcacgccttgcggccctggggatcttcctgtgccccggcgagaccctttccgcctcactgcattggaaccccattcccgatcacacgctgggatccatcatcggaccccaagaggagtccgcgcagcccagccggcaccccgaagctcctccttcagtgggaaccgaagcagaagagcgatcaaggaggtcctcaccacaggactcatgggtccgaccatgggtctcccgcaggcccctctggcagtcctcttcccacccgc

SEQ ID NO: 36221 - DNA, 2864 bp, Artificial sequence
  DNA replication origin
cacgcaggcggacctgtgctcgtcatcacaagggctccacttttggggagactcacccgcacaccgtccgcgcacgcctgaggctgggatcccgcgctgcctcgccggcgatctgtctgaggtttcttcctcctggggtttcttcctgctgctggaccctccgcgaatcccggcctccggagaccgtcctggtaactgccctggccaggactggtctcagcccagactcagacgcacgatcacacagggctcctacttccccaagtgtcagggacccatccccgggcaacggtggctttcactgtgacccaagcggcggctcgggcctcgcgcatgcgcgctggcgaggccgactcccccgctccacccccccttactccgcagagtcaggctgcggaccctttaaaaaatggcggcgacgcggcggctgcggggcctggggcggcggtgctggaggttgcggcggcggcggcgaaggcgcagcccgaggcggcgggtgggaagaggactgccagaggggcctgcgggagacccagggtcggacccataggagtcctgtggtgaggacctccttgatcgctcttctgcttcggttcccactgaaggaggagcttcggggtgccggctgggctgcgcggactcctcttggggtccgatgatggatcccagcgggtgatcgggaatggggttccaatgcagtgaggcggaaagggtctcgccggggcacaggaagatccccagggccgcaaggcgtgctgtcggctgcaaaggcaccgacccatgagcccactgcctccctccttcctggcaggagcaggggcctgccttcatctccaaggcccgagggctccggcaacccgaggcggcttccggcgacacgggcaaagagagacagaggcgagtccgagctggagccagtgtgtccacatgtggcactgtcgtcccccaagagcacatgcaggcagcgtgtgtctttgaggccgtagggggcgacgacgagacggacagtgatgtccaggcgtgcgcccggggggccactggagacctgccccacaaagcggaggaaaagccaagcgcacctgaaaacctgcgagacagggcctgtgcgcgagtccacgccacgttcagggaggcccgccagaggagccgagaggtttggacaaagtacaccccacccccagcccgccgccggctaggtacccctgacgcaacctcccctgcacccagccaaaacccagtcccgttggctccctgacatccgtggcagccaaaacattcggtgctagaaggcactttccccaggagcggaggaagcggttggccctcaagaatcagagaggaagtgcaggtgggatgcaacaccgcctttcctagaaggccaatgtcaggagcggtgggcttgcctccgcctcttcctggaccgagcgtgcagccatcacttgggccatggagaccgagagagcttccctgtcccacacaggtatggaagcccagagctccaggatcaccacagctgcccaatcatccagaaagaggtgtggagagggaaacaatcatgacgcggaccgccacgaggtttctccctgatggacggggaagtcttctttgtggaagacactgagccacactaagaagccgccaggcttctcagagacggggcagacacagcaagagggaggtgagagcagaggccagagcccaggcaggatacgggggggccatgccaccaccaccggcatccggggaggagtgtcaaacgggtgactcggccaggaaggccagcctttgagagacagacatgcttgccccatccccttgccggcttccttctccgtccctgcgtcgagctgtggctacatttctcgatgagggcagagggcgacaggcgtgacaaccaccttcttgaagctctgcgggcaccctcctgcgggtggacgatgagcgcctgggaggccgttgtccttggttggggagcgctcgtctggatccagcctagcaaagaggctgctccggatggggaggggatgaaaacccctgcgggtccgacgccgatgcccacgttgcccaggccttcacagacccccaaactggaaccgccgggacgacgactgccaaccggccacacgacccaggcagagacgcggggagaggctgaccagaagaaaggccgacgtgcaagaaacccaccctccggcgcacagggcacatgtgtcccgaggcgcacgcacacacagacggacagagacagaaagagagggccacggaaagagcgagaagggagagagagagagagagagagagacagagagagagagagagagagagagagacgtgagagagagacagaagtcggcacacagacaggcactgcgcgcgcacacacacagacacacacacagacgcaccccccccaacacacacacacacacacccatgacgaacacacacgtacagcagggaacaccctcccgcaggcagcccctgaagctgccgggttctgctctccgcgactgagagccaccggtgagagagcagcccacgggcacgcaggcggacctgtgctcgtcatcacaagggctccacttttggggagactcacccgcacaccgtccgcgcacgcctgaggctgggatcccgcgctgcctcgccggcgatctgtctgaggtttcttcctcctggggtttcttcctgctgctggaccctccgcgaatcccggcctccggagaccgtcctggtaactgccctggccaggactggtctcagcccagactcagacgcacgatcacacagggctcctacttccccaagtgtcagggacccatccccgggcaacggtggctttcactgtgacccaagcggcggct

SEQ ID NO: 36222 - DNA, 2853 bp, Artificial sequence
  DNA replication origin
acgcaggcggacctgtgctcgtcatcacaagggctccacttttggggagactcacccgcacaccgtccgcgcacgcctgaggctgggatcccgcgctgcctcgccggcgatctgtctgaggtttcttcctcctggggtttcttcctgctgctggaccctccgcgaatcccggcctccggagaccgtcctggtaactgccctggccaggactggtctcagcccagactcagacgtacgatcacacagggctcctacttccccaagtgtcagggacccatccccgggcaacggtggctttcactgtgacccaagcggcggctcgggcctcgcgcatgcgcgctggcgaggccgactcccccgctccacccccccttactccgcagagtcaggctgcggaccctttaaaaaatggcggcgacgcggcggctgcggggcctggggcggcggtgctggaggttgcggcggcggcggcgaaggcgcagcccgaggcggcgggtggggagaggactgccagaggggcctgcgggagacccatggtcggacccatgagtcctgtggtgaggacctccttgatcgctcttctgcttcggttcccactgaaggaggagcttcggggtgccggctgggctgcgcggactcctcttggggtccgatgatggatcccagcgggtgatcgggaatggggttccaatgcagtgaggcggaaagggtctcgccggggcacaggaagatccccagggccgcaaggcgtgctgtcggctgcaaaggcaccgacccatgagcccactgcctccctccttcctggcaggagcaggggcctgccttcatctccaaggcccgagggctccggcaacccgaggcggcttccggcgacacgggcaaagagagacagaggcgagtccgagctggagccagcgtgtccacatgtggcactgtcgtcccccaagagcacatgcaggcagcgtgtgtctttgaggccgtagggggcgacgacgagacggacagtgatgtccaggcgtgcgcccggggggccactggagacctgccccacaaagcggaggaaaagccaagcgcacctgaaaacctgcgagacagggcctgtgcgcgagtccacgccacgttcagggaggcccgccagaggagccgagaggtttggacaaagtacaccccacccccagcccgccgccggctaggtacccctgacgcaacctcccctgcacccagccaaaacccagtcccgttggctccctgacatccgtggcagccaaaagattcggtgctagaaggcactttccccaggagcggaggaagcggttggccctcaagaatcagagaggaagtgcaggtgggatgcaacaccgcctttcctagaaggccaatgtcaggagcggtgggcttgcctccgcctcttcctggaccgagcgtgcagccatcacttgggccatggagaccgagagagcttccctgtcccacacaggtatggaagcccagagctccaggatcaccacagctgcccaatcatccagaaagaggtgtggagagggaaacaagcatgacgcggaccgccacgaggtttctccctgatggacggggaagtcttctttgtggaagacactgagccacactaagaagccgccaggcttctcagagacggggcagacacagcaagagggaggtcagagcagaggccagagcccaggcaggatacgggggggccatgccaccaccaccggcatccggggaggagtgtcaaacgggtgactcggccaggaaggccagcctttgagagacagacatgcttgccccatccccttgccggcttccttctccgtccctgcgtcgagctgtggctacatttctcgatgagggcagagggcgacaggcgtgacaaccaccttcttgaagctctgcgggcaccctcctgcgggtggacgatgagcgcctgggaggccgttgtccttggttggggagcgctcgtctggatccagcctagcaaagaggctgctccggatggggaggggatgaaaacccctgcgggtccgacgccgatgcccacgttgcccaggccttcacagacccccaaactggaaccgccgggacgacgactgccaaccggccacacgacccagacagagacgcggggagaggctgaccagaagaaaggccgacgtgcaagaaacccaccctccggcgcacagggcacatgtgtcccgaggcgcacgcacacacagacggacagagacagaaagagagggccacggaaagagcgagaagggagagagggagagggagagggagagagagagagagagagagagagagagagagagagagagagacgtgagagagagacagaagtcggcacacagacaggcactgcgcgcgcacacacacagacacacacacagacgcaccccccccaacacacacacacacacacccatgacgaacacacacgtacagcagggaacaccctcccgcaggcagcccctgaagctgccgggttctgctctccgcgactgagagccaccggtgagagagcagcccacgggcacgcaggcggacctgtgctcgtcatcacaagggctccacttttggggagactcacccgcacaccgtccgcgcacgcctgaggctgggatcccgcgctgcctcgccggcgatctgtctgaggtttcttcctcctggggtttcttcctgctgctggaccctccgcgaatcccggcctccggagaccgtcctggtaactgccctggccaggactggtctcagcccagactcagacgcacgatcacacagggctcctacttccccaagtgtcagggacccatccccgggcaacggtggctttca

SEQ ID NO: 36223 - DNA, 2838 bp, Artificial sequence
  DNA replication origin
cagcccacgggcacgcaggcggacctgtgctcgtcatcacaagggctccacttttggggagactcacccgcacaccgtccgcgcacgcctgaggctgggatcccgcgctgcctcgccggcgatctgtctgaggtttcttcctcctggggtttcttcctgctgctggaccctccgcgaatcccggcctccggagaccgtcctggtaactgccctggccaggactggtctcagcccagactcagacgcacgatcacacagggctcctacttccccaagtgtcagggacccatccccgggcaacggtggctttcactgtgacccaagcggcggctcgggcctcgcgcatgcgcgctggcgaggccgactcccccgctccacccccccttactccgcagagtcaggctgcggaccctttaaaaaatggcggcgacgcggcggctgcggggcctggggcggcggtgctggaggttgcggcggcggcggcgaaggcgcagcccgaggcggcgggtgggaagaggactgccagaggggcctgcgggagacccatggtcggacccatgagtcctgtggtgaggacctccttgatcgctcttctgcttcggttcccactgaaggaggagcttcggggtgccggctgggctgcgcggactcctcttggggtccgatgatggatcccagcgggtgatcgggaatggggttccaatgcagtgaggcggaaagggtctcgccggggcacaggaagatccccagggccgcaaggcgtgctgtcggctgcaaaggcaccgacccatgagcccactgcctccctccttcctggcaggagcaggggcctgccttcatctccaaggcccgagggctccggcaacccgaggcggcttccggcgacacgggcaaagagagacagaggcgagtccgagctggagccagtgtgtccacatgtggcactgtcgtcccccaagagcacatgcaggcagcgtgtgtctttgaggccgtagggggcgacgacgagacggacagtgatgtccaggcgtgcgcccggggggccactggagacctgccccacaaagcggaggaaaagccaagcgcacctgaaaacctgcgagacagggcctgtgcgcgagtccacgccacgttcagggaggcccgccagaggagccgagaggtttggacaaagtacaccccacccccagcccgccgccggctaggtacccctgacgcaacctcccctgcacccagccaaaacccagtcccgttggctccctgacatccgtggcagccaaaagattcggtgctagaaggcactttccccaggagcggaggaagcggttggccctcaagaatcagagaggaagtgcaggtgggatgcaacaccgcctttcctagaaggccaatgtcaggagcggtgggcttgcctccgcctcttcctggaccgagcgtgcagccatcacttgggccatggagaccgagagagcttccctgtcccacacaggtatggaagcccagagctccaggatcaccacagctgcccaatcatccagaaagaggtgtggagagggaaacaagcatgacgcggaccgccacgaggtttctccctgatggacggggaagtcttctttgtggaagacactgagccacactaagaagccgccaggcttctcagaggcggggcagacacagcaagagggaggtcagagcagaggccagagcccaggcaggatacgggggggccatgccaccaccaccggcatccggggaggagtgtcaaacgggtgactcggccaggaaggccagcctttgagagacagacatgcttgccccatccccttgccggcttccttctccgtccctgcgtcgagctgtggctacatttctcgatgagggcagagggcgacaggcgtgacaaccaccttcttgaagctctgcgggcaccctcctgcgggtggacgatgagcgcctgggaggccgttgtccttggttggggagcgctcgtctggatccagcctagcaaagaggctgctccggatggggaggggatgaaaacccctgcgggtccgacgccgatgcccacgttgcccaggccttcacagacccccaaactggaaccgccgggacgacgactgccaaccggccacacgacccaggcagagacgcggggagaggctgaccagaagaaaggccgacgtgcaagaaacccaccctccggcgcacagggcacatgtgtcccgaggcgcacgcacacacagacggacagagacagaaagagagggccacggaaagagcgagaagggagacagagagagagagagagagagagagagagagagagagagagacgtgagagagagacagaagtcggcacacagacaggcactgcgcgcgcacacacacagacacacacacagacgcacccccccaacacacacacacacacacccatgacgaacacacacgtacagcagggaacaccctcccgcaggcagcccctgaagctgccgggttctgctctccgcgactgagagccaccggtgagagagcagcccacgggcacgcaggcggacctgtgctcgtcatcacaagggctccacttttggggagactcacccgcacaccgtccgcgcacgcctgaggctgggatcccgcgctgcctcgccggcgatctgtctgaggtttcttcctcctggggtttcttcctgctgctggaccctccgcgaatcccggcctccggagaccgtcctggtaactgccctggccaggactggtctcagcccagactcagacgtacgatcacacagggctcctacttccccaagtgtcagggacccatccccgggcaacggt

SEQ ID NO: 36224 - DNA, 2854 bp, Artificial sequence
  DNA replication origin
ctcctgccaggaaggagggaggcagtgggctcatgggtcggtgcctttgcagccgacagcacgccttgcggccctggggatcttcctgtgccccggcgagaccctttccgcctcactgcattggaaccccattcccgatcacccgctgggatccatcatcggaccccaagaggagtccgcgcagcccagccggcaccccgaagctcctccttcagtgggaaccgaagcagaagagcgatcaaggaggtcctcaccacaggactcatgggtccgaccatgggtctcccgcaggcccctctggcagtcctcttcccacccgccgcctcgggctgcgccttcgccgccgccgccgcaacctccagcaccgccgccccaggccccgcagccgccgcgtcgccgccattttttaaagggtccgcagcctgactctgcggagtaagggggggtggagcgggggagtcggcctcgccagcgcgcatgcgcgaggcccgagccgccgcttgggtcacagtgaaagccaccgttgcccggggatgggtccctgacacttggggaagtaggagccctgtgtgatcgtgcgtctgagtctgggctgagaccagtcctggccagggcagttaccaggacggtctccggaggccgggattcgcggagggtccagcagcaggaagaaaccccaggaggaagaaacctcagacagatcgccggcgaggcagcgcgggatcccagcctcaggcgtgcgcggacggtgtgcgggtgagtctccccaaaagtggagcccttgtgatgacgagcacaggtccgcctgcgtgcccgtgggctgctctctcaccggtggctctcagtcgcggagagcagaacccggcagcttcaggggctgcctgcgggagggtgttccctgctgtacgtgtgtgttcgtcatgggtgtgtgtgtgtgtgtgttggggggggtgcgtctgtgtgtgtgtctgtgtgtgtgcgcgcgcagtgcctgtctgtgtgccgacttctgtctctctctcacgtctctctctctctctctctctctctctctctctccctctccctctctcccttctcgctctttccgtggccctctctttctgtctctgtccgtctgtgtgtgcgtgcgcctcgggacacatgtgccctgtgcgccggagggtgggtttcttgcacgtcggcctttcttctggtcagcctctccccgcgtctctgtctgggtcgtgtggccggttggcagtcgtcgtcccggcggttccagtttgggggtctgtgaaggcctgggcaacgtgggcatcggcgtcggacccgcaggggttttcatcccctccccatccggagcagcctctttgctaggctggatccagacgagcgctccccaaccaaggacaacggcctcccaggcgctcatcgtccacccgcaggagggtgcccgcagagcttcaagaaggtggttgtcacgcctgtcgccctctgccctcatcgagaaatgtagccacagctcgacgcagggacggagaaggaagccggcaaggggatggggcaagcatgtctgtctctcaaaggctggccttcctggccgagtcacccgtttgacactcctccccggatgccggtggtggtggcatggcccccccgtatcctgcctgggctctggcctctgctctgacctccctcttgctgtgtctgccccgtctctgagaagcctggcggcttcttagtgtggctcagtgtcttccacaaagaagacttccccgtccatcagggagaaacctcgtggcggtccgcgtcatgattgtttccctctccacacctctttctggatgattgggcagctgtggtgatcctggagctctgggcttccatacctgtgtgggacagggaagctctctcggtctccatggcccaagtgatggctgcacgctcggtccaggaagaggcggaggcaagcccaccgctcctgacattggccttctaggaaaggcggtgttgcatcccacctgcacttcctctctgattcttgagggccaaccgcttcctccgctcctggggaaagtgccttctagcaccgaatcttttggctgccacggatgtcagggagccaacgggactgggttttggctgggtgcaggggaggttgcgtcaggggtacctagccggcggcgggctgggggtggggtgtactttgtccaaacctctcggctcctctggcgggcctccctgaacgtggcgtggactcgcgcacaggccctgtctcgcaggttttcaggtgcgcttggcttttcctccgctttgtggggcaggtctccagtggccccccgggcgcacgcctggacatcactgtccgtctcgtcgtcgccccctacggcctcaaagacacacgctgcctgcatgtgctcttgggggacgacagtgccacatgtggacacgctggctccagctcggactcgcctctgtctctctttgcccgtgtcgccggaagccgcctcgggttgccggagccctcgggccttggagatgaaggcaggcccctgctcctgccaggaaggagggaggcagtgggctcatgggtcggtgcctttgcagccgacagcacgccttgcggccctggggatcttcctgtgccccggcgagaccctttccgcctcactgcattggaaccccattcccgatcacccgctgggatccatcatcggaccccaagaggagtccgcgcagcccagccggcaccccgaagctcctccttcagtgggaaccgaagcagaagagcgatcaaggaggtcctcaccacaggactcctatgggtccgaccctgggtctcccgcaggcccctctggcagtcctcttccca

SEQ ID NO: 36225 - DNA, 2803 bp, Artificial sequence
  DNA replication origin
ccaggaaggagggaggcagtgggctcatgggtcggtgcctttgcagccgacagcacgccttgcggccctggggatcttcctgtgccccggcgagaccctttccgcctcactgcattggaaccccattcccgatcacccgctgggatccatcatcggaccccaagaggagtccgcgcagcccagccggcaccccgaagctcctccttcagtgggaaccgaagcagaagagcgatcaaggaggtcctcaccacaggactcctatgggtccgaccctgggtctcccgcaggcccctctggcagtcctcttcccacccgccgcctcgggctgcgccttcgccgccgccgccgcaacctccagcaccgccgccccaggccccgcagccgccgcgtcgccgccattttttaaagggtccgcagcctgactctgcggagtaagggggggtggagcgggggagtcggcctcgccagcgcgcatgcgcgaggcccgagccgccgcttgggtcacagtgaaagccaccgttgcccggggatgggtccctgacacttggggaagtaggagccctgtgtgatcgtgcgtctgagtctgggctgagaccagtcctggccagggcagttaccaggacggtctccggaggccgggattcgcggagggtccagcagcaggaagaaaccccaggaggaagaaacctcagacagatcgccggcgaggcagcgcgggatcccagcctcaggcgtgcgcggacggtgtgcgggtgagtctccccaaaagtggagcccttgtgatgacgagcacaggtccgcctgcgtgcccgtgggctgctctctcaccggtggctctcagtcgcggagagcagaacccggcagcttcaggggctgcctgcgggagggtgttccctgctgtacgtgtgtgttcgtcatgggtgtgtgtgtgtgtgtgttggggggggtgcgtctgtgtgtgtgtctgtgtgtgtgcgcgcgcagtgcctgtctgtgtgccgacttctgtctctctctcacgtctctctctctctctctctctctctctctctctctctgtctcccttctcgctctttccgtggccctctctttctgtctctgtccgtctgtgtgtgcgtgcgcctcgggacacatgtgccctgtgcgccggagggtgggtttcttgcacgtcggcctttcttctggtcagcctctccccgcgtctctgcctgggtcgtgtggccggttggcagtcgtcgtcccggcggttccagtttgggggtctgtgaaggcctgggcaacgtgggcatcggcgtcggacccgcaggggttttcatcccctccccatccggagcagcctctttgctaggctggatccagacgagcgctccccaaccaaggacaacggcctcccaggcgctcatcgtccacccgcaggagggtgcccgcagagcttcaagaaggtggttgtcacgcctgtcgccctctgccctcatcgagaaatgtagccacagctcgacgcagggacggagaaggaagccggcaaggggatggggcaagcatgtctgtctctcaaaggctggccttcctggccgagtcacccgtttgacactcctccccggatgccggtggtggtggcatggcccccccgtatcctgcctgggctctggcctctgctctgacctccctcttgctgtgtctgccccgcctctgagaagcctggcggcttcttagtgtggctcagtgtcttccacaaagaagacttccccgtccatcagggagaaacctcgtggcggtccgcgtcatgattgtttccctctccacacctctttctggatgattgggcagctgtggtgatcctggagctctgggcttccatacctgtgtgggacagggaagctctctcggtctccatggcccaagtgatggctgcacgctcggtccaggaagaggcggaggcaagcccaccgctcctgacattggccttctaggaaaggcggtgttgcatcccacctgcacttcctctctgattcttgagggccaaccgcttcctccgctcctggggaaagtgccttctagcaccgaatcttttggctgccacggatgtcagggagccaacgggactgggttttggctgggtgcaggggaggttgcgtcaggggtacctagccggcggcgggctgggggtggggtgtactttgtccaaacctctcggctcctctggcgggcctccctgaacgtggcgtggactcgcgcacaggccctgtctcgcaggttttcaggtgcgcttggcttttcctccgctttgtggggcaggtctccagtggccccccgggcgcacgcctggacatcactgtccgtctcgtcgtcgccccctacggcctcaaagacacacgctgcctgcatgtgctcttgggggacgacagtgccacatgtggacacactggctccagctcggactcgcctctgtctctctttgcccgtgtcgccggaagccgcctcgggttgccggagccctcgggccttggagatgaaggcaggcccctgctcctgccaggaaggagggaggcagtgggctcatgggtcggtgcctttgcagccgacagcacgccttgcggccctggggatcttcctgtgccccggcgagaccctttccgcctcactgcattggaaccccattcccgatcacccgctgggatccatcatcggaccccaagaggagtccgcgcagcccagccggcaccccgaagctcctccttcagtgggaaccgaagcagaagagcgatcaaggaggtcctcaccacaggactcatgggtccgacc

SEQ ID NO: 36226 - DNA, 2840 bp, Artificial sequence
  DNA replication origin
cacgggcacgcaggcggacctgtgctcgtcatcacaagggctccacttttggggagactcacccgcacaccgtccgcgcacgcctgaggctgggatcccgcgctgcctcgccggcgatctgtctgaggtttcttcctcctggggtttcttcctgctgctggaccctccgcgaatcccggcctccggagaccgtcctggtaactgccctggccaggactggtctcagcccagactcagacgcacgatcacacagggctcctacttccccaagtgtcagggacccatccccgggcaacggtggctttcactgtgacccaagcggcggctcgggcctcgcgcatgcgcgctggcgaggccgactcccccgctccacccccccttactccgcagagtcaggctgcggaccctttaaaaaatggcggcgacgcggcggctgcggggcctggggcggcggtgctggaggttgcggcggcggcggcgaaggcgcagcccgaggcggcgggtgggaagaggactgccagaggggcctgcgggagacccagggtcggacccataggagtcctgtggtgaggacctccttgatcgctcttctgcttcggttcccactgaaggaggagcttcggggtgccggctgggctgcgcggactcctcttggggtccgatgatggatcccagcgggtgatcgggaatggggttccaatgcagtgaggcggaaagggtctcgccggggcacaggaagatccccagggccgcaaggcgtgctgtcggctgcaaaggcaccgacccatgagcccactgcctccctccttcctggcaggagcaggggcctgccttcatctccaaggcccgagggctccggcaacccgaggcggcttccggcgacacgggcaaagagagacagaggcgagtccgagctggagccagtgtgtccacatgtggcactgtcgtcccccaagagcacatgcaggcagcgtgtgtctttgaggccgtagggggcgacgacgagacggacagtgatgtccaggcgtgcgcccggggggccactggagacctgccccacaaagcggaggaaaagccaagcgcacctgaaaacctgcgagacagggcctgtgcgcgagtccacgccacgttcagggaggcccgccagaggagccgagaggtttggacaaagtacaccccacccccagcccgccgccggctaggtacccctgacgcaacctcccctgcacccagccaaaacccagtcccgttggctccctgacatccgtggcagccaaaagattcggtgctagaaggcactttccccaggagcggaggaagcggttggccctcaagaatcagagaggaagtgcaggtgggatgcaacaccgcctttcctagaaggccaatgtcaggagcggtgggcttgcctccgcctcttcctggaccgagcgtgcagccatcacttgggccatggagaccgagagagcttccctgtcccacacaggtatggaagcccagagctccaggatcaccacagctgcccaatcatccagaaagaggtgtggagagggaaacaatcatgacgcggaccgccacgaggtttctccctgatggacggggaagtcttctttgtggaagacactgagccacactaagaagccgccaggcttctcagagacggggcagacacagcaagagggaggtcagagcagaggccagagcccaggcaggatacgggggggccatgccaccaccaccggcatccggggaggagtgtcaaacgggtgactcggccaggaaggccagcctttgagagacagacatgcttgccccatccccttgccggcttccttctccgtccctgcgtcgagctgtggctacatttctcgatgagggcagagggcgacaggcgtgacaaccaccttcttgaagctctgcgggcaccctcctgcgggtggacgatgagcgcctgggaggccgttgtccttggttggggagcgctcgtctggatccagcctagcaaagaggctgctccggatggggaggggatgaaaacccctgcgggtccgacgccgatgcccacgttgcccaggccttcacagacccccaaactggaaccgccgggacgacgactgccaaccggccacacgacccaggcagagacgcggggagaggctgaccagaagaaaggccgacgtgcaagaaacccaccctccggcgcacagggcacatgtgtcccgaggcgcacgcacacacagacggacagagacagaaagagagggccacggaaagagcgagaagggagacagagagagagagagagagagagagagagagagagagagagagacgtgagagagagacagaagtcggcacacagacaggcactgcgcgcgcacacacacagacacacacacagacgcacccccccaacacacacacacacacacccatgacgaacacacacgtacagcagggaacaccctcccgcaggcagcccctgaagctgccgggttctgctctccgcgactgagagccaccggtgagagagcagcccacgggcacgcaggcggacctgtgctcgtcatcacaagggctccacttttggggagactcacccgcacaccgtccgcgcacgcctgaggctgggatcccgcgctgcctcgccggcgatctgtctgaggtttcttcctcctggggtttcttcctgctgctggaccctccgcgaatcccggcctccggagaccgtcctggtaactgccctggccaggactggtctcagcccagactcagacgtacgatcacacagggctcctacttccccaagtgtcagggacccatccccgggcaacggtggc

SEQ ID NO: 36227 - DNA, 2843 bp, Artificial sequence
  DNA replication origin
ctgtgctcgtcatcacaagggctccacttttggggagactcacccgcacaccgtccgcgcacgcctgaggctgggatcccgcgctgcctcgccggcgatctgtctgaggtttcttcctcctggggtttcttcctgctgctggaccctccgcgaatcccggcctccggagaccgtcctggtaactgccctggccaggactggtctcagcccagactcagacgtacgatcacacagggctcctacttccccaagtgtcagggacccatccccgggcaacggtggctttcactgtgacccaagcggcggctcgggcctcgcgcatgcgcgctggcgaggccgactcccccgctccacccccccttactccgcagagtcaggctgcggaccctttaaaaaatggcggcgacgcggcggctgcggggcctggggcggcggtgctggaggttgcggcggcggcggcgaaggcgcagcccgaggcggcgggtggggagaggactgccagaggggcctgcgggagacccagggtcggacccatgagtcctgtggtgaggacctccttgatcgctcttctgcttcggttcccactgaaggaggagcttcggggtgccggctgggctgcgcggactcctcttggggtccgatgatggatcccagcgggtgatcgggaatggggttccaatgcagtgaggcggaaagggtctcgccggggcacaggaagatccccagggccgcaaggcgtgctgtcggctgcaaaggcaccgacccatgagcccactgcctccctccttcctggcaggagcaggggcctgccttcatctccaaggcccgagggctccggcaacccgaggcggcttccggcgacacgggcaaagagagacagaggcgagtccgagctggagccagtgtgtccacatgtggcactgtcgtcccccaagagcacatgcaggcagcgtgtgtctttgaggccgtagggggcgacgacgagacggacagtgatgtccaggcgtgcgcccggggggccactggagacctgccccacaaagcggaggaaaagccaagcgcacctgaaaacctgcgagacagggcctgtgcgcgagtccacgccacgttcagggaggcccgccagaggagccaagaggtttggacaaagtacaccccacccccagcccgccgccggctaggtacccctgacgcaacctcccctgcacccagccaaaacccagtcccgttggctccctgacatccgtggcagccaaaagattcggtgctagaaggcactttccccaggagcggaggaagcggttggccctcaagaatcagagaggaagtgcatgtgggatgcaacaccgcctttcctagaaggccaatgtcaggagcggtgggcttgcctccgcctcttcctggaccgagcgtgcagccatcacttgggccatggagaccgagagagcttccctgtcccacacaggtatggaagcccagagctccaggatcaccacagctgcccaatcatccagaaagaggtgtggagagggaaacaatcatgacgcggaccgccacgaggtttctccctgatggacggggaagtcttctttgtggaagacactgagccacactaagaagccgccaggcttctcagaggcggggcagacacagcaagagggaggtcagagcagaggccagagcccaggcaggatacgggggggccatgccaccaccaccggcatccggggaggagtgtcaaacgggtgactcggccaggaaggccagcctttgagagacagacatgcttgccccatccccttgccggcttccttctccgtccctgcgtcgagctgtggctacatttctcgatgagggcagagggcgacaggcgtgacaaccaccttcttgaagctctgcgggcaccctcctgcgggtggacgatgagcgcctgggaggccgttgtccttggttggggagcgctcgtctggatccagcctagcaaagaggctgctccggatggggaggggatgaaaacccctgcgggtccgacgccgatgcccacgttgcccaggccttcacagacccccaaactggaaccgccgggacgacgactgccaaccggccacacgacccaggcagagacgcggggagaggctgaccagaagaaaggccgacgtgcaagaaacccaccctccggcgcacagggcacatgtgtcccgaggcgcacgcacacacagacggacagagacagaaagagagggccacggaaagagcgagaagggagacagagagagagagagagagagagagagagagagagagagagacgtgagagagagacagaagtcggcacacagacaggcactgcgcgcgcacacacacagacacacacacagacgcaccccccccaacacacacacacacacacccatgacgaacacacacgtacagcagggaacaccctcccgcaggcagcccctgaagctgccgggttctgctctccgcgactgagagccaccggtgagagagcagcccacgggcacgcaggcggacctgtgctcgtcatcacaagggctccacttttggggagactcacccgcacaccgtccgcgcacgcctgaggctgggatcccgcgctgcctcgccggcgatctgtctgaggtttcttcctcctggggtttcttcctgctgctggaccctccgcgaatcccggcctccggagaccgtcctggtaactgccctggccaggactggtctcagcccagactcagacgcacgatcacacagggctcctacttccccaagtgtcagggacccatccccgggcaacggtggctttcactgtgacccaagcggcggct

SEQ ID NO: 36228 - DNA, 2826 bp, Artificial sequence
  DNA replication origin
ggcagtgggctcatgggtcggtgcctttgcagccgacagcacgccttgcggccctggggatcttcctgtgccccggcgagaccctttccgcctcactgcattggaaccccattcccgatcacccgctgggatccatcatcggaccccaagaggagtccgcgcagcccagccggcaccccgaagctcctccttcagtgggaaccgaagcagaagagcgatcaaggaggtcctcaccacaggactcatgggtccgaccctgggtctcccgcaggcccctctggcagtcctctccccacccgccgcctcgggctgcgccttcgccgccgccgccgcaacctccagcaccgccgccccaggccccgcagccgccgcgtcgccgccattttttaaagggtccgcagcctgactctgcggagtaagggggggtggagcgggggagtcggcctcgccagcgcgcatgcgcgaggcccgagccgccgcttgggtcacagtgaaagccaccgttgcccggggatgggtccctgacacttggggaagtaggagccctgtgtgatcgtacgtctgagtctgggctgagaccagtcctggccagggcagttaccaggacggtctccggaggccgggattcgcggagggtccagcagcaggaagaaaccccaggaggaagaaacctcagacagatcgccggcgaggcagcgcgggatcccagcctcaggcgtgcgcggacggtgtgcgggtgagtctccccaaaagtggagcccttgtgatgacgagcacaggtccgcctgcgtgcccgtgggctgctctctcaccggtggctctcagtcgcggagagcagaacccggcagcttcaggggctgcctgcgggagggtgttccctgctgtacgtgtgtgttcgtcatgggtgtgtgtgtgtgtgtgttgggggggtgcgtctgtgtgtgtgtctgtgtgtgtgcgcgcgcagtgcctgtctgtgtgccgacttctgtctctctctcacgtctctctctctctctctctctctctctctctctctgtctcccttctcgctctttccgtggccctctctttctgtctctgtccgtctgtgtgcgtgcgcctcgggacacatgtgccctgtgcgccggagggtgggtttcttgcacgtcggcctttcttctggtcagcctctccccgcgtctctgcctgggtcgtgtggccggttggcagtcgtcgtcccggcggttccagtttgggggtctgtgaaggcctgggcaacgtgggcatcggcgtcggacccgcaggggttttcatcccctccccatccggagcagcctctttgctaggctggatccagacgagcgctccccaaccaaggacaacggcctcccaggcgctcatcgtccacccgcaggagggtgcccgcagagcttcaagaaggtggttgtcacgcctgtcgccctctgccctcatcgagaaatgtagccacagctcgacgcagggacggagaaggaagccggcaaggggatggggcaagcatgtctgtctctcaaaggctggccttcctggccgagtcacccgtttgacactcctccccggatgccggtggtggtggcatggcccccccgtatcctgcctgggctctggcctctgctctgacctccctcttgctgtgtctgccccgcctctgagaagcctggcggcttcttagtgtggctcagtgtcttccacaaagaagacttccccgtccatcagggagaaacctcgtggcggtccgcgtcatgattgtttccctctccacacctctttctggatgattgggcagctgtggtgatcctggagctctgggcttccatacctgtgtgggacagggaagctctctgggtctccatggcccaagtgatggctgcacgctcggtccaggaagaggcggaggcaagcccaccgctcctgacattggccttctaggaaaggcggtgttgcatcccacctgcacttcctctctgattcttgagggccaaccgcttcctccgctcctggggaaagtgccttctagcaccgaatcttttggctgccacggatgtcagggagccaacgggactgggttttggctgggtgcaggggaggttgcgtcaggggtacctagccggcggcgggctgggggtggggtgtactttgtccaaacctctcggctcctctggcgggcctccctgaacgtggcgtggactcgcgcacaggccctgtctcgcaggttttcaggtgcgcttggcttttcctccgctttgtggggcaggtctccagtggccccccgggcgcacgcctggacatcactgtccgtctcgtcgtcgccccctacggcctcaaagacacacgctgcctgcatgtgctcttgggggacgacagtgccacatgtggacacactggctccagctcggactcgcctctgtctctctttgcccgtgtcgccggaagccgcctcgggttgccggagccctcgggccttggagatgaaggcaggcccctgctcctgccaggaaggagggaggcagtgggctcatgggtcggtgcctttgcagccgacagcacgccttgcggccctggggatcttcctgtgccccggcgagaccctttccgcctcactgcattggaaccccattcccgatcacccgctgggatccatcatcggaccccaagaggagtccgcgcagcccagccggcaccccgaagctcctccttcagtgggaaccgaagcagaagagcgatcaaggaggtcctcaccacaggactcctatgggtccgaccctgggtctcccgcaggcccctctggcagtcctcttcccaccc

SEQ ID NO: 36229 - DNA, 2861 bp, Artificial sequence
  DNA replication origin
gagatgaaggcaggcccctgctcctgccaggaaggagggaggcagtgggctcatgggtcggtgcctttgcagccgacagcacgccttgcggccctggggatcttcctgtgccccggcgagaccctttccgcctcactgcattggaaccccattcccgatcacccgctgggatccatcatcggaccccaagaggagtccgcgcagcccagccggcaccccgaagctcctccttcagtgggaaccgaagcagaagagcgatcaaggaggtcctcaccacaggactcctatgggtccgaccctgggtctcccgcaggcccctctggcagtcctcttcccacccgccgcctcgggctgcgccttcgccgccgccgccgcaacctccagcaccgccgccccaggccccgcagccgccgcgtcgccgccattttttaaagggtccgcagcctgactctgcggagtaagggggggtggagcgggggagtcggcctcgccagcgcgcatgcgcgaggcccgagccgccgcttgggtcacagtgaaagccaccgttgcccggggatgggtccctgacacttggggaagtaggagccctgtgtgatcgtgcgtctgagtctgggctgagaccagtcctggccagggcagttaccaggacggtctccggaggccgggattcgcggagggtccagcagcaggaagaaaccccaggaggaagaaacctcagacagatcgccggcgaggcagcgcgggatcccagcctcaggcgtgcgcggacggtgtgcgggtgagtctccccaaaagtggagcccttgtgatgacgagcacaggtccgcctgcgtgcccgtgggctgctctctcaccggtggctctcagtcgcggagagcagaacccggcagcttcaggggctgcctgcgggagggtgttccctgctgtacgtgtgtgttcgtcatgggtgtgtgtgtgtgtgtgttggggggggtgcgtctgtgtgtgtgtctgtgtgtgtgcgcgcgcagtgcctgtctgtgtgccgacttctgtctctctctcacgtctctctctctctctctctctctctctgtctcccttctcgctctttccgtggccctctctttctgtctctgtccgtctgtgtgtgcgtgcgcctcgggacacatgtgccctgtgcgccggagggtgggtttcttgcacgtcggcctttcttctggtcagcctctccccgcgtctctgcctgggtcgtgtggccggttggcagtcgtcgtcccggcggttccagtttgggggtctgtgaaggcctgggcaacgtgggcatcggcgtcggacccgcaggggttttcatcccctccccatccggagcagcctctttgctaggctggatccagacgagcgctccccaaccaaggacaacggcctcccaggcgctcatcgtccacccgcaggagggtgcccgcagagcttcaagaaggtggttgtcacgcctgtcgccctctgccctcatcgagaaatgtagccacagctcgacgcagggacggagaaggaagccggcaaggggatggggcaagcatgtctgtctctcaaaggctggccttcctggccgagtcacccgtttgacactcctccccggatgccggtggtggtggcatggcccccccgtatcctgcctgggctctggcctctgctctgacctccctcttgctgtgtctgccccgcctctgagaagcctggcggcttcttagtgtggctcagtgtcttccacaaagaagacttccccgtccatcagggagaaacctcgtggcggtccgcgtcatgattgtttccctctccacacctctttctggatgattgggcagctgtggtgatcctggagctctgggcttccatacctgtgtgggacagggaagctctctgggtctccatggcccaagtgatggctgcacgctcggtccaggaagaggcggaggcaagcccaccgctcctgacattggccttctaggaaaggcggtgttgcatcccacctgcacttcctctctgattcttgagggccaaccgcttcctccgctcctggggaaagtgccttctagcaccgaatcttttggctgccacggatgtcagggagccaacgggactgggttttggctgggtgcaggggaggttgcgtcaggggtacctagccggcggcgggctgggggtggggtgtactttgtccaaacctctcggctcctctggcgggcctccctgaacgtggcgtggactcgcgcacaggccctgtctcgcaggttttcaggtgcgcttggcttttcctccgctttgtggggcaggtctccagtggccccccgggcgcacgcctggacatcactgtccgtctcgtcgtcgccccctacggcctcaaagacacacgctgcctgcatgtgctcttgggggacgacagtgccacatgtggacacgctggctccagctcggactcgcctctgtctctctttgcccgtgtcgccggaagccgcctcgggttgccggagccctcgggccttggagatgaaggcaggcccctgctcctgccaggaaggagggaggcagtgggctcatgggtcggtgcctttgcagccgacagcacgccttgcggccctggggatcttcctgtgccccggcgagaccctttccgcctcactgcattggaaccccattcccgatcacccgctgggatccatcatcggaccccaagaggagtccgcgcagcccagccggcaccccgaagctcctccttcagtgggaaccgaagcagaagagcgatcaaggaggtcctcaccacaggactcctatgggtccgaccctgggtctcccgcaggcccctctggcagtcctcttcccac

SEQ ID NO: 36230 - DNA, 2854 bp, Artificial sequence
  DNA replication origin
ctgctcctgccaggaaggagggaggcagtgggctcatgggtcggtgcctttgcagccgacagcacgccttgcggccctggggatcttcctgtgccccggcgagaccctttccgcctcactgcattggaaccccattcccgatcacccgctgggatccatcatcggaccccaagaggagtccgcgcagcccagccggcaccccgaagctcctccttcagtgggaaccgaagcagaagagcgatcaaggaggtcctcaccacaggactcctatgggtccgaccctgggtctcccgcaggcccctctggcagtcctcttcccacccgccgcctcgggctgcgccttcgccgccgccgccgcaacctccagcaccgccgccccaggccccgcagccgccgcgtcgccgccattttttaaagggtccgcagcctgactctgcggagtaacggggggtggagcgggggagtcggcctcgccagcgcgcatgcgcgaggcccgagccgccgcttgggtcacagtgaaagccaccgttgcccggggatgggtccctgacacttggggaagtaggagccctgtgtgatcgtgcgtctgagtctgggctgagaccagtcctggccagggcagttaccaggacggtctccggaggccgggattcgcggagggtccagcagcaggaagaaaccccaggaggaagaaacctcagacagatcgccggcgaggcagcgcgggatcccagcctcaggcgtgcgcggacggtgtgcgggtgagtctccccaaaagtggagcccttgtgatgacgagcacaggtccgcctgcgtgcccgtgggctgctctctcaccggtggctctcagtcgcggagagcagaacccggcagcttcaggggctgcctgcgggagggtgttccctgctgtacgtgtgtgttcgtcatgggtgtgtgtgtgtgtgtgttggggggggtgcgtctgtgtgtgtgtctgtgtgtgtgcgcgcgcagtgcctgtctgtgtgccgacttctgtctctctctcacgtctctctctctctctctctctctctctctctctctctctgtctcccttctcgctctttccgtggccctctctttctgtctctgtccgtctgtgtgtgcgtgcgcctcgggacacatgtgccctgtgcgccggagggtgggtttcttgcacgtcggcctttcttctggtcagcctctccccgcgtctctgcctgggtcgtgtggccggttggcagtcgtcgtcccggcggttccagtttgggggtctgtgaaggcctgggcaacgtgggcatcggcgtcggacccgcaggggttttcatcccctccccatccggagcagcctctttgctaggctggatccagacgagcgctccccaaccaaggacaacggcctcccaggcgctcatcgtccacccgcaggagggtgcccgcagagcttcaagaaggtggttgtcacgcctgtcgccctctgccctcatcgagaaatgtagccacagctcgacgcagggacggagaaggaagccggcaaggggatggggcaagcatgtctgtctctcaaaggctggccttcctggccgagtcacccgtttgacactcctccccggatgccggtggtggtggcatggcccccccgtatcctgcctgggctctggcctctgctctgacctccctcttgctgtgtctgccccgcctctgagaagcctggcggcttcttagtgtggctcagtgtcttccacaaagaagacttccccgtccatcagggagaaacctcgtggcggtccgcgtcatgattgtttccctctccacacctctttctggatgattgggcagctgtggtgatcctggagctctgggcttccatacctgtgtgggacagggaagctctctgggtctccatggcccaagtgatggctgcacgctcggtccaggaagaggcggaggcaagcccaccgctcctgacattggccttctaggaaaggcggtgttgcatcccacctgcacttcctctctgattcttgagggccaaccgcttcctccgctcctggggaaagtgccttctagcaccgaatcttttggctgccacggatgtcagggagccaacgggactgggttttggctgggtgcaggggaggttgcgtcaggggtacctagccggcggcgggctgggggtggggtgtactttgtccaaacctctcggctcctctggcgggcctccctgaacgtggcgtggactcgcgcacaggccctgtctcgcaggttttcaggtgcgcttggcttttcctccgctttgtggggcaggtctccagtggccccccgggcgcacgcctggacatcactgtccgtctcgtcgtcgccccctacggcctcaaagacacacgctgcctgcatgtgctcttgggggacgacagtgccacatgtggacacgctggctccagctcggactcgcctctgtctctctttgcccgtgtcgccggaagccgcctcgggttgccggagccctcgggccttggagatgaaggcaggcccctgctcctgccaggaaggagggaggcagtgggctcatgggtcggtgcctttgcagccgacagcacgccttgcggccctggggatcttcctgtgccccggcgagaccctttccgcctcactgcattggaaccccattcccgatcacccgctgggatccatcatcggaccccaagaggagtccgcgcagcccagccggcaccccgaagctcctccttcagtgggaaccgaagcagaagagcgatcaaggaggtcctcaccacaggactcctatgggtccgaccctgggtctcccgcaggcccctctggcagtcctcttccc

SEQ ID NO: 36231 - DNA, 2851 bp, Artificial sequence
  DNA replication origin
ctgccaggaaggagggaggcagtgggctcatgggtcggtgcctttgcagccgacagcacgccttgcggccctggggatcttcctgtgccccggcgagaccctttccgcctcactgcattggaaccccattcccgatcacccgctgggatccatcatcggaccccaagaggagtccgcgcagcccagccggcaccccgaagctcctccttcagtgggaaccgaagcagaagagcgatcaaggaggtcctcaccacaggactcctatgggtccgaccctgggtctcccgcaggcccctctggcagtcctcttcccacccgccgcctcgggctgcgccttcgccgccgccgccgcaacctccagcaccgccgccccaggccccgcagccgccgcgtcgccgccattttttaaagggtccgcagcctgactctgcggagtaagggggggtggagcgggggagtcggcctcgccagcgcgcatgcgcgaggcccgagccgccgcttgggtcacagtgaaagccaccgttgcccggggatgggtccctgacacttggggaagtaggagccctgtgtgatcgtgcgtctgagtctgggctgagaccagtcctggccagggcagttaccaggacggtctccggaggccgggattcgcggagggtccagcagcaggaagaaaccccaggaggaagaaacctcagacagatcgccggcgaggcagcgcgggatcccagcctcaggcgtgcgcggacggtgtgcgggtgagtctccccaaaagtggagcccttgtgatgacgagcacaggtccgcctgcgtgcccgtgggctgctctctcaccggtggctctcagtcgcggagagcagaacccggcagcttcaggggctgcctgcgggagggtgttccctgctgtacgtgtgtgttcgtcatgggtgtgtgtgtgtgtgtgttggggggggtgcgtctgtgtgtgtgtctgtgtgtgtgcgcgcgcagtgcctgtctgtgtgccgacttctgtctctctctcacgtctctctctctctctctctctctctctctctctctctctgtctcccttctcgctctttccgtggccctctctttctgtctctgtccgtctgtgtgtgcgtgcgcctcgggacacatgtgccctgtgcgccggagggtgggtttcttgcacgtcggcctttcttctggtcagcctctccccgcgtctctgcctgggtcgtgtggccggttggcagtcgtcgtcccggcggttccagtttgggggtctgtgaaggcctgggcaacgtgggcatcggcgtcggacccgcaggggttttcatcccctccccatccggagcagcctctttgctaggctggatccagacgagcgctccccaaccaaggacaacggcctcccaggcgctcatcgtccacccgcaggagggtgcccgcagagcttcaagaaggtggttgtcacgcctgtcgccctctgccctcatcgagaaatgtagccacagctcgacgcagggacggagaaggaagccggcaaggggatggggcaagcatgtctgtctctcaaaggctggccttcctggccgagtcacccgtttgacactcctccccggatgccggtggtggtggcatggcccccccgtatcctgcctgggctctggcctctgctctgacctccctcttgctgtgtctgccccgtctctgagaagcctggcggcttcttagtgtggctcagtgtcttccacaaagaagacttccccgtccatcagggagaaacctcgtggcggtccgcgtcatgattgtttccctctccacacctctttctggatgattgggcagctgtggtgatcctggagctctgggcttccatacctgtgtgggacagggaagctctctcggtctccatggcccaagtgatggctgcacgctcggtccaggaagaggcggaggcaagcccaccgctcctgacattggccttctaggaaaggcggtgttgcatcccacctgcacttcctctctgattcttgagggccaaccgcttcctccgctcctggggaaagtgccttctagcaccgaatcttttggctgccacggatgtcagggagccaacgggactgggttttggctgggtgcaggggaggttgcgtcaggggtacctagccggcggcgggctgggggtggggtgtactttgtccaaacctctcggctcctctggcgggcctccctgaacgtggcgtggactcgcgcacaggccctgtctcgcaggttttcaggtgcgcttggcttttcctccgctttgtggggcaggtctccagtggccccccgggcgcacgcctggacatcactgtccgtctcgtcgtcgccccctacggcctcaaagacacacgctgcctgcatgtgctcttgggggacgacagtgccacatgtggacacactggctccagctcggactcgcctctgtctctctttgcccgtgtcgccggaagccgcctcgggttgccggagccctcgggccttggagatgaaggcaggcccctgctcctgccaggaaggagggaggcagtgggctcatgggtcggtgcctttgcagccgacagcacgccttgcggccctggggatcttcctgtgccccggcgagaccctttccgcctcactgcattggaaccccattcccgatcacccgctgggatccatcatcggaccccaagaggagtccgcgcagcccagccggcaccccgaagctcctccttcagtgggaaccgaagcagaagagcgatcaaggaggtcctcaccacaggactcctatgggtccgaccctgggtctcccgcaggcccctctggcagtcctcttcccacc

SEQ ID NO: 36232 - DNA, 2844 bp, Artificial sequence
  DNA replication origin
cctgccaggaaggagggaggcagtgggctcatgggtcggtgcctttgcagccgacagcacgccttgcggccctggggatcttcctgtgccccggcgagaccctttccgcctcactgcattggaaccccattcccgatcacccgctgggatccatcatcggaccccaagaggagtccgcgcagcccagccggcaccccgaagctcctccttcagtgggaaccgaagcagaagagcgatcaaggaggtcctcaccacaggactcctatgggtccgaccctgggtctcccgcaggcccctctggcagtcctcttcccacccgccgcctcgggctgcgccttcgccgccgccgccgcaacctccagcaccgccgccccaggccccgcagccgccgcgtcgccgccattttttaaagggtccgcagcctgactctgcggagtaagggggggtggagcgggggagtcggcctcgccagcgcgcatgcgcgaggcccgagccgccgcttgggtcacagtgaaagccaccgttgcccggggatgggtccctgacacttggggaagtaggagccctgtgtgatcgtgcgtctgagtctgggctgagaccagtcctggccagggcagttaccaggacggtctccggaggccgggattcgcggagggtccagcagcaggaagaaaccccaggaggaagaaacctcagacagatcgccggcgaggcagcgcgggatcccagcctcaggcgtgcgcggacggtgtgcgggtgagtctccccaaaagtggagcccttgtgatgacgagcacaggtccgcctgcgtgcccgtgggctgctctctcaccggtggctctcagtcgcggagagcagaacccggcagcttcaggggctgcctgcgggagggtgttccctgctgtacgtgtgtgttcgtcatgggtgtgtgtgtgtgtgtgttgggggggtgcgtctgtgtgtgtgtctgtgtgtgtgcgcgcgcagtgcctgtctgtgtgccgacttctgtctctctctcacgtctctctctctctctctctctctctctctctctctctgtctcccttctcgctctttccgtggccctctctttctgtctctgtccgtctgtgtgtgcgtgcgcctcgggacacatgtgccctgtgcgccggagggtgggtttcttgcacgtcggcctttcttctggtcagcctctccccgcgtctctgcctgggtcgtgtggccggttggcagtcgtcgtcccggcggttccagtttgggggtctgtgaaggcctgggcaacgtgggcatcggcgtcggacccgcaggggttttcatcccctccccatccggagcagcctctttgctaggctggatccagacgagcgctccccaaccaaggacaacggcctcccaggcgctcatcgtccacccgcaggagggtgcccgcagagcttcaagaaggtggttgtcacgcctgtcgccctctgccctcatcgagaaatgtagccacagctcgacgcagggacggagaaggaagccggcaaggggatggggcaagcatgtctgtctctcaaaggctggccttcctggccgagtcacccgtttgacactcctccccggatgccggtggtggtggcatggcccccccgtatcctgcctgggctctggcctctgctctgacctccctcttgctgtgtctgccccgtctctgagaagcctggcggcttcttagtgtggctcagtgtcttccacaaagaagacttccctgtccatcagggagaaacctcgtggcggtccgcgtcatgattgtttccctctccacacctctttctggatgattgggcagctgtggtgatcctggagctctgggcttccatacctgtgtgggacagggaagctctctcggtctccatggcccaagtgatggctgcacgctcggtccaggaagaggcggaggcaagcccaccgctcctgacattggccttctaggaaaggcggtgttgcatcccacctgcacttcctctctgattcttgagggccaaccgcttcctccgctcctggggaaagtgccttctagcaccgaatcttttggctgccacggatgtcagggagccaacgggactgggttttggctgggtgcaggggaggttgcgtcaggggtacctagccggcggcgggctgggggtggggtgtactttgtccaaacctctcggctcctctggcgggcctccctgaacgtggcgtggactcgcgcacaggccctgtctcgcaggttttcaggtgcgcttggcttttcctccgctttgtggggcaggtctccagtggccccccgggcgcacgcctggacatcactgtccgtctcgtcgtcgccccctacggcctcaaagacacacgctgcctgcatgtgctcttgggggacgacagtgccacatgtggacacactggctccagctcggactcgcctctgtctctctttgcccgtgtcgccggaagccgcctcgggttgccggagccctcgggccttggagatgaaggcaggcccctgctcctgccaggaaggagggaggcagtgggctcatgggtcggtgcctttgcagccgacagcacgccttgcggccctggggatcttcctgtgccccggcgagaccctttccgcctcactgcattggaaccccattcccgatcacccgctgggatccatcatcggaccccaagaggagtccgcgcagcccagccggcaccccgaagctcctccttcagtgggaaccgaagcagaagagcgatcaaggaggtcctcaccacaggactcatgggtccgaccatgggtctcccgcaggcccctctggcagtcctctcccc

SEQ ID NO: 36233 - DNA, 2842 bp, Artificial sequence
  DNA replication origin
gctcctgccaggaaggagggaggcagtgggctcatgggtcggtgcctttgcagccgacagcacgccttgcggccctggggatcttcctgtgccccggcgagaccctttccgcctcactgcattggaaccccattcccgatcacccgctgggatccatcatcggaccccaagaggagtccgcgcagcccagccggcaccccgaagctcctccttcagtgggaaccgaagcagaagagcgatcaaggaggtcctcaccacaggactcatgggtccgaccatgggtctcccgcaggcccctctggcagtcctctccccacccgccgcctcgggctgcgccttcgccgccgccgccgcaacctccagcaccgccgccccaggccccgcagccgccgcgtcgccgccattttttaaagggtccgcagcctgactctgcggagtaagggggggtggagcgggggagtcggcctcgccagcgcgcatgcgcgaggcccgagccgccgcttgggtcacagtgaaagccaccgttgcccggggatgggtccctgacacttggggaagtaggagccctgtgtgatcgtgcgtctgagtctgggctgagaccagtcctggccagggcagttaccaggacggtctccggaggccgggattcgcggagggtccagcagcaggaagaaaccccaggaggaagaaacctcagacagatcgccggcgaggcagcgcgggatcccagcctcaggcgtgcgcggacggtgtgcgggtgagtctccccaaaagtggagcccttgtgatgacgagcacaggtccgcctgcgtgcccgtgggctgctctctcaccggtggctctcagtcgcggagagcagaacccggcagcttcaggggctgcctgcgggagggtgttccctgctgtacgtgtgtgttcgtcatgggtgtgtgtgtgtgtgtgttggggggggtgcgtctgtgtgtgtgcgcgcgcagtgcctgtctgtgtgccgacttctgtctctctctcacgtctctctctctctctctctctctctctctctctgtctcccttctcgctctttccgtggccctctctttctgtctctgtccgtctgtgtgtgcgtgcgcctcgggacacatgtgccctgtgcgccggagggtgggtttcttgcacgtcggcctttcttctggtcagcctctccccgcgtctctgcctgggtcgtgtggccggttggcagtcgtcgtcccggcggttccagtttgggggtctgtgaaggcctgggcaacgtgggcatcggcgtcggacccgcaggggttttcatcccctccccatccggagcagcctctttgctaggctggatccagacgagcgctccccaaccaaggacaacggcctcccaggcgctcatcgtccacccgcaggagggtgcccgcagagcttcaagaaggtggttgtcacgcctgtcgccctctgccctcatcgagaaatgtagccacagctcgacgcagggacggagaaggaagccggcaaggggatggggcaagcatgtctgtctctcaaaggctggccttcctggccgagtcacccgtttgacactcctccccggatgccggtggtggtggcatggcccccccgtatcctgcctgggctctggcctctgctctgacctccctcttgctgtgtctgccccgtctctgagaagcctggcggcttcttagtgtggctcagtgtcttccacaaagaagacttccccgtccatcagggagaaacctcgtggcggtccgcgtcatgattgtttccctctccacacctctttctggatgattgggcagctgtggtgatcctggagctctgggcttccatacctgtgtgggacagggaagctctctcggtctccatggcccaagtgatggctgcacgctcggtccaggaagaggcggaggcaagcccaccgctcctgacattggccttctaggaaaggcggtgttgcatcccacctgcacttcctctctgattcttgagggccaaccgcttcctccgctcctggggaaagtgccttctagcaccgaatcttttggctgccacggatgtcagggagccaacgggactgggttttggctgggtgcaggggaggttgcgtcaggggtacctagccggcggcgggctgggggtggggtgtactttgtccaaacctctcggctcctctggcgggcctccctgaacgtggcgtggactcgcgcacaggccctgtctcgcaggttttcaggtgcgcttggcttttcctccgctttgtggggcaggtctccagtggccccccgggcgcacgcctggacatcactgtccgtctcgtcgtcgccccctacggcctcaaagacacacgctgcctgcatgtgctcttgggggacgacagtgccacatgtggacacactggctccagctcggactcgcctctgtctctctttgcccgtgtcgccggaagccgcctcgggttgccggagccctcgggccttggagatgaaggcaggcccctgctcctgccaggaaggagggaggcagtgggctcatgggtcggtgcctttgcagccgacagcacgccttgcggccctggggatcttcctgtgccccggcgagaccctttccgcctcactgcattggaaccccattcccgatcacccgctgggatccatcatcggaccccaagaggagtccgcgcagcccagccggcaccccgaagctcctccttcagtgggaaccgaagcagaagagcgatcaaggaggtcctcaccacaggactcatgggtccgaccatgggtctcccgcaggcccctctggcagtcctcttcccacccgccgcctc

SEQ ID NO: 36234 - DNA, 2816 bp, Artificial sequence
  DNA replication origin
cctgtgctcgtcatcacaagggctccacttttggggagactcacccgcacaccgtccgcgcacgccagaggctgggatcccgcgctgcctcgccggcgatctgtctgaggtttcttcctcctggggtttcttcctgctgctggaccctccgcgaatcccggcctccggagaccgtcctggtaactgccctggccaggactggtctcagcccagactcagacgcacgatcacacagggctcctacttccccaagtgtcagggacccatccccgggcaacggtggctttcactgtgacccaagcggcggctcgggcctcgcgcctgcgcgctggcgaggccgactccccccgctccacccccccttactccgcagagtcaggctgcggaccctttaaaaaatggcggcgacgcggcggctgcggggcctggggcggcggtgctggaggttgcggcggcggcggcggcggcgcagcccgaggcgacgggtgggaagaggactgccagaggggcctgcgggagacccagggtcggacccataggagtcctgtggtgaggacctccttgatcgctcttctgcttccgttcccgctgaaggaggagcttcggggtgccggctgggctgcgcggactcctcttggggtccgacgatggatcccagcgggtgatcgggaatggggttccaatgcagtgaggcggaaagggtctcgccggggcacaggaagatccccagggccgcaaggcgtgctgtcggctgcaaaggcaccgacccatgagcccactgcctccctccttcctggcaggagcaggggcctgccttcatctccaaggcccgagggctccggcatcccgacgcggcttccggcgacacgggcaaagagagacagaggcgagtccgagctggagccagcgtgtccacatgtggcactgtcgtcccccaagagcacatgcaggcagcgtgtgtctttgaggccgtagggggcgacgacgagacggacagtgatgtccaggcgtgcgcccggggggccactggagacctgccccacaaagcggaggaaaagccaagcgcacctgaaaacctgcgagacagggcctgtgcgcgagtccacgccacgttcagggaggcccgccagaggagccgagaggtttggacaaagtacaccccacccccagcccgccgccggctaggtacccctgacgcaacctcccctgcacccggccaaaacccagtcccgttggctccctgacatccgtggcagccaaaagattcggtgctagaaggcactttccccaggagcggaggaagcggttggccctcaagaatcagagaggaagtgcaggtgggatgcaacaccgcctttcctagaaggccaatgtcaggagcggtgggcttgcctccgcctcttcctggaccgagcgtgcagccatcacttgggccatggagaccgagagagcttccctgtcccacacaggtatggaagcccagagctccaggatcaccacagctgcccaatcatccagaaagaggtgtggagagggaaacaatcatgacgcggaccgccacgaggtttctccctgatggacggggaagtcttctttgtggaagacactgagccacactaagaagccgccaggcttctcagaggcggggcagacacagcaagagggaggtcagagcagaggccagagcccaggcaggatacgggggggccatgccaccaccaccggcatccggggaggagtgtcaaacgggtgactcggccaggaaggccagcctttgagagacagacatgcttgccccatccccttgccggcttccttctccgtccctgcgtcgagctgtggctacatttctcgatgagggcagagggcgacaggcgtgacaaccaccttcttgaagctctgcgggcaccctcctgcgggtggacgatgagcgcctgggaggccgttgtccttggttggggagcgctcgtctggatccagcctagcaaagaggctgctccggatggggaggggatgaaaacccctgcgggtccgacgccgatgcccacgttgcccaggccttcacagacccccaaactggaaccgccgggacgacgactgccaaccggccacacgacccaggcagagacgcggggagaggctgaccagaagaaaggccgacgtgcaagaaacccaccctccggcgcacagggcacatgtgtcccgaggcgcacgcacacacagacggacagagacagaaagagagggccacggaaagagcgagaagggagacagagagagagagagagagagagagagagagagagacgtgagagagagacagaagtcggcacacagacaggcactgcgcgcgcacacacacagacacacacacagacgcacccccccaacacacacacacacacacccatgacgaacacacacgtacagcagggaacaccctcccgcaggcagcccctgaagctgccgggttctgctctccgcgactgagagccaccggtgagagagcagcccacgggcacgcaggcggacctgtgctcgtcatcacaagggctccacttttggggagactcacccgcacaccgtccgcgcacgcctgaggctgggatcccgcgctgcctcgccggcgatctgtctgaggtttcttcctcctggggtttcttcctgctgctggaccctccgcgaatcccggcctccggagaccgtcctggtaactgccctggccaggactggtctcagcccagactcagacgtacgatcacacagggctcctacttccccaagtgtcagggacccatccccgggcaacggtggct

SEQ ID NO: 36235 - DNA, 1139 bp, Artificial sequence
  DNA replication origin
cccctgctcctgccaggaaggagggaggcagtgggctcatgggtcggtgcctttgcagccgacagcacgccttgcggccctggggatcttcctgtgccccggcgagaccctttccgcctcactgcattggaaccccattcccgatcacccgctgggatccatcgtcggaccccaagaggagtccgcgcagcccagccggcaccccgaagctcctccttcagcgggaacggaagcagaagagcgatcaaggaggtcctcaccacaggactcctatgggtccgaccctgggtctcccgcaggcccctctggcagtcctcttcccacccgtcgcctcgggctgcgccgccgccgccgccgccgcaacctccagcaccgccgccccaggccccgcagccgccgcgtcgccgccattttttaaagggtccgcagcctgactctgcggagtaagggggggtggagcggggggagtcggcctcgccagcgcgcaggcgcgaggcccgagccgccgcttgggtcacagtgaaagccaccgttgcccggggatgggtccctgacacttggggaagtaggagccctgtgtgatcgtgcgtctgagtctgggctgagaccagtcctggccagggcagttaccaggacggtctccggaggccgggattcgcggagggtccagcagcaggaagaaaccccaggaggaagaaacctcagacagatcgccggcgaggcagcgcgggatcccagcctctggcgtgcgcggacggtgtgcgggtgagtctccccaaaagtggagcccttgtgatgacgagcacaggtccgcctgtgtgcccgtgggctgctctctcaccggtggctcgtagtcgcgtaaagcagaagtagcagtttcagcggctgacactaagaacaatgcatactggcaaagtgaggtgtctcacatctttaatcccagcagtttgggaggctgaggcggatggatcacttgaggtcaggggatcacaccagcctaaccaacatgatgaaactccgcgtctactaaaaaaaagtaccagacagttagcgcggtgtggtggcatatgcctgtaaatcccagctatttgggaggctgaggcaggagaatcggttgaaccagtgtggccgaggttgca

SEQ ID NO: 36236 - DNA, 1387 bp, Artificial sequence
  DNA replication origin
ccacccaggagcgcgccagggacagactcgcagcgccgtcctcgctcacagggctccctagttggcactatagagaggcggtcgcgggcgcccctctttaacgcgccagccatctgtccccgctcccctccaggccctgccgcgccgtccccaggcgctaagggactcgaagcgcagcctcgctgggacggacctagctccggctccgggttcacgcagagcaggggctgcaccagcgagcggacccttgagactggccgcgcctgcgcactccgtgagcgcgcccggccctcccagcagcctccgcgcgcagcccgttaggccccggggattgtggcgtgacccggcagcggcttcctccgttcgggcatcgctgtgcctcgggttcgcgccccgagtgagcagtcctggcccggagcgtcggtcctggtaatctgtaggaaaagcgctgcggcccagggggtaaagagaggtaagcggggccactgcagtatcgcagaggggcgggagcccgcgcctcaggcccgggtgtgtgtgtcgtgggcgtgacggggccggggctgggacgtgacggagtctgtgcggctgacttgggtgcagagactattgtatgagcgaaggttgttgtggccgtggagtgcgtgactgaccccagcatcctctgcccacaccgggcccagctgcagagaaatggccctcggtcagtttctgcacgccaaagactcccagcagaaacgcgcagactaggccggaccaggtggctcacatctgtaatcccagagctctgggagagcgaggcgggaggatcgctggaagccaggagttcgagaccagcctgggcagcaaagcgaaactcccatctgtaccagaaatttaaaaaatgagccgggtgtgatggcgtgctcctgtggtcccagccactcgagaggctgaggcgggaggatggcttgagcctaggaggagattgaggctgcagcgagctatgatagcaccactactctccagcctgggcaacagcgaaacaaggctcagacccgaccttgggataggaatattagaactgaacgagcccccgctcccgcccaggcttgctcctggaagggactcccacaccacctcctcgcggacccggacccacgcacgtgcactcacaactctgaagagtccagctgcaggtttcagaaccacagcattgcttccaggaagctattgtgaactccagttctagccccgggcatccatgaccctggcctttctttgatactgggaagagttaacaacaccatctctcttatgttactctggttatgtgtgggtgggcggtgggggcattgtgccctatgcgaggctgggctgcaagaaaagcctggttcccttattagccagt

SEQ ID NO: 36237 - DNA, 940 bp, Artificial sequence
  DNA replication origin
gcggctggccgggcagaggggctcctcaattcccagtaggggtggccaggcagaggcgcccctcgcctcccggacggggcggctggccgggcgggggactgacccccccacctccctcccgaacggggcggctggccgggcggggggctgacccccccacctccctcccggacggggcggctggcctggcgggggtgacccccacctccctcccggatggggtggctgccgggcggagacgctcctcacttcccagacggggtggctgccggacggaggggctcctcacttctcagacggggcggctgccgggcggaggggctcctcacttctcagacggggcggttgccaggcagagggtctcacttctcagacggggcggccgggcagagacgctcctcacctcccagacggggtcgcggccaggcagaggcgttcctcacatcccagacggggcggcggggcagaggcgctccccacatcccagacgatgggcggcctggcagagacgctcctcactttccagactgggcagccaggcagaggggctcctcacatcccagacgatgggcggccaggcagagaagctcctcacttcccagatggggtggcggcggggcagaggctgcaatctcggctctttggggggccaaagcaggcggctgggaggaggttgtagcgagccgagatcacgccactgcactccagcctgggcaccattgagcactgagtgaacaagactccgtctgcaatcccggcacctcgggaggccgaggctggcggaccactcgcggttaggagctggagaccagcccggccaacacagcgaaaccctgtgtttggtggagaccaaaaaaatacgaaaaccagtcaggcgtggcggcgcgcgcctgcaatcgcaggcactcggcaggctgaggcaggagaatcaggcagggag

SEQ ID NO: 36238 - DNA, 1001 bp, Artificial sequence
  DNA replication origin
tctctgcccggccgccccgtctgagaagtgagaccctctgcctggcaaccgccccgtctgagaagtgaggagcccctccgcccggcagccgccccgtctgagaagtgaggagcccctccgtccggcagccaccccgtctgggaagtgaggagcgtctccgcccggcagccaccccatccgggagggaggtgggggtcacccccgccaggccagccgccccgtccgggagggaggtgggggggtcagccccccgcccggccagccgccccgttcgggagggaggtgggggggtcagtcccccgcccggccagccgccccgtccgggaggcgaggggcgcctctgcctggccacccctactgggaattgaggagcccctctgcccggccagccgccccgtccgggagggaggtgggggggggtcagccccccgcccggccagcctctccgtccgggaggtgaggggcgcctctgcccggccgcccctactgggaagtgaggagcccctctgcctggccacgaccccatctgggaggtgtacccaacagctcattgagaacgggccatgatgacaatggcggtgttgtggaatagaaaggcgggaaaggtggggaaaagattgagaaatcggatggttgccgtgtctgtgtagaaagacgtagatatgggagtcttttcattttgttctgtactaagaaaaattcttctgccttgggatcctgttgatctgtgaccttacccccaaccctgtgctctctgaaacatgtgctgtgtccactcagggttaaatggattaagggcggtgcaagatgtgctttgttaaacagatgcttgaaggcagcatgctcgttaagagtcatcaccactccctaatcttaagtacccagggacacaaacactgccgaaggccgcagggtcctctgcctaggaaaaccagagacctttgttcacttgtttatctgctgacattccctccactatcgtcctatgaccctgccaaatc

SEQ ID NO: 36239 - DNA, 1042 bp, Artificial sequence
  DNA replication origin
gtcacagccggaagagaagctgccctaaccaacccgtcaggcgccaatgggaggtgcctccgggctgtgagaggctggcggaggcgggacctgcagatccagagagcccgggcacagagcctgttactgccagacgctgaggcgttgccgtgggaaccaagggcctttcgggtcagatcagagcctttctcagacaattctttcggtaactggcgagctcctgtccagcgcacgcctctatgaaggcctagtgtgccgtctgccgcggagtcttctttggtctgagagccacttgtttcttacatccctgcgctaatctcgccgtctgctcctacctaacccaggcatttgccgcatgctggtcctctatttcctcacaggcgggccgtctctccagcttctgggaggacagttcaaattacggaggagggggcaggtgcagggcagtggggctgaggggagtaggggggagttgggggagcaggggctcatttttctttgtagctcagattcctaggcctgtgactttgagaatcggtgtcttccttgcagtattttaatctgaggctcctggggagaggacagagttggagccggatggaagcgtggtgggtgtaaggaacatggagaatgtgtcaggcggtgtctttattcctggcacattactttgcctgctggagtttcccagtctgttccaggcgcactctctcgaccctgaagggacctgagcggggatgttggtcgccagtgtgtgctcccctggactggattggaattggttccacaaactttttttttttttttttttgagggagtctcactctgtcacccaggctggagtgcagtggcgccatctcggctcaccgcaacttccgcctcccggattcaagccattctcccgcctcagcctccgggtagctgggattacaggcgcatgccatcacgcccgtctaatttttgtattttcagtagagacagggtttcatcacgttggctaagccggtctcgaacttctgaccccaagtgatccgcccgcctcggc

SEQ ID NO: 36240 - DNA, 1343 bp, Artificial sequence
  DNA replication origin
gttccggcgggtccccgcaccggccccagctcctcccccgcacctgcctggccggcgggtcccaccctctctcctgccaggggtagaccctgggaccactcagctcgctctcgcaggccctgagcgtctgacgcctgcgcactgagcgcgggcgggcgggcactcccagaaacctccggggcgctgcaggcgggacaagcaggttccacaggccgagcccacgagcccctcgaggggtgagcggcccgggcctcctggcgttctggccggctagccaagcgctggactacatttcccagaggcacggcgtccggagcgctggactacatttcccagaggcaccgctcccggagcgtagcttcatttccgttagtttgcgagatttggaggcctcgcgtggggagagggccgcgtctgtggaggagcttggctccgcacctgctgggctggcgaacccgaaattgggcttggaacccgggagccagatcttggaccctgaactgcacctctgtcaaggtaggagtgtccgggatgccggagcggacacgcgcggagaaagcgtcgctggggttactcgtgtggccgtgtctccggttttgtgtgcaggctacagcctgcctggtattggcgactgcctgtgcatacacgactggacgtgtgtggctgtggttttgtgtatgagcatttgtatgagtgtgagttgtgactctgagggtgtttgtgactgtttgcttacctggctgggatatacttatgtgactgtgattttatgtgtgccgcgtgtataattggggtttgcctgtgactatgaagtgtgtgacagttgtgacaagagtgtttggatgttcttgtgtcactttgaggttgtgtgtaaacctgatatcgtgggatggatttgccagtaaatttaaggtgtgtgacagtgttgctgtgacacggtgtttattaccgcgtgtttccctgatttcgtactgggttgggtgactgtctgattgtgtgtgactgtggggttgtgtgtgctgttttcatgactgtgtaaagagactaaaattgcagctttgaaagggtgtttttggcggtatgtgtctctgacaaggtgcttggatgtaattatatgccttgtacttaatgggattttgtttgagacaaggtggtctaacaatgtagcataattgggtgattgtgcctctagctgtgtaactgtggaaatgtgattatgtgtgactttatgtggccatttgtatattctgtgaccttatgggggtttagtccagtacagaagtaaatttctttttggtatttctggggttcatttggggctgaggtctgcctatggattgtga

SEQ ID NO: 36241 - DNA, 1312 bp, Artificial sequence
  DNA replication origin
cgttctgcactgagtcggcttggggcaggaagtcatttaagcgacctccttccacttgccccagcgcctcaccccttcctgctctagactacagttcccaaaaatccttgcggctctagtcaacatctggcccgaagctggcgaccttttcctgtttctcagggaactccctggggttggccggtaccatggaggaagattgtcttcagcgtgcagggccagcgtcctacggcagtttcactctgagcctgtgtctggatcacggagacgcggggtagcggttcggagtgcggagcagggatgtccccgagctgtgcagctgcaagaacccgaaaaaacaggcgccatcttctcggcgcggtcctactccggactgtatttcccagaggcccccgcgagtccagggcagccccttcatttgcctgctggaccctccgcctcaagggtaggggaagtgcgcggtgagcggcctgggtcttgcaggctcggctggggcccgcaggtacgtgcatgggagtttgaagggactgaccaggctggtctggagtgttgggcatgtatgagtgtgtcgggcatgtatgagttggtcgggctgatagagggggtggtggggaggcgggcgcgaggcgtgggcttccgtgtgtgagtgtgaccttatgtgactgtgcctctctgtgtgcgcgggtgtgattgtatatcctcgttgtagttgtgtaattgtaacaatgtaaggctgtatgtgtaggtatgactgtgtcccgtgttgggactgtgattgtgtgtggctgtgtaactttgcgtgacatttgtggagggtgtttgtgtggagagaatctgatgaggctgtgactgtgtgttagtctgaggggtgtgtgtaattgtgtttgtatgactgttagcagcacttaagtgtactggatgccttactgagtaaatctactacccagaaataacccagtaacgtgagaatgtgagagtgtgaccatgtaactttatgtagcactgtgtctgcggttggaaagtgcgtgtaatcgtgccggggtgatatgtgtgtcctagtggtcattgtgttattttgaatgtgtgattgtgtgtagtgctcaataggggtcctggggaggggggaactgtaactttgtgtggctcagtagtgcgtgtggtattgtgactatctgtagcactctggttctgaatggtgctatgtttgaggggtctgtaaatatgctagtgtaacttatcctcaaggtagatgtgggacaatgattgtgtgaccatatatagtgttattgtttgggtgaggcgtgcctgtgga

SEQ ID NO: 36242 - DNA, 1000 bp, Artificial sequence
  DNA replication origin
ttgcggccctggggatctttctgtgccccggcgagaccctttcggcctcactgcattggaaccccattcccgatcacccggttggatccatcatcggaccccaagaggagtccgcgcagcccagccggcatcccgaaactcctccttcagcgggaaccgaagcagaagagcgatcaaggaggtcctcaccacaggactcctatgggtccgaccctgggtctcccgcaggcccctctggcagtcctcttcccacccgccgcctctggctgtgccgccgccgccgccgacgcaacctccagcaccgccgccccaggccccgcagccgccgcgtcgccgccattttttaaagggtccgcagcctgactctgcggagtaagggggggtggagcgggggagtcggcctcgccagtgcgcatgcgcgaggcccgagccgccgcttgggccacagtgaaagccaccgttgcccggggatgggtccctgacacttggcgaagtagcagccctgtgtgatcgtgcgtctgagtctgggctgagaccagtcctggccagggtagttaccaggacggtctccggaggccgggattcgcggagggtccaccagcaggaagaaaccccaggaggaagaaacctcagacagatcgccggcgaggcagcgcgggatcccagcctcaggcgtgcgcggacggtgtgcgggtgagtctccccaaaagtggagcccttgtgatgacgagcacaggtccgcctgtgtgcccgtgggctgctctctcaccggtggctcgtagtcgcgtaacgcagaagtagcagtttcagcggctgacactaagaacaatgcatactggcaaagtgaggtgtctcacatctttaatcccagcaatttgggaggctgaggcggatggatcacttgaggtcaggggatcacaccagcctaaccaacatgatgaaactccgcgtctactaaaaaaaagtaccagacagttagcgcggtgtggtggcatatgcc

SEQ ID NO: 36243 - DNA, 2836 bp, Artificial sequence
  DNA replication origin
catgggtcggtgcctttgcagccgacagcacgccttgcggccctggggatctttctgtgccccggcgagaccctttcggcctcactgcattggaaccccattcccgatcacccggttggatccatcatcggaccccaagaggagtccgcgcagcccagccggcatcccgaagctcctcctttcgcgggaaccgaagcagaagagcgatcaaggaggtcctcaccacaggactcctatgggtccgaccctgggtctcccgcaggcccctctggcagtcctcttcccacccgccgcctcgggctgcgccgccaccgccgccgccgcaacctccagcaccgccgccccaggccccgcagccgccgcgtcgccgccattttttaaagggtccgcagcctgactctgcggagtaaggggggctggagcggggggagtcggcctcgccagtgcgcatgcgcgaggcccaagccgccgcttgggtcaaagtgaaagccaccgttgcccggggatgggtccctgacacttggcgaagtaggagccctgtgtgatcgtgcgtctgagtctgggctgagaccagtcctggccagggcagttaccaggacggtctccggaggccgggattcgcggagggtccaccagcaggaagaaaccccaagaggaagaaacctcagacagatcgccggcgaggcagcgcgggatcccagcctcaggcgtgcgcggacggtgtgcgggtgagtctccccaaaagtggagcccttgtgatgacgagcacaggtccgcctgtgtgcccgtgggctgctctctcaccggtggctcttagtcgcggagagcagaacccggcagcttcaggggctgcctgcgggtgggtgttccctgctgtacgtgtgtgttcgttatgggtgtgtgtgtgtgtgttggggggatgcgtctgtgtgtttgtctgtgtgtgtgcgcgcgcagtgcgtgtctgtgtgccgacttctgtctctctctcacgtctctctctctctctctctctctctctctctctctctctctttgtctctctcccttctcgctctttcggtcgccctctctttctgtctctgtccgtctgtgtgtgcgtgcgccttgggacacatgggccctgtgcgccggagggtgggtttcttgcacgtcggcctttcttctggtcagcgtgtccccgcgtctctgcctgggtcgtgtggccggttggcagtcgtggtcccggcagttccagtttgggggtctgtgaaggcctgggcaacgtgggcatcggcgtcgaacccgcaggggttttcatcccctccccatccggagcagcctctttgctaggctggatccagacgagcgctccccaaccaaggacaacggcctcccaggcgctcattgtccacccgcaggagggtgcccgcagagcttcaagaaggtggttgtcacgcctgtcgccctctgccctcatcgagaaatgtagccacagctcgacgcagggacggagaaggaagccggcaaggggatggggcaagcatgtctgtctctcaaaggctggccttcctggccgagtcacccgtttgacactcctccccggatgccggtggtggtggcatggcccccccgtatcctgcctgggctctggcctctgctctgacctccctcttgctgtgtctgccccgtctctgagaagcctggcggcttcttagcgtggctcagtgtcttccacaaagaagacttccccgtccatcagggagaaacctcgtggcggtccgcgtcatgattgtttccctctccacacctctttctggatgattgggcagctgtggtgatcctggagctctgggcttccatacctgtgtgggacagggaagctctctcggtctccatggcccaagtgatggctgcacgctcggtccaggaagaggcggaggcaagcccaccgctcctgacattggccttctaggaaaggcggtgttgcatcccacctgcacttcctctctgattcttgagggccaaccggttcctccgctcctggggaaagtgccttctagcaccgaatcttttggctgccacggatgtcagggagccaacgggactgggttttggctgggtgcaggggaggttgcgtcaggggtacctagccggcggcgggctgggggtggggtgtactttgtccaaacctctcggctcctctggcgggcctccctgaacgtggcgtggactcgcgcacaggccctgtctcgcaggttttcaggtgcgcttggcttttcctcgctttgtggggccggtctccagtggccccccgggcgcacgcctggacatcactgtccgtcttgtcgtcgccccctacagcctcaaagacacaggctgcctgcatgtgctcttgggggacgacagtgccacatgtggacacgctggctccagctcggactcgcctctgtctctctttgcccgtgtcgccggaagccgcgtcgggatgccggagccctcgggccttggagatgaaggcaggcccctgctcctgccaggagggagggaggcagtgggctcatgggtcggtgcctttgcagccgacagcacgccttgcggccctggggatctttctgtgccccggcgagaccctttcggcctcactgcattggaaccccattcccgatcacccggttggatccatcatcggaccccaagaggagtccgcgcagcccagccggcatcccgaaactcctccttcagcgggaaccgaagcagaagagcgatcaaggaggtcctcaccacaggactcctatgggtccgaccctgggtctcccgcaggcccctctggcagtcctcttcccacccgccgcct

SEQ ID NO: 36244 - DNA, 846 bp, Artificial sequence
  DNA replication origin
ccacgggcacacaggcggacctgtgctcgtcatcacaagggctccacttttggggagactcacccgcacaccgtccgcgcacgcctgaggctgggatcccgcgctgcctcgccggcgatctgtctgaggtttcttcctcttggggtttcttcctgctggtggaccctccgcgaatcccggcctccggagaccgtcctggtaactgccctggccaggactggtctcagcccagactcagacgcacgatcacacagggctcctacttcgccaagtgtcagggacccatccccgggcaacggtggctttcactttgacccaagcggcggcttgggcctcgcgcatgcgcactggcgaggccgactccccccgctccagccccccttactccgcagagtcaggctgcggaccctttaaaaaatggcggcgacgcggcggctgcggggcctggggcggcggtgctggaggttgcggcggcggcggtggcggcgcagcccgaggcggcgggtgggaagaggactgccagaggggcctgcgggagacccagggtcggacccataggagtcctgtggtgaggacctccttgatcgctcttctgcttcggttcccgcgaaaggaggagcttcgggatgccggctgggctgcgcggactcctcttggggtccgatgatggatccaaccgggtgatcgggaatggggttccaatgcagtgaggccgaaagggtctcgccggggcacagaaagatccccagggccgcaaggcgtgctgtcggctgcaaaggcaccgacccatgagcccactgcctccctccctcctggcaggagcaggggcctgccttcatctccaag

SEQ ID NO: 36245 - DNA, 2354 bp, Artificial sequence
  DNA replication origin
ccttgcggccctggggatctttctgtgccccggcgagaccctttcggcctcactgcattggaaccccattcccgatcacccggttggatccatcatcggaccccaagaggagtccgcgcagcccagccggcatcccgaaactcctccttcagcgggaaccgaagcagaagagcgatcaaggaggtcctcaccacaggactcctatgggtccgaccctgggtctcccgcaggcccctctggcagtcctcttcccacccgccgcctctggctgtgccgccgccgccgccgacgtaacctccagcaccgccgccccaggccccgcagccgccgcgtcgccgccattttttaaagggtccgcagcctgactctgcggagtaagggggggtggagcgggggagtcggcctcgccagtgcgcatgcgcgaggcccgagccgccgcttgggccacagtgaaagccaccgttgcccggggatgggtccctgacacttggcgaagtagcagccctgtgtgatcgtgcgtctgagtctgggctgagaccagtcctggccagggtagttaccaggacggtctccggaggccgggattcgcggagggtccaccagcaggaagaaaccccaggaggaagaaacctcagacagatcgccggcgaggcagcgcgggatcccagcctcaggcgtgcgcggacggtgtgcgggtgagtctccccaaaagtggagcccttgtgatgacgagcacaggtccgcctgtgtgcccgtgggctgctctctcaccggtggctcttagtcgcggagagcagaacccggcagcttcaggggctgcctgcgggtgggtgttccctgctgtacgtgtgtgttcgttatgggtgtgtgtgtgtgtgttggggggatgcgtctgtgtgtgtgtctgtgtgtgtgcgcgcgcagtgcgtgtctgtgtgccgacttctgtctctctctctctctctctctctctctctctctctctctctctgtctctctcccttctcgctctttcggtcgccctctctttctgtctctgtccgtctgtgtatgcgtgcgccttgggacacatgggccctgtgcgccggagggtggatttcttgcacgtcggcctttcttctggtcagcgtctccccgcgtctctgcctgggtcgtgtggccggttggcagtcgtcgtcccggcggttccagtttgggggtctgtgaaggcctgggcaacgtgggcatgggtgtcggacccgcagggttttcatcccctccccatccggagcagcctctttgctaggctggatccagacgagcgctccccaaccaaggacaacggcctcccaggcgctcattgtccacccgcaggaagggtgcccgcagagcttcaagaaggtggttgtcacgcctgtcgccctctgccctcatcgagaaatgtagccacagctcgacgcagggacggagaaggaagccggcaaggggatggggcaagcatgtctgtctctcaaaggctggccttcctggccgagtcacccgtttgacactcctccccggatgccggtggtggtggcatggcccccccgtatcctgcctgggctctggcctctgctctgacctccctcttgctgtgtctgccccgtctctgagaagcctggcggcttcttagtgtggctcagtgtcttccacaaacaagacttccccgtccatcagggagaaacctcgtggcggtccgcgtcatgattgtttccctctccacacctctttctggatgattgggcagctgtggtgatcctggagctctgggcttccatacctgtgtgggacagggaagctctctcggtctccatggcccaagtgatggctgcacgctcggtccaggaagaggcggaggcaagcccaccgctcctgacattggccttctaggaaaggcggtgttgcatcccacctgcacttcctctctgattcttgagggccaaccggttcctccgctcctggggaaagtgccttctagcaccgaatcttttggctgccacggatgtcagggagccaacgggactgggttttggctgggtgcaggggaggttgcgtcaggggtacctagccggcggcgggctgggggtggggtgtactttgtccaaacctctcggctcctctggcgggcctccctgaacgtggcgtggactcgcgcacaggccctgtctcgcaggttttcaggtgcgcttggcttttcctccgctttgtggggcaggtctccagtggccccccgggcgcacgcctggacatcactgtccgtctcgtcgtcgccccctacggcctcaaagacacacgctacctgcatgtgctcttgggggacgacagtgccacatgtg

SEQ ID NO: 36246 - DNA, 2855 bp, Artificial sequence
  DNA replication origin
acacaggcggacctgtgctcgtcatcacaagggctccacttttggggagactcacccgcacaccgtccgcgcacgcctgaggctgggatcccgcgctgcctcgccggcgatctgtctgaggtttcttcctcctggggtttcttcctgctggtggaccctccgcgaatcccggcctccggagaccgtcctggtaactaccctggccaggactggtctcagcccagactcagacgcacgatcacacagggctgctacttcgccaagtgtcagggacccatccccgggcaacggtggctttcactgtggcccaagcggcggctcgggcctcgcgcatgcgcactggcgaggccgactcccccgctccacccccccttactccgcagagtcaggctgcggaccctttaaaaaatggcggcgacgcggcggctgcggggcctggggcggcggtgctggaggttacgtcggcggcggcggcggcacagccagaggcggcgggtgggaagaggactgccagaggggcctgcgggagacccagggtcggacccataggagtcctgtggtgaggacctccttgatcgctcttctgcttcggttcccgctgaaggaggagtttcgggatgccggctgggctgcgcggactcctcttggggtccgatgatggatccaaccgggtgatcgggaatggggttccaatgcagtgaggccgaaagggtctcgccggggcacagaaagatccccagggccgcaaggcgtgctgtcggctgcaaaggcaccgacccatgagcccactgcctccctccctcctggcaggagcaggggcctgccttcatctccaaggcccgagggctccggcatcccgacgcggcttccggcgacacgggcaaagagagacagaggcgagtccgagctggagccagcgtgtccacatgtggcactgtcgtcccccaagagcacatgcaggcagcgtgtgtctttgaggccgtagggggcgacgacgagacggacagtgatgtccaggcgtgcgcccggggggccactggagacctgccccacaaagcggaggaaaagccaagcgcacctgaaaacctgcgagacagggcctgtgcgcgagtccacgccacgttcagggaggcccgccagaggagccgagacgtttggacaaagtacaccccacccccagcccgccgccggctaggtacccctgacgcaacctcccctgcacccagccaaaacccagtcccgttggctccctgacatccgtggcagccaaaagattcggtgctagaaggcactttccccaggagcggaggaaccggttggccctcaagaatcagagaggaagtgcaggtgggatgcaacaccgcctttcctagaaggccaatgtcaggagcggtgggcttgcctccgcctcttcctggaccgagcgtgcagccatcacttgggccatggagaccgagagagcttccctgtcccacacaggtatggaagcccagagctccaggatcaccacagctgcccaatcatccagaaagaggtgtggagagggaaacaatcatgacgcggaccgccacgaggtttctccctgatggacggggaagtcttgtttgtggaagacactgagccacgctaagaagccgccaggcttctcagagacggggcagacacagcaagagggaggtcagagcagaggccagagcccaggcaggatacgggggggccatgccaccaccaccggcatccggggaggagtgtcaaacgggtgactcggccaggaaggccagcctttgagagacagacatgcttgccccatccccttgccggcttccttctccgtccctgcgtcgagctgtggctacatttctcgatgagggcagagggcgacaggcgtgacaaccaccttcttgaagctctgcgggcaccctcctgcgggtggacaatgagcgcctgggaggccgttgtccttggttggggagcgctcgtctggatccagcctagcaaagaggctgctccggatggggaggggatgaaaacccctgcgggttcgacgccgatgcccacgttgcccaggccttcacagacccccaaactggaactgccgggacgacgactgccaaccggccacacgacccaggcagagacgcggggacacgctgaccagaagaaaggccgacgtgcaagaaacccaccctccggcgcacagggcacatgtgtcccaaggcgcacgcacacacagacggacagagacagacagagagggcgacggaaacagcgagaagggagagagagagagagagagagagagagagagagagagagagagagagagaggtgagagagagtcagaagtcggcacacagacacgcactgcgcgcgcacacacacagacacacacacagacgcacccccccaacacacacacacacacccataacgaacacacacgtacagcagggaacacccacccgcaggcagcccctgaagctgccgggttctgctctccgcgactaagagccaccggtgagagagcagcccacgggcacacaggcggacctgtgctcgtcatcacaagggctccacttttggggagactcacccgcacaccgtccgcgcacgcctgaggctgggatgccgcgctgcctcgccggcgatctgtctgagttttcttcctcctggcgtttcttcctgctggtggaccctccgcgaatcccggcctccggaaaccgtcctggtaactgccctgaccaggactggtctcagcccagactcagacgcacgatcacacagggctcctacttcgccaagtgtcagggacccatccccgggcaacggtggctttcactgtgacccaagcggcg

SEQ ID NO: 36247 - DNA, 2816 bp, Artificial sequence
  DNA replication origin
tgggctcatgggtcggtgcctttgcagccgacagcacgccttgcggccctggggatctttctgtgccccggcgagaccctttcggcctcactgcattggaaccccattcccgatcacccggttggatccatcatcggaccccaagaggagtccgcgcagcccagccggcatcccgaagctcctcctttcgcgggaaccgaagcagaagagcgatcaaggaggtcctcaccacaggactcctatgggtccgaccctgggtctcccgcaggcccctctggcagtcctcttcccacccgccgcctcgggctgcgccgccaccgccgccgccgcaacctccagcaccgccgccccaggccccgcagccgccgcgtcgccgccattttttaaagggtccgcagcctgactctgcggagtaaggggggctggagcggggggagtcggcctcgccagtgcgcatgcgcgaggcccaagccgccgcttgggtcaaagtgaaagccaccgttgcccggggatgggtccctgacacttggcgaagtaggagccctgtgtgatcgtgcgtctgagtctgggctgagaccagtcctggccagggcagttaccaggacggtctccggaggccgggattcgcggagggtccaccagcaggaagaaaccccaagaggaagaaacctcagacagatcgccggcgaggcagcgcgggatcccagcctcaggcgtgcgcggacggtgtgcgggtgagtctccccaaaagtggagcccttgtgatgacgagcacaggtccgcctgtgtgcccgtgggctgctctctcaccggtggctcttagtcgcggagagcagaacccggcagcttcaggggctgcctgcgggtgggtgttccctgctgtacgtgtgtgttcgttatgggtgtgtgtgtgtgtgttgggggggtgcgtctgtgtgtgtgtctgtgtgtgtgcgcgcgcagtgcgtgtctgtgtgccgacttctgtgtctctctcacgtctctctctgtctctctctctctctctctctctctcccttctcgctgtttccgtcgccctctctgtctgtctctgtccgtctgtgtgtgcgtgcgccttgggacacatgtgccctgtgcgccggagggtgggtttcttgcacgtcggcctttcttctggtcagcgtgtccccgcgtctctgcctgggtcgtgtggccggttggcagtcgtcgtcccggcagttccagtttgggggtctgtgaaggcctgggcaacgtgggcatcggcgtcgaacccgcaggggttttcatcccctccacatccggagcagcctctttgctaggctggatccagacgagcgctccccaaccaaggacaacggcctcacaggcgctcattgtccacccgcaggagggtgcccgcagagcttcaagaaggtggttgtcacgcctgtcgccctctgccctcatcgagaaatgtagccacagctcgacgcagggacggagaaggaagccggcaaggggatggggcaagcatgtctgtctctcaaaggctggccttcctggccgagtcacccgtttgacagtcctccccggatgccggtggtggtggcatggcccccccgtatcctgcctgggctctggcctctgctctgacctccctcttgctgtgtctgccccgtctctgagaagcctggcggcttcttagcgtggctcagtgtcttccacaaagaagacttccccgtccatcagggagaaacctcgtggcggtccgcgtcatgattgtttccctctccacacctctttctggatgactgggcagctgtggtgatcctggagctctgggcttccatacctgtgtgggacagggaagctctctcggtctccatggcccaagtgatggctgcacgctcggtccaggaagaggcggaggcaagcccaccgctcctgacattggccttctaggaaaggcggtgttgcatcccacctgcacttcctctctgattcttgagggccaaccggttcctccgctcctggggaaagtgccttctagcaccgaatcttttggctgccacggatgtcagggagccaacgggactgggttttggctgggtgcaggggagtttgcgtcaggggtacctagccggcggcgggctgagggtggggtgtactttgtccaaacgtctcggctcctctggcgggcctccctgaacgtggcgtggactcgcgcacaggccctgtctcgcaggttttcaggtgcgcttggcttttcctccgctttgtggggcaggtctccagtggccccccgggcgcacgcctggacatcactgtccgtctcgtcgttgccccctacggcctcaaagacacacgcggcctgcatgtgctcttgggggacgacagtgccacatgtggacacactggcaccagctcggactcgcctctgtctctctttgcccgtgtcgccggaagccgcgtcgggatgccggagccctcgggccttggagatgaaggcaggcccctgctcctgccaggagggagggaggcagtgggctcatgggtcggtgcctttgcagccgacagcacgccttgcggccctggggatctttctgtgccccggcgagaccctttcggcctcactgcattggaaccccattcccgatcacccggttggatccatcatcggaccccaagaggagtccgcgcagcccagccggcatcccgaagctcctccttcagcgggaaccgaagcagaagagcgatcaaggaggtcctcaccacaggactcctatgagtccgaccctgggtctgccgcaggcccctctggcagtcctcttccc

SEQ ID NO: 36248 - DNA, 830 bp, Artificial sequence
  DNA replication origin
cgggcacacaggcggacctgtgctcgtcatcacaagggctccacttttggggagactcacccgcacaccgtccgcgcacgcctgaggctgggatcccgcgctgcctcgccggcgatctgtctgaggtttcttcctcttggggtttcttcctgctggtggaccctccgcgaatcccggcctccggagaccgtcctggtaactgccctggccaggactggtctcagcccagactcagacgcacgatcacacagggctcctacttcgccaagtgtcagggacccatccccgggcaacggtggctttcactttgacccaagcggcggcttgggcctcgcgcatgcgcactggcgaggccgactccccccgctccagccccccttactccgcagagtcaggctgcggaccctttaaaaaatggcggcgacgcggcggctgcggggcctggggcggcggtgctggaggttgcggcggcggcggtggcggcgcagcccgaggcggcgggtgggaagaggactgccagaggggcctgcgggagacccagggtcggacccataggagtcctgtggtgaggacctccttgatcgctcttctgcttcggttcccgcgaaaggaggagcttcgggatgccggctgggctgcgcggactcctcttggggtccgatgatggatccaaccgggtgatcgggaatggggttccaatgcagtgaggccgaaagggtctcgccggggcacagaaagatccccagggccgcaaggcgtgctgtcggctgcaaaggcaccgacccatgagcccactgcctccctccctcctggcaggagcaggggcctgc

SEQ ID NO: 36249 - DNA, 2429 bp, Artificial sequence
  DNA replication origin
aggagggagggaggcagtgggctcatgggtcggtgcctttgcagccgacagcacgccttgcggccctggggatctttctgtgccccggcgagaccctttcggcctcactgcattggaaccccattcccgatcacccggttggatccatcatccgaccccgagaggagtccgcgcagcccagccggcatcccgaagctcctcctttcgcgggaaccgaagcagaagagcgatcaaggaggtcctcaccacaggactcctatgggtccgaccctgggtctcccgcaggcccctctggcagtcctcttcccacccgccgcctcgggctgcgccgccaccgccgccgccgcaacctccagcaccgccgccccaggccccgcagccgccgcgtcgccgccattttttaaagggtccgcagccggactctgcggagtaagggggggtggagcgggggagtcggcctcgccagtgcgcatgcgcgaggcccaagccgccgcttgggtcacagtgaaagccaccgttgcccggggatgggtccctgacacttggcgaagtaggagccctgtgtgatcgtgcgtctgagtctgggctgagaccagtcctggccagggcagttaccaggacggtctccggaggccgggattcgcggagggtccaccagcaggaagaaaccccaggaggaagaaaactcagacagatcgccggcgaggcagcgcggcatcccagcctcaggcgtgcgcggacggtgtgcgggtgagtctccccaaaagtggagcccttgtgatgacgagcacaggtccgcctgtgtgcccgtgggctgctctctcaccggtggctcttagtcgcggagagcagaacccggcagcttcaggggctgcctgcgggtgggtgttccctgctgtacgtgtgtgttcgttatgggtgtgtgtgtgtgtgttggggggatgcgtctgtgtgtgtgtctgtgtgtgtgcgcgcgcagtgcgtgtctgtgtgccgacttctgtctctctctcacgtctctctctgtctctctctctctctctctctctctcccttctcgctgtttccgtcgccctctctgtctgtctctgtccgtctgtgtgtgcgtgcgccttgggacacatgtgccctgtgcgccggagggtgggtttcttgcacgtcggccttccttctggtcagcctctccccgcgtctctgcctgggtcgtgtggccggttggcagtcgtcgtcccagcagttccagtttgggggtctgtgaaggcctgggcaacgtgggcatcggcgtcgaacccgcaggggttttcatcccctccccatccggagcagcctctttgctaggctggatccagacgagcgctccccaaccaaggacaacggcctcccaggcgctcattgtccacccgcaggaaggtgcccgcagagcttcaagaaggtggttgtcacgcctgtcgccctctgccctcatcgagaaatgtagccacagctcgacgcagggacggagaaggaagccggcaaggggatggggcggcaagcatgtctgtctctcaaaggctggccttcctggccgagtcacccgtttgacagtcctccccggatgccggtggtggaggcatggcccccccgtatcctgcctgggctctggcctctgctctgacctccctcttgctgtgtctgccccgtctctgagaagcctggcggcttcttagcgtggctcagtgtcttccacaaacaagacttccccgtccatcagggagaaacctcgtggcggtccgcgtcatgattgtttccctctccacacctctttctggatgattgggcagctgtggtgatcctggagctctgggcttccatacctgtgtgggacagggaagctctctcggtctccatggcccaagtgatggctgcacgctcggtccaggaagaggcggaggcaagcccaccgctcctgacattggccttctaggaaaggcggtgttgcatcccacctgcacttcctctctgattcttgagggccaaccggttcctccgctcctggggaaagtgccttctagcaccgaatcttttggctgccacggatgtcagggagccaacgggactgggttttggctgggtgcaggggaggttgcgtcaggggtacctagccggcggcgggctgggggtggggtgtactttgtccaaacctctcggctcctctggcgggcctccctgaacgtggcgtggactcgcgcacaggccctgtctcgcaggttttcaggtgcgcttggcttttcctccgctttgtggggcaggtctccagtggccccccgggcgcacgcctggacatcactgtccgtctcgtcgtcgccccctacggcctcaaagacacacgctacctgcatgtgctcttgggggacgacagtgccacatgtggacacgctggcaccagctcg

SEQ ID NO: 36250 - DNA, 2842 bp, Artificial sequence
  DNA replication origin
tgccaggagggagggaggcagtgggctcatgggtcggtgcctttgcagccgacagcacgccttgcggccctggggatctttctgtgccccggcgagaccctttcggcctcactgcattggaaccccattcccgatcacccggttggatccatcatcggaccccaagaggagtccgcgcagcccagccggcatcccgaagctcctcctttcgcgggaaccgaagcagaagagcgatcaaggaggtcctcaccacaggactcctatgggtccgaccctgggtctcccgcaggcccctctggcagtcctcttcccacccgccgcctcgggctgcgccgccaccgccgccgccgcaacctccagcaccgccgccccaggccccgcagccgccgcgtcgccgccattttttaaagggtccgcagcctgactctgtggagtaagggggggtggagcgggggagtcggcctcgccagtgcgcatgcgcgaggcccaagccgccgcttgggtcacagtgaaagccaccgttgccaggggatgggtccctgacacttggcgaagtaggagccctgtgtgatcgtgcgtctgagtctgggctgagaccagtcctggccagggcagttaccaggacggtctccggaggccgggattcgcggagggtccaccagcaggaagaaaccccaagaggaagaaacctcagacagatcgccggcgaggcagcgcgggatcccagcctcaggcgtgcgcggacggtgtgcgggtgagtctccccaaaagtggagcccttgtgatgacgagcacaggtccgcctgtgtgcccgtgggctgctctctcaccggtggctcttagtcgcggagagcagaacccggcagcttcaggggctgcctgcgggtgggtgttccctgctgtacgtgtgtgttcgttatgggtgtgtgtgtgtgtgttggggggatgcgtctgtgtgtgtgtctgtgtgtgtgcgcgcgcagtgcgtgtctgtgtgccgacttctgtctctctctctctctctctctctctctctctctctctctgtctctctcccttctcgctctttcggtcgccctctctttctgtctctctccgtctgtgtgtgcgtgcgccttgggacacatgggccctgtgcgccggagggtggatttcttgcacgtcggcctttcttctggtcagcgtctccccgcgtctctgcctgggtcgtgtggccggttggcagtcgtcgtcccggcagttccagtttgggggtctgtgaaggcctgggcaacgtgggcatgggtgtcggacccgtagggttttcatcccctccccatccggagcagcctctttgctaggctggatccagacgagcgctccccaaccaaggacaacggcctcccaggcgctcattgtccacccgcaggagggtgcccgcagagcttcaagaaggtggttgtcacgcctgtcgccctctgccctcatcgagaaatgtagccacagctcgacgcagggacggagaaggaagccggcaaggggatggggcggcaagcatgtctgtctctcaaaggctggccttcctggccgagtcacccgtttgacagtcctccccggatgccggtggtggtggcatggtccccccgtatcctgcctgtgctctggcctctgctctgacctccctcttgctgtgtctgccccgtctctgagaagcctggcggcttcttagcgtggctcagtgtcttccacaaagaagacttccccgtccatcagggagaaacctcgtggcggtccgcgtcatgattgtttccctctccacacctctttctggatgattgggcagctgtggtgatcctggagctctgggcttccatacctgtgtgggacagggaagctctctcggtctccatggcccaagtgatggctgcacgctcggtccaggaagaggcggaggcaagcccaccgctcctgacattggccttctaggaaaggcggtgttgcatcccacctgcacttcctctctgattcttgagggccaaccggttcctccgctcctggggaaagtgccttctagcaccgaatcttttggctgccacggatgtcagggagccaacgggactgggttttggctgggtgcaggggaggttgcgtcaggggtacctagccggcggcgggctgggggtggggtgtactttgtccaaacctctcggctcctctggcgggcctccctgaacgtggcgtggactcgcgcacaggctctgtctcgcaggttttcaggtgcgcttggcttttcctccgctttgtggggcaggtctccagtggccccccgggcgcacgcctggacatcactgtccgtctcgtcgtcgccccctacggcctcaaagacacacgctgcctgcatgtgctcttgggggacgacagtgccacatgtggacacgctggcaccagctcggactcgcctctgtctctctttgcccgtgtcgccggaagccgcgtcgggatgccggagccctcgggccttggagatgaaggcaggcccctgctcctgccaggagggagggaggcagtgggctcatgggtcggtgcctttgcagccgacagcacgccttgcggccctggggatctttctgtgccccggcgagaccctttcggcctcactgcattggaaccccattcccgatcacccggttggatccatcatccgaccccgagaggagtccgcgcagcccagccggcatcccgaagctcctcctttcgcgggaaccgaagcagaagagcgatcaaggaggtcctcaccacaggactcctatgggtccgaccctgggtctcccgcaggcccctctggcagtcctcttcccacccg

SEQ ID NO: 36251 - DNA, 2827 bp, Artificial sequence
  DNA replication origin
ggcacacaggcggacctgtgctcgtcatcacaagggctccacttttggggagactcacccgcacaccgtccgcgcacgcctgaggctgggatcccgcgctgcctcgccggcgatctgtctgaggtttcttcctcttggggtttcttcctgctggtggaccctccgcgaatcccggcctccggagaccgtcctggtaactgccctggccaggactggtctcagcccagactcagacgcacgatcacacagggctcctacttcgccaagtgtcagggacccatcccctggcaacggtggctttcactgtgacccaagcggcggcttgggcctcgcgcatgcgcactggcgaggccgactcccccgctccacccccccttactccacagagtcaggctgcggaccctttaaaaaatggcggcgacgcggcggctgcggggcctggggcggcggtgctggaggttgcggcggcggcggtggcggcgcagcccgaggcggcgggtgggaagaggactgccagaggggcctgcgggagacccagggtcggacccataggagtcctgtggtgaggacctccttgatcgctcttctgcttcggttcccgcgaaaggaggagcttcgggatgccggctgggctgcgcggactcctcttggggtccgatgatggatccaaccgggtgatcgggaatggggttccaatgcagtgaggccgaaagggtctcgccggggcacagaaagatccccagggccgcaaggcgtgctgtcggctgcaaaggcaccgacccatgagcccactgcctccctccctcctggcaggagcaggggcctgccttcatctccaaggcccgagggctccggcatcccgacgcggcttccggcgacacgggcaaagagagaggcgagtccgagctgcagccagcgtgtccacatgtggcactgtcgtcccccaagagcacatgcaggcagcgtgtgtctttgaggccgtagggggcgacgacgagacggacagtgatgtccaggcgtgcgcccggggggccactggagacctgccccacaaagcggaggaaaagccaagcgcacctgaaaacctgcgagacagggcctgtgcgcgagtccacgccacgttcagggaggcccgccagaggagccgagaggtttggacaaagtacaccccacccccagcccgccgccggctaggtacccctgacgcaacctcccctgcacccagccaaaacccagtcccgttggctccctgacatccgtggcagccaaaagattcggtgctagaaggcactttccccaggagcggaggaaccggttggccctcaagaatcagagaggaagtgcaggtgggatgcaacaccgcctttcctagaaggccaatgtcaggagcggtgggcttgcctccgcctcttcctggaccgagcgtgcagccatcacttgggccatggagaccgagagagcttccctgtcccacacaggtatggaagcccagagctccaggatcaccacagctgcccagtcatccagaaagaggtgtggagagggaaacaatcatgacgcggaccgccacgaggtttctccctgatggacggggaagtcttctttgtggaagacactgagccacgctaagaagccgccaggcttctcagagacggggcagacacagcaagagggaggtcagagcagaggccagagcccaggcaggatacgggggggccatgccaccaccaccggcatccggggaggagtgtcaaacgggtgactcggccaggaaggccagcctttgagagacagacatgcttgccccatccccttgccggcttccttctccgtccctgcgtcgagctgtggctacatttctcgatgagggcagagggcgacaggcgtgacaaccgccttcttgaagctctgcgggcaccctcctgcgggtggacaatgagcgcctgggaggccgttgtccttggttggggagcgctcgtctggatccagcctagcaaagaggctgctccggatggggaggggatgaaaacccctgcgggttcgacgccgatgcccacgttgcccaggccttcacagacccccaaactggaactgccgggacgacgactgccaaccggccacacgacccaggcagagacgcggggagaggctgaccagaagaaaggccgacgtgcaagaaacccaccctccggcgtacagggcacatgtgtcccaaggcgcacgcacacacagacggacagagatagaaagagagggcgacggaaacagcgagaagggagagagagagagagagagagagagagagacagagagagacgtgagagagagacagaagtcggcacacagacacgcactgcgcgcgcacacacacagacacacacacagacgcacccccccaacacacacacacacacccataacgaacacacacgtacagctgggaacacccacccgcaggcagcccctgaagctgccgggttctgctctccgagactaagagccaccggtgagagagcagcccacgggcacacaggcggacctgtgctcgtcatcacaagggctccacttttggggagactcacccgcacaccgtccgcgcacgcctgaggctgggatcccgcgctgcctcgccggcgatctgtctgaggtttcttcctcttggggtttcttcctgctggtggaccctccgcgaatcccggcctccggagaccgtcctggtaactgccctggccaggactggtctcagcccagactcagacgcacgatcacacagggctcctacttcgccaagtgtcagggacccatccccgggcaacggtggctttca

SEQ ID NO: 36252 - DNA, 2842 bp, Artificial sequence
  DNA replication origin
ctcctgccaggagggagggaggcagtgggctcatgggtcggtgcctttgcagccgacagcacgccttgcggccctggggatctttctgtgccccggcgagaccctttcggcctcactgcattggaaccccattcccgatcacccggttggatccatcatcggaccccaagaggagtccgcgcagcccagccggcatcccgaagctcctccttcagcgggaaccgaagcagaagagcgctcaaggaggtcctcaccacaggactcctatgggtccgaccctgggtctcccgcaggcccctctggcagtcctcttcccacccgccgcctcgggctgcgccgccaccgccgccacggcaacctccagcaccgccgccccaggccccgcagccgccgcgtcgccgccattttttaaagggtccgcagcctgactctgcggagtaagggggggtggagcgggggagtcggcctcgccagtgcgcatgcgcgaggcccaagccgccgcttgggtcacagtgaaagccaccgttgcccggggatgggtccctgacacttggcgaagtaggagccctgtgtgatcgtgcgtctgagtctgggctgagaccagtcctggccagggcatttaccaggacggtctccggaggccgggattcgcggagggtccaccagcaggaagaaaccccaggaggaagaaaactcagacagatcgccggcgaggcagcgcggcatcccagcctcaggcgtgcgcggacggtgtgcgggtgagtctccccaaaagtggagcccttgtgatgacgagcacaggtccgcctgtgtgcccgtgggctgctctctcaccggtggctcttagtctcggagagcagaacccggcagcttcaggggctgcctgcgggtgggtgttccctgctgtacgtgtgtgttcgttatgggtgtgtgtgtgtgtgttgggggggtgcgtctgtgtgtgtgtctgtgtgtgtgcgcgcgcagtgcgtgtctgtgtgccgacttctgtgtctctctcacgtctctctctgtctctctctctctctctctctctctcccttctcgctgtttccgtcgccctctctgtctgtctctgtccgtctgtgtgtgcgtgcgccttgggacacatgtgccctgtgcgccggagggtgggtttcttgcacgtcggcctttcttctggtcagcgtgtccccgcgtctctgcctgggtcgtgtggccggttggcagtcgtcgtcccggcagttccagtttgggggtctgtgaaggcctgggcaacgtgggcatcggcgtcgaacccgcaggggttttcatcccctccacatccggagcagcctctttgctaggctggatccagacgagcgctccccaaccaaggacaacggcctcacaggcgctcattgtccacccgcaggagggtgcccgcagagcttcaagaaggtggttgtcacgcctgtcgccctctgccctcatcgagaaatgtagccacagctcgacgcagggacggagaaggaagccggcaaggggatggggcaagcatgtctgtctctcaaaggctggccttcctggccgagtcacccgtttgacagtcctccccggatgccggtggtggtggcatggcccccccgtatcctgcctgggctctggcctctgctctgacctccctcttgctgtgtctgccccgtctctgagaagcctggcggcttcttagcgtggctcagtgtcttccacaaagaagacttccccgtccatcagggagaaacctcgtggcggtccgcgtcatgattgtttccctctccacacctctttctggatgactgggcagctgtggtgatcctggagctctgggcttccatacctgtgtgggacagggaagctctctcggtctccatggcccaagtgatggctgcacgctcggtccaggaagaggcggaggcaagcccaccgctcctgacattggccttctaggaaaggcggtgttgcatcccacctgcacttcctctctgattcttgagggccaaccggttcctccgctcctggggaaagtgccttctagcaccgaatcttttggctgccacggatgtcagggagccaacgggactgggttttggctgggtgcaggggagtttgcgtcaggggtacctagccggcggcgggctgagggtggggtgtactttgtccaaacctctcggctcctctggcgggcctccctgaacgtggcgtggactcgcgcacaggccctgtctcgcaggttttcaggtgcgcttggcttttcctccgctttgtggggcaggtctccagtggccccccgggcgcacgcctggacatcactgtccgtctcgtcgttgccccctacggcctcaaagacacacgctgcctgcatgtgctcttgggggacgacagtgccacatgtggacacgctggcaccagctcggactcgcctctgtctctctttgcccgtgtcgccggaagccgcgtcgggatgccggagccctcgggccttggagatgaaggcaggcccctgctcctgccaggagggagggaggcagtgggctcatgggtcggtgcctttgcagccgacagcacgccttgcggccctggggatctttctgtgccccggcgagaccctttcggcctcactgcattggaaccccattcccgatcacccggttggatccatcatcggaccccaagaggagtccgcgcagcccagccggcatcccgaagctcctcctttcgcgggaaccgaagcagaagagcgatcaaggaggtcctcaccacaggactcctatgggtccgaccctgggtctcccgcaggcccctctggcagtcctcttcccac

SEQ ID NO: 36253 - DNA, 2836 bp, Artificial sequence
  DNA replication origin
caggagggagggaggcagtgggctcatgggtcggtgcctttgcagccgacagcacgccttgcgccctggggatctttctgtgccccggcgagaccctttcggcctcactgcattggaaccccattcccgatcacccggttggatccatcatcggaccccaagaggagtccgcgcagcccagccggcatcccgaagctcctcctttcgcgggaaccgaagcagaagagcgatcaaggaggtcctcaccacaggactcctatgggtccgaccctgggtctcccgcaggcccctctggcagtcctcttcccacccgccgcctcgggctgcgccgccaccgccgccgccgcaacctccagcaccgccgccccaggccccgcagccgccgcgtcgccgccattttttaaagggtccgcagcctgactctgcggagtaagggggggtggagcgggggagtcggcctcgccagtgcgcatgcgcgaggcccaagccgccgcttgggtcacagtgaaagccaccgttgcccggggatgggtccctgacacttggcgaagtaggagccctgtgtgatcgtgcgtctgagtctgggctgagaccagtcctggccagggcagttaccaggacggtctccggaggccgggattcgcggagggtccaccagcaggaagaaaccccaagaggaagaaacctcagacagatcgccggcgaggcagcgcgggatcccagcctcaggcgtgcgcggacggtgtgcgggtgagtctccccaaaagtggagcccttgtgatgacgagcacaggtccgcctgtgtgcccgtgggctgctctctcaccggtggctcttagtctcggagagcagaacccggcagcttcaggggctgcctgcgggtgggtgttccctgctgtacgtgtgtgttcgttatgggtgtgtgtgtgtgtgttgggggggtgcgtctgtgtgtgtgtctgtgtgtgtgcgcgcgcagtgcgtgtctgtgtgccgacttctgtctctctctcacgtctctctctgtctctctgtctctctctctctctctctcccttctcgctgtttccgtcgccctctctgtctgtctctgtccgtctgtgtgtgcgtgcgccttgggacacatgtgccctgtgcgccggagggtgggtttcttgcacgtcggcctttcttctggtcagcgtgtccccgcgtctctgcctgggtcgtgtggccggttggcagtcgtcgtcccggcagttccagtttgggggtctgtgaaggcctgggcaacgtgggcatcggcgtcgaacccgcaggggttttcatcccctccccatccggagcagcctctttgctaggctggatccagacgagcgctccccaaccaaggacaacggcctcccaggcgctcattgtccacccgcaggagggtgcccgcagagcttcaagaaggtggttgtcacgcctgtcgccctctgccctcatcgagaaatgtagccacagctcgacgcagggacggagaaggaagccggcaaggggatggggcaagcatgtctgtctctcaaaggctggccttcctggccgagtcacccgtttgacactcctccccggatgccggtggtggtggcatggcccccccgtatcctgcctgggctctggcctctgctctgacctccctcttgctgtgtctgccccgtctctgagaagcctggcagcttcttagcgtggctcagtgtcttccacaaagaagacttccccgtccatcagggagaaacctcgtggcggtccgcgtcatgattgtttccctctccacacctctttctggatgattgggcagctgtggtgatcctggagctctgggcttccatacctgtgtgggacagggaagctctctcggtctccatggcccaagtgatggctgcacgctcggtccaggaagaggcggaggcaagcccaccgctcctgacattggccttctaggaaaggcggtgttgcatcccacctgcacttcctctctgattcttgagggccaaccggttcctccgctcctggggaaagtgccttctagcaccgaatcttttggctgccacggatgtcagggagccaacgggactgggttttggctgggtgcaggggaggttgcgtcaggggtacctagccggcggcgggctgggggtggggtgtactttgtccaaacctctcggctcctctggcgggcctccctgaacgtggcgtggactcgcgcacaggccctgtctcgcaggttttcaggtgcgcttggcttttcctccgctttgtggggcaggtctccagtggccccccgggcgcacgcctggacatcactgtccgtctcgtcgtcgccccctacggcctcaaagacacacgctgcctgcatgtgctcttgggggacgacagtgccacatgtggacacgctggctccagctcggactcgcctctgtctctctttgcccgtgtcgccggaagccgcgtcgggatgccggagccctcgggccttggagatgaaggcaggcccctgctcctgccaggagggagggaggcagtgggctcatgggtcggtgcctttgcagccgacagcacgccttgcggccctggggatctttctgtgccccggcgagaccctttcggcctcactgcattggaaccccattcccgatcacccggttggatccatcatcggaccccaagaggagtccgcgcagcccagccggcatcccgaagctcctccttcagcgggaaccgaagcagaagagcgctcaaggaggtcctcaccacaggactcctatgggtccgaccctgggtctcccgcaggcccctctggcagtcctcttcccac

SEQ ID NO: 36254 - DNA, 805 bp, Artificial sequence
  DNA replication origin
acacaggcggacctgtgctcgtcatcacaagggctccacttttggggagactcacccgcacaccgtccgcgcacgcctgaggctgggatcccgcgctgcctcgccggcgatctgtctgaggtttcttcctcttggggtttcttcctgctggtggaccctccgcgaatcccggcctccggagaccgtcctggtaactgccctggccaggactggtctcagcccagactcagacgcacgatcacacagggctcctacttcgccaagtgtcagggacccatccccgggcaacggtggctttcactgtgacccaagcggcggcttgggcctcgcgcatgcgcactggcgaggccgactcccccgctccacccccccttactccgcagagtcaggctgcggaccctttaaaaaatggcggcgacgcggcggctgcggggcctggggcggcggtgctggaggttgcggcggcggcggtggcggcgcagcccgaggcggcgggtgggaagaggactgccagaggggcctgcgggagacccagggtcggacccataggagtcctgtggtgaggacctccttgatcgctcttctgcttcggttcccgcgaaaggaggagcttcgggatgccggctgggctgcgcggactcctcttggggtccgatgatggatccaaccgggtgatcgggaatggggttccaatgcagtgaggccgaaagggtctcgccggggcacagaaagatccccagggcgcaaggcgtgctgtcggctgcaaaggcaccgacccatgagcccactgcctccctccctcctg

SEQ ID NO: 36255 - DNA, 2447 bp, Artificial sequence
  DNA replication origin
gcagtgggctcatgggtcggtgcctttgcagccgacagcacgccttgcggccctggggatctttctgtgccccggcgagaccctttcggcctcactgcattggaaccccattcccgatcacccggttggatccatcatcggaccccaagaggagtccgcgcagcccagccggcatcccgaagctcctccttcagcgggaaccgaagcagaagagcgatcaaggaggtcctcaccacaggactcctatgggtccgaccctgggtctcccgcaggcccctctggcagtcctcttcccacccgccgcctcgggctgcgccgccaccgccgccaccgcaacctccagcaccgccgccccaggccccgcagccgccgcgtcgccgccattttttaaagggtccgcagcctgactctgcggagtaagggggggtggagcgggggagtcggcctcgccagtgcgcatgcgcgaggcccaagccgccgcttgggtcacagtgaaagccaccgttgcccggggatgggtccctgacacttggcgaagtaggagccctgtgtgatcgtgcgtctgagtctgggctgagaccagtcctggccagggcatttaccaggacggtctccggaggccgggattcgcggagggtccaccagcaggaagaaaccccaggaggaagaaaactcagacagatcgccggcgaggcagcgcggcatcccagcctcaggcgtgcgcggacggtgtgcgggtgagtctccccaaaagtggagcccttgtgatgacgagcacaggtccgcctgtgtgcccgtgggctgctctctcaccggtggctcttagtcgcggagagcagaacccggcaccttcaggggctgcctgcgggtgggtgttccctgctgtacgtgtgtgttcgttatgggtgtgtgtgtgtgtgtgttggggggatgcgtctgtgtgtgtgtctgtgtgtgtgcgcgcgcagtgcgtgtctgtgtgccgacttctgtctctctctcacgtctctctctctctctctctctctctgtctctctcccttctcgctctttcggtcgccctctctttctgtctctgtccgtctgtgtgtgcgtgcgccttgggacacatgggccctgtgcgccggagggtgggtttcttgcacgtcggcctttcttctggtcagcgtgtccccgcgtctctgcctgggtcgtgtggccggttggcagtcgtcgtcccggcggttccagtttgggggtctgtgaaggcctgggcaacgtgggcatgggcgtcggacccgcagggttttcatcccctccccatccggagcagcctctttgctaggctggatccagacgagcgctccccaaccaaggacaacggcctcccaggcgctcattgtccacccgcaggagggtgcccgcagagcttcaagaaggtggttgtcacgcctgtcgccctctgccctcatcgagaaatgtagccacagctagacgcagggacggagaaggaagccggcaaggggatggggcggcaagcatgtctgtctctcaaaggctggccttcctggccgagtcacccgtttgacactcctccccggatgccggtggtggtggcatggtccccccgtatcctgcctgtgctctggcgtctgctctgacctccctcttgctgtgtctgccccgtctctgagaagcctggcggcttcttagtgtggctcagtgtcttccacaaagaagacttccccgtccatcagggagaaacctcgtggcggtccgcgtcatgattgtttccctctccacacctctttctggatgattgggcagctgtggtgatcttggagctctgggcttccatacctgtgtgggacagggaagctctctcggtctccatggcccaagtgatggctgcacgctcggtccaggaagaggcggaggcaagcccaccgctcctgacattggccttctaggaaaggcggtgttgcatcccacctgcacttcctctctgattcttgagggccaaccggttcctccgctcctggggaaagtgccttctagcaccgaatcttttggctgccacggatgtcagggagccaacgggactgggttttggctgggtgcaggggaggttgcgtcaggggtacctagccggcggcgggctgggggtggggtgtactttgtccaaacctctcggctcctctggcgggcctccctgaacgtggcgtggactcgcgcacaggccctgtctcgcaggttttcaggtgcgcttggcttttcctccgctttgtggggcaggtctccagtggccccccgggcgcacgcctggacatcactgtccgtctcgtcgtcgccccctacggcctcaaagacacacgctgcctgcatgtgctcttgggggacgacagtgccacatgtggacacgctggcaccagctcggactcgcctctgtctctctttgcccgtgtcgc

SEQ ID NO: 36256 - DNA, 2856 bp, Artificial sequence
  DNA replication origin
ctgctcctgccaggagggagggaggcagtgggctcatgggtcggtgcctttgcagccgacagcacgccttgcgccctggggatctttctgtgccccggcgagaccctttcggcctcactgcattggaaccccattcccgatcacccggttggatccatcatcggaccccaagaggagtccgcgcagcccagccggcatcccgaagctcctcctttcgcgggaaccgaagcagaagagcgatcaaggaggtcctcaccacaggactcctatgggtccgaccctgggtctcccgcaggcccctctggcagtcctcttcccacccgccgcctcgggctgcgccgccaccgccgccgccgcaacctccagcaccgccgccccaggccccgcagccgccgcgtcgccgccattttttaaagggtccgcagcctgactctgcggagtaagggggggtggagcgggggagtcggcctcgccagtgcgcatgcgcgaggcccaagccgccgcttgggtcacagtgaaagccaccgttgcccggggatgggtccctgacacttggcgaagtaggagccctgtgtgatcgtgcgtctgagtctgggctgagaccagtcctggccagggcagttaccaggacggtctccggaggccgggattcgcggagggtccaccagcaggaagaaaccccaagaggaagaaacctcagacagatcgccggcgaggcagcgcgggatcccagcctcaggcgtgcgcggacggtgtgcgggtgagtctccccaaaagtggagcccttgtgatgacgagcacaggtccgcctgtgtgcccgtgggctgctctctcaccggtggctcttagtctcggagagcagaacccggcagcttcaggggctgcctgcgggtgggtgttccctgctgtacgtgtgtgttcgttatgggtgtgtgtgtgtgtgttgggggggtgcgtctgtgtgtgtgtctgtgtgtgtgcgcgcgcagtgcgtgtctgtgtgccgacttctgtctctctctcacgtctctctctgtctctctgtctctctctctctctctctcccttctcgctgtttccgtcgccctctctgtctgtctctgtccgtctgtgtgtgcgtgcgccttgggacacatgtgccctgtgcgccggagggtgggtttcttgcacgtcggcctttcttctggtcagcgtgtccccgcgtctctgcctgggtcgtgtggccggttggcagtcgtcgtcccggcagttccagtttgggggtctgtgaaggcctgggcaacgtgggcatcggcgtcgaacccgcaggggttttcatcccctccccatccggagcagcctctttgctaggctggatccagacgagcgctccccaaccaaggacaacggcctcccaggcgctcattgtccacccgcaggagggtgcccgcagagcttcaagaaggtggttgtcacgcctgtcgccctctgccctcatcgagaaatgtagccacagctcgacgcagggacggagaaggaagccggcaaggggatggggcaagcatgtctgtctctcaaaggctggccttcctggccgagtcacccgtttgacactcctccccggatgccggtggtggtggcatggcccccccgtatcctgcctgggctctggcctctgctctgacctccctcttgctgtgtctgccccgtctctgagaagcctggcggcttcttagcgtggctcagtgtcttccacaaacaagacttccccgtccatcagggagaaacctcgtggcggtccgcgtcatgattgtttccctctccacacctctttctggatgattgggcagctgtggtgatcctggagctctgggcttccatacctgtgtgggacagggaagctctctcggtctccatggcccaagtgatggctgcacgctcggtccaggaagaggcggaggcaagcccaccgctcctgacattggccttctaggaaaggcggtgttgcatcccacctgcacttcctctctgattcttgagggccaaccggttcctccgctcctggggaaagtgccttctagcaccgaatcttttggctgccacggatgtcagggagccaacgggactgggttttggctgggtgcaggggaggttgcgtcaggggtacctagccggcggcgggctgggggtggggtgtactttgtccaaacctctcggctcctctggcgggcctccctgaacgtggcgtggactcgcgcacaggccctgtctcgcaggttttcaggtgcgcttggcttttcctccgctttgtggggcaggtctccagtggccccccgggcgcacgcctggacatcactgtccgtctcgtcgtcgccccctacggcctcaaagacacacgctgcctgcatgtgctcttgggggacgacagtgccacatgtggacacgctggctccagctcggactcgcctctgtctctctttgcccgtgtcgccggaagccgcgtcgggatgccggagccctcgggccttggagatgaaggcaggcccctgctcctgccaggagggagggaggcagtgggctcatgggtcggtgcctttgcagccgacagcacgccttgcggccctggggatctttctgtgccccggcgagaccctttcggcctcactgcattggaaccccattcccgatcacccggttggatccatcatcggaccccaagaggagtccgcgcagcccagccggcatcccgaagctcctccttcagcgggaaccgaagcagaagagcgatcaaggaggtcctcaccacaggactcctatgggtccgaccctgggtctcccgcaggcccctctggcagtcctcttcccacccgccgcctc

SEQ ID NO: 36257 - DNA, 2814 bp, Artificial sequence
  DNA replication origin
gcggacctgtgctcgtcatcacaagggctccacttttggggagactcacccgcacaccgtccgcgcacgcctgaggctgggatcccgcgctgcctcgccggcgatctgtctgaggtttcttcctcttggggtttcttcctgctggtggaccctccgcgaatcccggcctccggagaccgtcctggtaactgccctggccaggactggtctcagcccagactcagacgcacgatcacacagggctcctacttcgccaagtgtcagggacccatccccgggcaacggtggctttcactgtgacccaagcggcggcttgggcctcgcgcatgcgcactggcgaggccgactcccccgctccacccccccttactccgcagagtcaggctgcggaccctttaaaaaatggcggcgacgcggcggctgcggggcctggggcggcggtgctggaggttgcggcggcggcggtggcggcgcagcccgaggcggcgggtgggaagaggactgccagaggggcctgcgggagacccagggtcggacccataggagtcctgtggtgaggacctccttgatcgctcttctgcttcggttcccgcgaaaggaggagcttcgggatgccggctgggctgcgcggactcctcttggggtccgatgatggatccaaccgggtgatcgggaatggggttccaatgcagtgaggccgaaagggtctcgccggggcacagaaagatccccagggcgcaaggcgtgctgtcggctgcaaaggcaccgacccatgagcccactgcctccctccctcctggcaggagcaggggcctgccttcatctccaaggcccgagggctccagcatcccgacgcggcttccggcgacacgggcaaagagagacagaggcgagtccgagctggtgccagcgtgtccacatgtggcactgtcgtcccccaagagcacatgcaggcagcgtgtgtctttgaggccgtagggggcgacgacgagacggacagtgatgtccaggcgtgcgcccggggggccactggagacctgccccacaaagcggaggaaaagccaagcgcacctgaaaacctgcgagacagggcctgtgcgcgagtccacgccacgttcagggaggcccgccagaggagccgagaggtttggacaaagtacaccccacccccagcccgccgccggctaggtacccctgacgcaacctcccctgcacccagccaaaacccagtcccgttggctccctgacatccgtggcagccaaaagattcggtgctagaaggcactttccccaggagcggaggaaccggttggccctcaagaatcagagaggaagtgcaggtgggatgcaacaccgcctttcctagaaggccaatgtcaggagcggtgggcttgcctccgcctcttcctggaccgagcgtgcagccatcacttgggccatggagaccgagagagcttccctgtcccacacaggtatggaagcccagagctccaggatcaccacagctgcccagtcatccagaaagaggtgtggagagggaaacaatcatgacgcggaccgccacgaggtttctccctgatggacggggaagtcttctttgtggaagacactgagccacgctaagaagccgccaggcttctcagagacggggcagacacagcaagagggaggtcagagcagaggccagagcccaggcaggatacgggggggccatgccaccaccaccggcatccggggaggagtgtcaaacgggtgactcggccaggaaggccagcctttgagagacagacatgcttgccccatccccttgccggcttccttctccgtccctgcgtcgagctgtggctacatttctcgatgagggcagagggcgacaggcgtgacaaccgccttcttgaagctctgcgggcaccctcctgcgggtggacaatgagcgcctgggaggccgttgtccttggttggggagcgctcgtctggatccagcctagcaaagaggctgctccggatggggaggggatgaaaacccctgcgggttcgacgccgatgcccacgttgcccaggccttcacagacccccaaactggaactgccgggacgacgactgccaaccggccacacgacccaggcagagacgcggggagaggctgaccagaagaaaggccgacgtgcaagaaacccaccctccggcgtacagggcacatgtgtcccaaggcgcacgcacacacagacggacagagatagaaagagagggcgacggaaacagcgagaagggagagagagagagagagagagagagagagacagagagagacgtgagagagagacagaagtcggcacacagacacgcactgcgcgcgcacacacacagacacacacacagacgcacccccccaacacacacacacacacccataacgaacacacacgtacagctgggaacacccacccgcaggcagcccctgaagctgccgggttctgctctccgagactaagagccaccggtgagagagcagcccacgggcacacaggcggacctgtgctcgtcatcacaagggctccacttttggggagactcacccgcacaccgtccgcgcacgcctgaggctgggatcccgcgctgcctcgccggcgatctgtctgaggtttcttcctcttggggtttcttcctgctggtggaccctccgcgaatcccggcctccggagaccgtcctggtaactgccctggccaggactggtctcagcccagactcagacgcacgatcacacagggctcctacttcgccaagtgtcagggacccatccccgggcaacggtg

SEQ ID NO: 36258 - DNA, 2893 bp, Artificial sequence
  DNA replication origin
acacaggcggacctgtgctcgtcatcacaagggctccacttttggggagactcacccgcacaccgtccgcgcacgcctgaggctgggatcccgcgctgcctcgccggcgatctgtctgaggtttcttcctcttggggtttcttcctgctggtggaccctccgcgaatcccggcctccggagaccgtcctggtaactgccctggccaggactggtctcagcccagactcagacgcacgatcacacagggctcctacttcgccaagtgtcagggacccatccccgggcaacggtggctttcactgtgacccaagcggcggcttgggcctcgtgcatgcgcactggcgaggccgactcccccgctccacccccccttactccgcagagtcaggctgcggaccctttaaaaaatggcggcgacgcggcggctgcggggcctggggcggcggtgctggaggttgcggcggcggcggtggcggcgcagcccgaggcggcgggtgggaagaggactgccagaggggcctgcgggagacccagggtcggacccataggagtcctgtggtgaggacctccttgatcgctcttctgcttcggttcccgcgaaaggaggagcttcgggatgccggctgggctgcgcggactcctcttggggtccgatgatggatccaaccgggtgatcgggaatggggttccaatgcagtgaggccgaaagggtctcgccggggcacagaaagatccccagggccgcaaggcgtgctgtcggctgcaaaggcaccgacccatgagcccactgcctccctccctcctggcaggagcaggggcctgccttcatctccaaggcccgagggctccggcatcccgacgcggcttccggcgacacgggcaaagagagacagaggcgagtccgagctggagccagcgtgtccacatgtggcactgtcgtcccccaagagcacatgcaggcagcgtgtgtctttgaggccgtagggggcgacgacgagacggacagtgatgtccaggcgtgcgcccggggggccactggagacctgccccacaaagcggaggaaaagccaagcgcacctgaaaacctgcgagacagggcctgtgcgcgagtccacgccacgttcagggaggcccgccagaggagccgagacgtttggacaaagtacaccccacccccagcccgccgccggctaggtacccctgacgcaacctcccctgcacccagccaaaacccagtcccgttggctccctgacatccgtggcagccaaaagattcggtgctagaaggcactttccccaggagcggaggaaccggttggccctcaagaatcagagaggaagtgcaggtgggatgcaacaccgcctttcctagaaggccaatgtcaggagcggtgggcttgcctccgcctcttcctggaccgagcgtgcagccatcacttgggccatggagaccgagagagcttccctgtcccacacaggtatggaagcccagagctccaggatcaccacagctgcccaatcatccagaaagaggtgtggagagggaaacaatcatgacgcggaccgccacgaggtttctccctgatggacggggaagtcttgtttgtggaagacactgagccacgctaagaagccgccaggcttctcagagacggggcagacacagcaagagggaggtcagagcagaggccagagcccaggcaggatacgggggggccatgccaccaccaccggcatccggggaggagtgtcaaacgggtgactcggccaggaaggccagcctttgagagacagacatgcttgccccatccccttgccggcttccttctccgtccctgcgtcgagctgtggctacatttctcgatgagggcagagggcgacaggcgtgacaaccaccttcttgaagctctgcgggcaccctcctgcgggtggacaatgagcgcctgggaggccgttgtccttggttggggagcgctcgtctggatccagcctagcaaagaggctgctccggatggggaggggatgaaaacccctgcgggttcgacgccgatgcccacgttgcccaggccttcacagacccccaaactggaactgccgggacgacgactgccaaccggccacacgacccaggcagagacgcggggacacgctgaccagaagaaaggccgacgtgcaagaaacccaccctccggcgcacagggcacatgtgtcccaaggcgcacgcacacacagacggacagagacagacagagagggcgacggaaacagcgagaagggagagagagagagagagagagagagagagagagagagagagagagagagaggtgagagagagtcagaagtcggcacacagacacgcactgcgcgcgcacacacacagacacacacacagacgcacccccccaacacacacacacacacccataacgaacacacacgtacagcagggaacacccacccgcaggcagcccctgaagctgccgggttctgctctccgcgactaagagccaccggtgagagagcagcccacgggcacacaggcggacctgtgctcgtcatcacaagggctccacttttggggagactcacccgcacaccgtccgcgcacgcctgaggctgggatgccgcgctgcctcgccggcgatctgtctgagttttcttcctcctggcgtttcttcctgctggtggaccctccgcgaatcccggcctccggaaaccgtcctggtaactgccctgaccaggactggtctcagcccagactcagacgcacgatcacacagggctcctacttcgccaagtgtcagggacccatccccgggcaacggtggctttcactgtgacccaagcggcggcttgggcctcgcgcatgcgcactggcgaggccgactc

SEQ ID NO: 36259 - DNA, 2758 bp, Artificial sequence
  DNA replication origin
gccagtggactcactggtcggtgtaatttcagtagacaccacatcttggggcccatgggatctttctgtgccccagcgagacctttcccacctcactacatcgtaacgccattactgatcaccgggtcggatccataatcagatccgaagaggactccggagaggccagccggcgccctgaagctactccgccactgggaattgaagcagaagacagatcaaggaggtcttgaacacgggaatcctatgggtccgaccctgggtctcccacaggaacctctcccattcctcaccccacacgatacctccaacactgctgcggccgtcgacaccccactcccagcagcagcagcgtcggcgccattttgcaaaggatccgcgaccttagtctccggagtaacaaggggggcgggggagtcggcctcgccagtgcgcatgcgcgaggtccgagccgccgctttggtcacagggaccgccacagttgccccgggatgggtccctgagacctgggaaagtaggagctctgtgggatagtgcgtcagagtcggggttcagaccagtcctggccagggaagttaacaccgcggtctccggagcccgggattcgcggaaggtacaccaccaggaaaaaacaacagcagcaagaaatctcagacagatcgccggggaggcagcgcgggaatccagcctcaggagtgcgcggacggtgtgccggtgagtctccccaaaagtggtgcccttgtgatgtcgaggacaggtctgcctgtgtgcccttggggctgctctctcaccggtgggtggtagtcacggagagcagaacccggcagcttcaggggctgcctggaggtggctgttaactgctgtaggtctctatgccttacgggcgtgtgtgtgtgtgtgtgtgtatgtgtgcgcgcgcctacgtgtctgtctgcccacttctatcgctctcttacgtctctctcccttctcgctctttccctcgctctctctttctgtcattgtccatctgtctgtgcgtcactcttggcacacatgtgccctgtacgccgcatgctgggtttcttgcatgtcagcctttcttctggtcagtctttttctggtcagcttctccctgcctctctgcctgggtcgtgtggccagttggcagtcgtcgtcccggcggttccagtttgggggtctgtgaaggcctgagcaacgtcgccatcggcgtcggacccgcaggggttttcatcccctccccatccggagcagcctctttgctaggctggatccagacgagcgctccccaaccaaggacaacggcctcccaggcgctcattgtccacccgcaggagggtgcccgcagagcttcaagaaggtggttgtcacgcctgtcgccctctgccctcatcgagaaatgtagccacagctcgacgcagggacggagaaggaagccggcaaggggatggggcggcaagcatgtctgtctctcaaaggctggccttcctggccgagtcacccgtttgacagtcctccccggatgccggtggtggtggcatggtccccccgtatcctgcctgtgctctggcctctgctctgacctccctcttgctgtgtctgccccgtctctgagaagcctggcggcttcttagtgtggctcagtgtcttccacaaagaagacttccccgtccatcagggagaaacctcgtggcggtccgcgtcatgattgtttccctctccacacctctttctggatgattgggcagctgtggtgatcttggagctctgggcttccatacctgtgtgggacagggaagctctctcggtctccatggcccaagtgatggctgcacgctcggtccaggaagaggcggaggcaagcccaccgctcctgacattggccttctaggaaaggcggtgttgcatcccacctgcacttcctctctgattcttgagggccaaccggttcctccgctcctggggaaagtgccttctagcaccgaatcttttggctgccacggatgtcagggagccaacgggactgggttttggctgggtgcaggggaggttgcgtcaggggtacctagccggcggcgggctgggggtggggtgtactttgtccaaacgtctcggctcctctggcgggcctccctgaacgtggcgtggactcgcgcacaggccctgtctcgcaggttttcaggtgcgcttggcttttcctccgctttgtggggcaggtctccagtggccccccgggcgcacgcctggacatcactgtccgtctcgtcgtcgccccctacggcctcaaagacacacgcggcctgcatgtgctcttgggggacgacagtgccacatgtggacacactggcaccagctcggactcgcctctgtctctctttgcccgtgtcgccggaagccgcgtcgggatgccggagccctcgggccttggagatgaaggcaggcccctgctcctgccaggagggagggaggcagtgggctcatgggtcggtgcctttgcagccgacagcacgccttgcggccctggggatctttctgtgccccggcgagaccctttcggcctcactgcattggaaccccattcccgatcacccggttggatccatcatcggaccccaagaggagtccgcgcagcccagccggcatcccgaagctcctccttcagcgggaaccgaagcagaagagcgatcaaggaggtcctcaccacaggactcctatgagtccgaccctgggtctgccgcaggcccctctggcagtcctc

SEQ ID NO: 36260 - DNA, 865 bp, Artificial sequence
  DNA replication origin
tgaagctgccgggttctgctctccgtgactaccacccaccggtgagagagcagccccaagggcacacaggcagacctgtcctcgacatcacaagggcaccacttttggggagactcaccggcacaccgtccgcgcactcctgaggctggattcccgcgctgcctccccggcgatctgtctgagatttcttgctgctgttgttttttcctggtggtgtaccttccgcgaatcccgggctccggagaccgcggtgttaacttccctggccaggactggtctgaaccccgactctgacgcactatcccacagagctcctactttcccaggtctcagggacccatcccggggcaactgtggcggtccctgtgaccaaagcggcggctcggacctcgcgcatgcgcactggcgaggccgactcccccgccccccttgttactccggagactaaggtcgcggatcctttgcaaaatggcgccgacgctgctgctgctgggagtggggtgtcgacggccgcagcagtgttggaggtatcgtgtggggtgaggaatgggagaggttcctgtgggagacccagggtcggacccataggattcccgtgttcaagacctccttgatctgtcttctgcttcaattcccagtggcggagtagcttcagggcgccggctggcctctccggagtcctcttcggatctgattatggatccgacccggtgatcagtaatggcgttacgatgtagtgaggtgggaaaggtctcgctggggcacagaaagatcccatgggccccaagatgtggtgtctactgaaattacaccgaccagtgagtccactggctccctctttctttggtgaaaccgtggcctgctt

SEQ ID NO: 36261 - DNA, 923 bp, Artificial sequence
  DNA replication origin
ccgcacacagccctctccggtacctgcccccgtggcgcaggcgcgcagtggagggggccgcggggttctctgggagatgtagttcaacgatgacggccgtggcgcaaagcgttctggggctcgtggttcgcggggtccatggggaacgcggtgtcgctggttcagatctcgcagagctcagagtcctgcatgcctcagtcctcgcctcgctcctcctcgcggaggattctgggaggtgacgtcgcgggtctcggtcgcggggcccgtttgcagagcccgcggcgccgggaggtgagtggggccgggccccgggcgggagcgggaagtcaagggcgggctccgggtggcccggccgcgccagggatgggaacccggcaggagtcgctggggaggccgtgtgtgtttcactgtattaccaactatgtgacaggctgcgggtgtgacagaatgtgatcttgtgtcactgtgtgtgtgtgtttgtgcgcgtgcgcccgcttgtgtgtgactgtaaccatctgtgtctgggggtgaaactgtgaatatgtgtgtttgtgtgtgactgtctctgcaggtgtagctgtgtatgtgtttatgagagactggggtgtgacattgtgtgtttgtgtaaatgcatgtgtgtggttatgtgaccacctgtttctgcggatacaattgcgtttgaatgtgtgtgacagcaagtgtgattgtgcgactatgaccatctgtctccgcaggtatagttttgtatcagtaattgtgacaagatgtgtgacttctgtggtatgctactttgtgtgtgattgtgtgtgattgtttatctctgttggtgtagttgtatgttaccatctatctttgtgcttatgtggctgtgtattgtgtgagattatgggtgtgtttgtgtgactctatacatttgtgattgg

SEQ ID NO: 36262 - DNA, 907 bp, Artificial sequence
  DNA replication origin
tgtcggtccccttggacatgcatcctcagagcgctcctctcccaggaggagcctcccacccctggggcttcctcacagcagcaccttcgagctgaggtggtgggcaggagctccttggaaccctcccttcctccatccgaagagcttgttcctttccacctctgacttcggtgtcctctgctcctcctctcccggcatcgccccttccctgtgcaggggcagcgattggggcctcagccttagttcttccagctggaccctgggatggtgcggggctgtggctctgggaagtatcttggcctgcacgcggtttacatcattgggagcacaggcctcgccctccgaactacgaggcccagagcccttcgcgccgagcgtttcccgcctttcccctgtctcaagtcattgcccagaggccactgcgggccgttcctgcctgtccgtggagctgcggcccccgtgttcccagggtgaacgagcacgtgcgaggcggtggtgcttgtatccgggataaccaggtagggcggctgcatgcttcatagaggccagcctgtgccgaccgggagctgtaggacggtctgtgtctggggctgcttatgggtattcgcgtgcgtctgccggtgcgcggtccgagcctactcacgagagcgtgtgtgtgtcttctgtctcgtgttgctatgaggtttgcatctgtgtggctggaatagcttgtttgtgggggcccgcgcgtgacctgtgtgtgcgttactgtgtgtgtctcaggcaggatagtgacgggccgtgtgactgtgacgccatcatcaggttggtgagatggcgtgaccgcgtgctgcctatcagtctcctgtatgttcctccaccatctatcttgatattcagcctgtgatagtctttggtcagcttccat

SEQ ID NO: 36263 - DNA, 979 bp, Artificial sequence
  DNA replication origin
agtccccaggtctgcaggtggtgtgtgcaggtggctgccagctgtggtggtagtggcaggttgtgtaggcctgacctcagaccctgggaggagtgctcaggtgccaacggttgtggactgggctgggcgatccccagacccctggatggcactctcaggccagggactgtccttgagccatctggtggtgcttgcaggtgctgactgtggtaggcagggatggggttatccccaggccaccaatggaaagcacggaggggcagggggagtagcagctgtgctacaaccatgctattggggacatcacagttgctttcaaatggtagcagccatagggagctgggggaaatgtgttttgctcacctcttggtcctgcagaagcctacagtggtggccaatgcaggcagtggatttgtccttagtgctcctgaaaatgtgcagccaccactctgcttgtgggaagtggggtcactgccagtggctcctgcctcatccctgctgggatagctatgggtggcaaatgtgatggggttccagggatgtggagatgcagggcctgttgggccccagggcaggatgcattctggtggggattgggctatcaaaatggtgccatgcagcagctgcttaggactcaagggtttgtgggacccaaaatgcactccctctctggagcaatgcccttgtgcagtcttcaggcagctacctgtgttagtctcagggctcatgagggtagagggggtctcccttggcgaagattagccattgatgggaatgtggaccactgggggtctctcacttaaccgtttccctgcattagggagcctctccaggctcccagactctcctggccaagcaggctgcctctccttctttcaacttttcccatcacttctctgtggcattccagtgttctccctcagatgatctattcaaagtgtgattatctatatgctaatttggttcctttctgtggaag

SEQ ID NO: 36264 - DNA, 850 bp, Artificial sequence
  DNA replication origin
ttgagttcgcggccggctagggcgaaactacagttcccaggaggactcgcgcgaagcggcttggaagtgggcagcctggaagtcactcgggccaccggagctggcggcgtctccagcgagcggcgcggagctggacgccgcgatcgtggggcccgcgaggcgggcagccggggcgtccaggtacgtggctccgggtgcaggatcggcctcgcgcaagggtggcggggaatcggtggctgcccggaccccgagggtcagcgcgggcggacggccgggtgtgggtactggccgtggggggcggcggcgccgggactcgcgccctccggacccagccggactcgtgcccgcatggctcaactttccaggcgtgcaccccggcgctgtggtgaagagcttggaggcggggagcggtggattcgcgtcccggctgtgccactcgggagccgcgatctgggaaaaccgcgccgaacctcaatttcccctgcagtaaaacggagtaggagagcatcttggcggagactctgttgagataatataataaaacatttggcacataggaggcacttactacgtatttgggttattgttagctctccgaaaaatgaggtgaagatgttatcgattgcatagggtgaggattagttgagcgtgtgcatgtaaagaggtgagtccttagttagcacccaatgcaggctagctgctgttaaccgagattattttgttaagagcgttggtttggaaggcagagagaccccaggttcaaatttgaacatttaccagctgtgtgactttgggcaactggcttcacctctctgtgccttggtttccctatctataaaatggggattta

SEQ ID NO: 36265 - DNA, 876 bp, Artificial sequence
  DNA replication origin
ctgggggcagaagatttattgtgcagtgatgtgcaaactcattcattcattccattgttaacttcttcattcagcaaatatttactgaacatcacatatgcttccagtgccggggacggagcccgataaggtctgtcctcctggagttcattgtttaggttgggggacacagtcaaggaagaagtaaacagattaataagataattccagatggggatgaataatgctgtggagtcaggaaagcagaatggcgagagagacacgcctggaagtagaagggattgtgggaggctggaaaactggggtcgttgggggagagcctcctcggggtggtgacatgccagctgagagtggagtggtatgcaaaggtgccagccttgtgaaagatcagggaagagctttcccagcagagggaacagcaggtgcaaaggcgctgaggctggaatgagtttgacgtgtgaaggagtgtggggtgggggtgggaaggagggggagggcaggagacgggggtggcgggggagcctggtgagggtgtgggtttgattcagagtgtcctcccatgccctctggctacggcgtggagcatagattgaaggtgggagtggaagtagggcagtgaggggcagcctgttttgcagtgaggagagaagtagagtcccggatgagagtggtggcaatggggacaagaagtgggtggcccaacagaacttgtttagggattggtcatgctgggtggtgagtgggttgaaaggtttaccagcgggttcaggctttggtctgcaggattttgtggtagtaaggatagccccagtcccctttaacatgggctgaggttttctttcaatttttgtatttttagtagagacaggttttcca

SEQ ID NO: 36266 - DNA, 847 bp, Artificial sequence
  DNA replication origin
tccacaggaggtctgctagggactggggccttttccttacatggatagggggagggttctgagcagaggaaggacatgatctgacccatagattaatagagtccctctggctgtgtgtggcagcaggagccagagccaggaaattggggcagaagctcctgctgtggtccatggtcctgcctgtgggggtgtgaaggaggggtgagcccatttatatcttgaaggtggagctgacagtgagtactgatggcctggatgtaggggtgagagaaagagagggggctaggatgaccctgaggtttgggcctggacaccagctgaggggtgaagatactgcattgagggaccccagggtcggggtttgcagggagtggcagaaggccttgtgaagaatcagagacgtggctgagtctgttcggtgctgggtgcccgtcagacagctgcgtgagatggcaaggagacagttggatacgcatacctgaagttgagagaggtccaggggggagaaggaaaagtaggggtccccagcacagaggtgttgaaatcacgaggagagccgtgtggatggggaagagcgaagctgtgcggagagacggcgaggaatcagcgaaggaggctggggagggagtgccagtgaggagggaggagacctggagagtatggacccctgcagtgaggcaggaggttgatgagggcccgaggtgattgctagatgggaggcacaaaaggctgaagggagcaggttcaagagagacggggctttgttgaggcctgtgaaggtgtgactacacgtgttgtttgttgctttctctctgttcaggccacacctggcacacaatagctgcac

SEQ ID NO: 36267 - DNA, 1234 bp, Artificial sequence
  DNA replication origin
agggggaggaaggccctgccgggggaccggggccacccgtcctggaactccacgtctttggaccttctcctggagagtcggtggaaggctttggaccctgaggaagccggggtgctggtggggggctgtccgttctgtatgctcctcatggaatgggccatcttggtggcctttgtgccatctgtgtcctgggaggggcttgggttgctgtgctctctcagggcctcccgcttgggcggccagtcggccacccttgcgcgcacgcccatcttgggcattgcgggagtggtggggctggggcgggtggtggcggtggcggtggcggtggcggtggccgggctctcgccaagaggctgggacatgctgccattctgggcccagaatcccaagggagcgtagtcccctgtgtgtggcccagggaggacatcgcccaccctggcgccacagctggctgccaggtccacaccatcgctggggatggcccgataggtggtcatagtccacgggcactggagtgctgctggccccgtacgctgtggtgtcactctatggggtcccccagccctcagccattgttcagggcagccaggcccaggatgaaggatgctgggccctgaaacctgacaggaaggttgtgagcctgtggagtccagttctccaccatcgctgtgcacagctgagccaggacaacctcaggaagcaggtgctgtcctgggggctccagaccgagtggctcagtagcgcagagcaggcagtagctgtggtcgcccgccagctggaggcagcaaggatgttgtcctcgccatgctgaaatggaagaaaaggaaaatatgagctgcgatggccgtgttactgctcccagaaagtgggacatgtgacttttcttgacagccttactcatttaaaaaatctttttattatggaaatttgcaaacatactcaaaagcagagaggagactgagtcacccatcagctccaacaaccactaactattttccattcccatttcatctattcacccagccttgtgaccttctttgtttctgatagaatgttttagagtaaaccccagacatcatttttttttttttttgagacagagtctcgctctgtcacccaggctggagtgcagtggcatgtgcttggctcattgcaacatccacctcgaaggttcgaatgattctcctgcctcagcctcccaagtagctggaattccagcatgtgctaccatgcc

SEQ ID NO: 36268 - DNA, 1559 bp, Artificial sequence
  DNA replication origin
ccacccaaccttcccacccacacgccatccgtcacctttgcccacgaagtaatcctggtagtagcgggcgcccaggtccacatgctcgatgctgtactgccggggccgactctgcgtccgctgctgctccttgggaacttccaacaccgagatgctggcgttggtgcggtaggcgctcagggcgggctctgccaggtggccctcgccgctgctcggggagcccacggaagcccgggagaagctcacgttgcgctcacactcgcccccgatctcattgcggaagtgcgggcagctgagcagcaggtcgttgctgttgtcatcgccgaggtcctgctccaagttctccttgcagtttaggtcctctgtgctggtgaaggccgggtccaggcctccgaggctgtgggcccgcgaggccgtgagggaggccatggccgaggcggcggaagcggccgaagcacccgtggtggtgttccgccgctgcgacaccgacaccctgttggcggccgcctcgttgaggtcgaacagcatgctctgcacgtcgaagtgggcgaagctcttctgacacacccacggcctgctggcttccggggggctccggccctcgtcggcctcccccggggaacgcccagcctccccctcgggtttgctgctccttagcttccgaaagatggacgagtccaccgtgtccccgccgccgaggccccgcgcaggtttcttccgggccttctccttctccttcgtgggctgcagtggcaggaggctgtccttggcgggctgcccgttgtgggagtcccccttggctccgccgccgccccccatgaggtgtgggccaggatctgcccggaggagctcggtgagggcctggcaccctcgggcgtcgggctgctcgctgcggaactcgttcaggatgtcgaagaagctctgctcgggcatgccctgcacgtcgatggacgaggtgctcccgtactcgcggaagaggggcagcgcccccgtgtgccgggccccccgcggctcccccgcgtcctccgcgtcacactcgctgagggtgatctcgctgctgctgcggtgccgaagggggaggaaggccctgccgggggaccggggccacccgtcctggaactccacgtctttggaccttctcctggagagtcggtggaaggctttggaccctgaggaagccggggtgctggtggggggctgtccgttctgtatgctcctcatggaatgggccatcttggtggcctttgtgccatctgtgtcctgggaggggcttgggttgctgtgctctctcagggcctcccgcttgggcggccagtcggccacccttgcgcgcacgcccatcttgggcattgcgggagtggtggggctggggcgggtggtggcggtggcggtggcggtggcggtggccgggctctcgccaagaggctgggacatgctgccattctgggcccagaatcccaagggagcgtagtcccctgtgtgtggcccagggaggacatcgcccaccctggcgccacagctggctgccaggtccacaccatcgctggggatggcccgat

SEQ ID NO: 36269 - DNA, 1642 bp, Artificial sequence
  DNA replication origin
cagcccgacgcccgagggtgccaggccctcaccgagctcctccgggcagatcctggcccacacctcatggggggcggcggcggagccaagggggactcccacaacgggcagcccgccaaggacagcctcctgccactgcagcccacgaaggagaaggagaaggcccggaagaaacctgcgcggggcctcggcggcggggacacggtggactcgtccatctttcggaagctaaggagcagcaaacccgagggggaggctgggcgttccccgggggaggccgacgagggccggagccccccggaagccagcaggccgtgggtgtgtcagaagagcttcgcccacttcgacgtgcagagcatgctgttcgacctcaacgaggcggccgccaacagggtgtcggtgtcgcagcggcggaacaccaccacgggtgcttcggccgcttccgccgcctcggccatggcctccctcacggcctcgcgggcccacagcctcggaggcctggacccggccttcaccagcacagaggacctaaactgcaaggagaacttggagcaggacctcggcgatgacaacagcaacgacctgctgctcagctgcccgcacttccgcaatgagatcgggggcgagtgtgagcgcaacgtgagcttctcccgggcttccgtgggctccccgagcagcggcgagggccacctggcagagcccgccctgagcgcctaccgcaccaacgccagcatctcggtgttggaagttcccaaggagcagcagcggacgcagagtcggccccggcagtacagcatcgagcatgtggacctgggcgcccgctactaccaggattacttcgtgggcaaaggtgacggatggcgtgtgggtgggaaggttgggtgggccgaggcttgcctccgagacccccactactcattcattcactctgtgccaggccctgctctggcactgaggatgtggcgggaacagagacctcccttctggagggctgtgaggatccggtgagcagagccacccgggcctcagccctgtgtctgacacagcagcactccataaaccttgagctacaggacacagctctgcatttactcagcacatatggacttggggacagctcagtgccaggcactctctagagcctggggatgtagtatcaaccagcttaaaacaaatgttctgtcttcctagtacttataatgttttcatgggtaacacaaacatagaacaggataaatacgaaaaatacacaagggattgtaggctgctaaatgcagtggaaaagagtacagcagggaagaaggaaatggagtgtcggagggtgggggcagatcccagtgggggatggtcagagggggcctccgaggcaggtgcagtttgagtaccaagctgaagtcaccatgtgcaaattgcagacactgttcccagaacagagcagcgaatacaaaagtcttggaactgcccggcgcagtggctcacgcctgtaatcccagcactttgggaggctgaggcaggcggatcacttgaggtcaggagttcaagaccagcttggccaacatggtgaaaccgcatctctactaaaaatacaaaaaaattagccaggcatggtgacatgtggctgtaatcccagctacttgggagg

SEQ ID NO: 36270 - DNA, 874 bp, Artificial sequence
  DNA replication origin
ccccgtctgagaagtgaggagaccctccgcctggcaaccgccccatctgagaagtgaggagcccctccgcccggcagctgccccgtctgagaagtgaggagaccctccgcccagcaaccaccccgtctgggaagtgaggagcgtctccgcccggcagccaccccgtccgggagggaggtggggggtcagccccccgcccggccagccgccccgtccgggaggtgaggggcgcctctgcccagccgcccctactgggaggtgaggagcccctctgcccggccatccgccccgtccgggagggaggtgggggggggttggccccccgcccggccagccaccccgtccgggaggtgaggggcgcctctgcccggccgcccctactgggaagtgaggagcccctctgcccggccagccgccctgtccgggaggtgaggggcgcctctgcccggccacccctactgggaagtgaggagcccctctgcccggccgccaccccgtctgggaggtgtacccatcagctcattgagaacgggccatgatgacaatggcggttttgtggaatagaaaggggggaaaggtggggaaaagattgagaaatcggatggttgccgtgtctgtgtagaaagaaatagacatgggaaacttttcattttgttctgtactaagaaaaattcttcggccttgggatcctgttgatctgtgaccttacccccaaccctgtgctctctgaaacatgtgctgtgtccactcagggttaatggattaagggcggtgcaagatgtgctttgttaaacagatgcttgaaggcagcatgctccttaagagtcatcaccactccctaatctcaagtacccagggacacaaacactgcgga

SEQ ID NO: 36271 - DNA, 1300 bp, Artificial sequence
  DNA replication origin
atccgatttctcaatcttttccccacctttcccccctttctattccacaaaaccgccattgtcatcatggcccgttctcaatgagctgatgggtacacctcccagacggggtggcggccgggcagaggggctcctcacttcccagtaggggtggccgggcagaggcgcccctcacctcccggacagggcggctggccgggcagaggggctcctcacttcccagtaggggcggccgggcagaggcgcccctcacctcccggacggggtggctggccgggcggggggccaacccccccccacctccctcccggacggggcggatggccgggcagaggggctcctcacctcccagtaggggcggctgggcagaggcgcccctcacctcccggacggggcggctggccgggcggggggctgaccccccacctccctcccggacggggtggctgccgggcggagacgctcctcacttcccagacggggtggttgctgggcggagggtctcctcacttctcagacggggcagctgccgggcggaggggctcctcacttctcagatggggcggttgccaggcggagggtctcctcacttctcagacggggcggccgggcagagacgctcctcacctcccagacggggtcgcggccaggcagaggcgctcctcacatcccagacggggtggcggggcagaggcgctccccacatctcagacgatgggcggccgggcagagacgttcctcacttcctagatgggatggcggccgggaagaggcgctcctcacttcctagatgggatggcagccgggcagagacgctcctcactttccagactgggcagccaggcagaggggctcctcacgtcccagacgatgggcggccaggcagagacgctcctcacttcccagacggggtggcggccgggcagaggctgcactcttggcactttgggaggccaaggcaggcggctgggaggtggaggttgtagcaagccgagatcacgccactgcactccagcctgggcaccattgagcactgagtgaaccagactccgtctgcaatcccggcacctcgggaggctgaggctggcggatcactcgcggttaggagctggagaccagcccggccatcacagcgaaaccccgtctccaccaaaaaaatacgaaaaccagtcaggtgtggcggcgcgcgcctgcaatcgcaggcactccgcaggctgaggcaggagaatcaggcagggaggttgcagtgagccgagatggcagcagtacagtccagcttcggctcgggatcagagggaga

SEQ ID NO: 36272 - DNA, 1263 bp, Artificial sequence
  DNA replication origin
caagcttgctctaaatgttaaactgtggtaactaactaaatacatctgggactgtatccaacctgtggatttgagaccttctccttgtctgatttagcaccatctgataggttctcctggcatcctccacaccccccttttaagctcttggcacttcaattgcgtggtgtttttttttgttttgttttgtttttgtttttgtttttgagatggagcctcactctgtcaccaggctggagtgctggagtgcagtggtgcaatctcggctcactgcaacctccgcctcccgggttcacgccattcttctgcctcagcctcctgagtagctgggactacaggagcccgccaccacgcccggctaattttttcgtatgtttagtagagatggggtttcaccatgttggccaggatggtctcgatctcttgacctggtgatccacccgcctcggccttccaaagtgctgggattacaggcgtgagccaccgcgcttggccgaattgcgtgtttaatatctgtcccagagaggagcaccatgaaagtaggcctgggtctgttatggtcatcactatgtcccagcactggccaggccaaggccaggcgcataacaacactcattcaattaaccagtgatgggataccgttagttcaggatgtctggggcagttgagtcagcctgccggggagagtgtggaatctgtaccctgtgggtgcttcacaaagagagagactcactgtcacaagtcattcaaaacgggcctgcccctccacgggagatggcttatgtcaccattccctggcccactggttccccagcaggctctggggcactgagactgggggtgggggtgggggtatggctgtggaaatatgctccaaaaggactccgccaacagtaggcacgggggtgggtgtgggacagagtggcacagtgaggatgtgggtaaaacatgtcacctggcatggtgcctggcatggtccctgctcaagaaacgcgagctgctgtcaagattaggggaggcggagtagcctagtgtttaagaacccaggcttggccgggcacagtggctcaggcctgtaattctagcactttgggaggccagggagggtggatcacttgaggccaggagttcgagactagcctggccaacatggcgaaaccctatctctattaaaaaggcaaaaattagctgagcatggtggcgggcgcctgtagtcccagctacctggggggctgagacaggagaaatgcttgaacccgggag

SEQ ID NO: 36273 - DNA, 1271 bp, Artificial sequence
  DNA replication origin
caaacccctgcctaaacactggacatgacggggcatccttcagtcctgagaagaaggacctactgttatcgcctcttgacagctaaggaaactgaggctgtgggctaggaagtggctgcatctgtctaggcaagaggccatggtgagctttgaagccccagttgcccaactcagggcctgctgcacccatgaatgcttcccaacctgctgtctccatcagagcaaggcagcccgagagaggcctggggcagtagctgctggggacattcaccccatgtcacagccagaaaacaggacccctgagaggagcccaggggtagggctgtcggcccaagcggcctctgccccctccttcccttaggaacccgccttgccccgccgccaccagctccctggcaggcttcccaggcgagactctcatcccggacccgcagctaatagcacgtttccaggcttactcatccagccttcctaaccgctttctctcatccacagcggagcctcccgtgtgtctaaaacccactggcgagcaaggctcaggctcaggctcaggtggttttcgacataggctgatctttaaccctgggcacgttcttctcatcccctgcaggtacacggctgccccacaccccctgctatctcttgatccccacttcagccacgatgggacgtccagcggcgactcctcttccggcggcctgaccagccaggagagcaccatggaacgccagaagccaggtagggcccccaccagctgctgcgcccacccgcctgcctcactccgcaggacctcttacttagagcttgacaggcaacactccccctcttgtgagtgacggataaaacacaaaagaaagctgtaagcgccacatgtaagactagagagggcacctaggagagcagcggaaccagcaagcgagatccttatccgtccagacagggcatcggcaggtggcgtctgctcccgctgataaggccagagccggcgtgcagctgtgtgacatggagctgggagccaccagggaaggtagctgaaaaagattaagcattgagctctcaggagcaggactggctgcgtcccgtggcttttcattacataaaccctcctgtgttgttttcaacttttatggacatacggcacatgttaagagcccacatggccaggcggggtggctcacgcctataatcccagcactttgagaggccgaggtgggaggattacctgaggtcaggagtttaagaccagcctggccaacatgtggaaaccccat

SEQ ID NO: 36274 - DNA, 929 bp, Artificial sequence
  DNA replication origin
ctcagtctcaaaaaaaaaaaaatccatgtggataagagtgtggcctttagtgtcagcccacctgcattcaatccctccctcagcgacttcttggctgtgtacccccaggcaagtaactgaacctctctgggcctcagtttcctcatctgtgaaactagggataaaccacatacctacatcatagggatgtggtaaagattgaatgtacccttagaacagtgctttgacttgaagactgcctgtcagaatcatggggtatgagggtgtatttgaaaaacacacagaaatgaggccttgcctcaaattcacgaaatcagaatatcccccctggtccaagacctgttacaggcagtgctggggacacagcggtgactgggggagccccagtcctgcctgactgacgcattcccagacagagacagcccagaggggtcaggtcaagatgggcgaggcccaggcagaggggtcagggtcagggtggggggcccaggctaaggggtcagggctgggatacaaggcagctgcgaagaggggtcagggtaagatgaggggcccaggtagaggggccagggtgagatgaggggcccaggtagaggggccagggtaagatgaggggcccaggtagaggggccagggtgggctggaggggggccaggcagaggggttggggccatgatggaggggtacagggatgtgagagcccaaagggggcccccctaacccagttgtgagaggggccagcccagttgtgggaggggctttcctggagaaagagtctgagctagccagggaagtcaggagggaaaagcagtccagacagagaatgagacggactcccactgtccatctcaccccacctcactccattggcctcccacagtcttcccatttcagtaggcacaagttccctggatggtcacagagccacc

SEQ ID NO: 36275 - DNA, 1406 bp, Artificial sequence
  DNA replication origin
ttttttttttttttttttgagatggagtttcgctcttgttgcccaggctgcagtgcaatggcacagtctcagctcactgcaacctctgcctcccaggttcaagcgattctcctgcctcagcctcccgagtagctgggattacaggcacctgccaccacgcccggctaatttttgtatttatagtagagacagggtttcaccatgttggccaggctggtctcgaactcctgacctcgggtgacccacccaccttggcctcccaaagtgctgagattacaggcatgagccaccatgcctggccaaaaatttttttaaattagctgggtatggcagtaggctcctgcagtcccagctactcaagaggctgaggtgagaggatcacttgagcctggaagttcgagacagcagtgtgctgtgattgcaccactgcactccatcctgggtaactgattgacaccctgttgatcaatcaatcactccatcctgggtgacagagcaaggccctggaggtaggtaggtaggtaggcaggtagggcagccaatgggaggttggggaaatcagcagtggccagaacattcagggccctaccagctccattatggagtttggatctcatcttaagagcagccagggtaatgcgggtggatttgtgttccaaaatatggtgctggcagcgagacaggaggcaaagtctctgagggggctgaggcttggatctgcatgggaggacgtgggcctgagctggaggacaaagcaactgtggatgtggcagcaggcggcattgccaggaagtaagctgggagggagatgcaggcccagggcagagccagcaagccatgtgagagtccagggtggctgccacgtgtctggaggctgccgtggcctgggagcacctgaggtgcttgtgagaagaggaggcagagtggggcagccagcggggactgattcttccagtcactgacctttgcagcccctactctgtgccaggtgtcgcagcatccttcccttatggagctgtcattctcctggagacaggacaagacagacagacagccgaaccaccgtggagtgtgccaggaggtgataagtgctggggaggaaaggcaaaaacagcgggtctctgggaaggcttctcaggaggtgatgcgttgtaggaagccagggtgagatccaggcagtggaaacagtagatgactagaccctgagggtgaacttactctcaatgctccagaaatggtcaggtggccagaggggctgaagcaggtgggatggggggagagtggcaggaggtcagcatagtgaggtggcaggagcctggttctagcgggcatattgaccaaagtcagatgctgggatttggttccaagggacatgggagccatgggaggcatttgagcacatcatc

SEQ ID NO: 36276 - DNA, 1684 bp, Artificial sequence
  DNA replication origin
ggtttacaaaactgccagtgcagagactcctcggccctcccagctggcccagcccagcccctttcagctctccgcctccgtccccaagtccttcttctccaagcagcctgtacgcaataagcacccaacagggtggaagagaacggaggagcccccaccacggccactccccttcagtgacccaaagaagtaagtgcctggacgtccagcgaggcgcccgccagatccacaccagggcgtctccggggcggaaagagggtgatgccacatgctgtcattgcacagacgactgtgggccagtgtaccagtgtacacactggggctgcagctgcaagcaggacaggcgagaacccctcttggggagctggcattccatttggggtgaccaacaataagtagaataagagaagcacgcaataggtcaatggtggttatccttgtgccatatccgggtgtggaacattccagggagaaggcatagcagctgcagaggtcctgaggcagtgagtgacacggttgcctgtgggcaggccggggtggctggaacagtttgggccaggggagggtgtgggaacatgaggtcagggagggatggggacagaccatggagggtcttgagggccacgtggaagggacttggcatcttccctgactgagatggagccacgggagggcatggagcagagagggggcaggatctaaattgggcattccagggtcgctgtggctgcgtgtggggaacagcctgcgaggagcagggaggagctgctgtcatggtccaggcgcagacgaaggggcgggagcagggtgggggcggagagggtgagaagggggcggttccggatagattatctgaaatggagcagaccgggcttgctggcagggtggatgtggtgtgagagaaagagaggggttgaggatggtgcgtcgtcttgaagcccggaggacagacttgccttgagtggggagcaggcttggggaaggcacagtagctcaatcctggatgcttcggtgcgagattcgcaggagacatccagacggaggcgtgaggggggcccttgagtaaggaatcccgaattcagtggagaggtcaggctggagggagaactttgggtgttatcagcctagagctgcgaggctggaagagcccctaaggcagggtgtggagagaggagaaatgtgggactgagactgaaaccccttgatgttgagccaaagtgagaagccggggaaggcggggaggtgcggaggcggagaggtgcggaggcggggccagggccaggagaggcggagctcgggcgaggaggctgggcccaggccagggtgatgagactgagaaccgactatatagggttaatcctcccagaggtcgccggagggttcaggagaaaagggtgaggcagaattgaggagctgcgtgagcagttcatttggggcattttgctttaaagtgaaagaggagaggggtgtgcagttgagaaagggttttgtttttcagtcggaggatacaggagctaacattgcctgagcactcaccacatcgaggttcagttctaagtggtttgatgcgaatgaatttactggatcccacaacagctccatgggggtggacctgtcctccccccaccccacccctttttttttgagacggagtttcattcttgttgcccaggctggagtacaa

SEQ ID NO: 36277 - DNA, 762 bp, Artificial sequence
  DNA replication origin
taacatgggtgggcaggagtgggcctagagtgggggtgcgggttggggggtgggttccaggcagaggaagcagtgtgtacgggtgattgttgaggagggtaacagggttcagcagggcccaacttgggccacactgaaaagtgggggccttatagtatctacttattggggtcacgtgagaatcaaacaagatccacacgtcttatgttcaggatggagcatgccctgtgtgccaggcacgttacaagtgccttgtgactaagacggtggcacctgtttcccatgggggacacgggatgtggaacagagtacagtgacacagaatgacagcctgggctactgaaggccaggaggacctgtttgagggggtggcattagagcgagtcctcatgagctgcacccaagaagatctggagggagctcactggaggcagcagtgagagccagtgcaaaggccctggggtgtgcctggacgtggagagtgtgaggaacagcaagaggccagtgtggctggaacagagcaaggaggggagagtggatgggaacgagggcagaggtgaggggcagatcatccaggctctgagcgggagtttcggcaaagaacatggcgcctggtataaacgtgtgtagtcaatgtgagcctgcatcattaatcccgggagcatggggaggctgctgagtttttaagcagttttaatcatcagtctagttttcagaatcccctctggctctcagtgtgagctcagcacacttgcctgctga

SEQ ID NO: 36278 - DNA, 1455 bp, Artificial sequence
  DNA replication origin
aggacattggtggcgagtccttacctacccagcatccatttctgccccatttccttccttcctccctccctcccttcctccctcccccctccctccttccttccttttttgagacagggtctcactctgtcgcccaatctggagtataatggggcgatctcagcttactacaaccttgacctcctgggcttaagcgatcctcctatctcagcttcccaggtaggtagctgggaccacaggtgcatgccaccacccttggctaatttttacattttttttatagagatgagggtctcattacattgcccaggatggtcttgaactcctgggctcaagtgatcctctcaccttagccacccaaagtgctgggattacaggtgtgagccaccacccctggccttctgcctcctttctgatcaaagcgctccagttttcccccagggactcccactccccaaccccaccctccagctccgggtaaggctggcgatcaaagcctgatgggttggggaaggtggtgtgagccaagctggacccaccagagtcagtgctgggaccccagtgggtagcgctgggctgatgtgctctcttcccccagctgtaggctggtgggacccaaccctggggaggctggggtccacctcagtccccacaaaacagctcctgcctggcagtgaggacgagtagggcaggcctggctgggaggggaagggaagtggatgctgtggaggttccctggcacccactgttctttccacccgtgtccctgagtaacaagagtctgaacttcctctgggagcccctgctccactctcagtccctgtggtttgggtggatgtggctgtttctatcctgggctggaggaggagggcacgaggccctccagttgtgcgaggttctcggtatggggtagattcccgagtgcctgcctgggcttatcctgtgattccatcccagaccaatgcgctgccctcactcccagccatgagcccatagcccccaacaggactggcagatgccaaaggctggggacacgacgggaaggagctggcgtgaccgtggggagcacagcccttctccttgcctgcccagatctgggatccccttgggagctgggggtcgggagcgggggacagggccctacgtactcccgtgtctctctcctgctctggccccaggttgtccatgatgatgagtttcttcaggtcatcctcgatggtggatttgtagttcttccgtggtgaccggaggtctcggagggatgccctcaacctcggttgcccaaagacatttttggtgttcgtgtccacctgcctggaatgacagcgtcagggtcagaggggtgtcagggaggctcaagccacttttcaaagctgtttggattcaagagggccggccaccacgggacgcatggccacagccttctctccttcacccagcaaacgcgtggcagag

SEQ ID NO: 36279 - DNA, 1054 bp, Artificial sequence
  DNA replication origin
aaggttgtagtaagctgagatcgccccattatactccagattgggcgacagagtgagaccctgtctcaaaaaaggaaggaaggagggaggggggagggaggaagggagggagggaggaaggaaggaaatggggcagaaatggatgctgggtaggtaaggactcgccaccaatgtcctagaggggaagatgcctctgaggaccctggctatgagccagtctgtgacctcccccaacatcccacccacgccccacagcagtcaccgcagaagggcctgcagcggacgctgtcggacgagagcctgtgcagcgggcgccgggagcccagcttcgccagccccgctggcctagagccagggctgcccagcgacgtgctcttcaccagcacctgcgccttcccgtccagcacgctgcctgcacgccgccagcaccagcacccccacccgcccgtcggccccggtgccacccctgccgccggcagcggctttcccgagaagaaatgtgagcctgggccccctgggactggcgcggtagttaccccaaggttgggaggtggggatgcccgagcaggggctcacctggaggtcaaaggctagaggtcatcagtgtcggggccatctcagggaggaatggggttcacaggaacttcggggggcctgatggtggggcactgggtgtcacccaaggagcaagggatcattggccaagcatcagagggtcacctaggagtcagaagcacccaaggattggagtcacctgagaccagagaagaagtccaccctcagggtacaggcctagggaatggggctgcccagctgttgccctagcaccccccaaccctcccacccattccagctctaagcggtttgcttcctgagcattttatttgctttcctgactgctcccatgtttgccacacttgggggtggtgcatggtatgacttgttcactgcttaatcacccagaaaatatttactgagcactccccgtaaacaggtactgcgcacaccacccgcatcaaaagccacgagccagctggagttggccgtgccccag

SEQ ID NO: 36280 - DNA, 1229 bp, Artificial sequence
  DNA replication origin
tcagctggtgggagccacgggagtggctgccattgctgagcagggcatcaggagcaccgtgtgacaggctccttggtgtggagggcacttggttagtgaagcccaggccagggatgaccatgtctcttcatctgggatggggcccgggaagggctctggagcaggcacacaagaaatggagaggcccagggtccctggccacactgaggccagacgggactctccccagctcaggggtgtgggggagtcagatggacagagaagggtgtgtgtgtgctgtgtgatgcagagggacctgagctggggtcacagcagtgacagagaaaaccccaggccccgtctttggggggcccccggtatggtggtggagacagacacattctcatctagtgacagctcaggatggtgatggggatacaaggcggtgagtagggacggaggggggtgagagaaacccgggggggcggggggggacggggcctgtggtggtgcctgactcagcctggtaggggaagggagggcttcctggaggagggggcatctgagccaagactgaaagaatgaggtacagcaagctggaggaattcggatcggcctgtggagtctatgcctgtgttctctgtcaccacctctccgtggtggccgctgtccccgtcctttgcagtgactgaacatctacttcgtgaccagccctgccttgggcagagagacagagcagcagggaggagaggccgaggaaggagacgtggagggaagcctggggagcagggaaatttccactaaagtggcagccctgtgagggcaggggtgtgctctgcttgctcagggccacatcctggcaccgagggcagagccccgcccacagcaggcgctgcaggaacaggaagggagcgcaggggagggcccagaagctctggagttgagatgggggctgggacccagtccagggcttagaggagccttccaggaaaaagcaggaatggagccagccctgaaggacaagagtgacccagaagaggactgagggaagagcatggcgggcggagagaacagccgtgcaggatgccctgagcagggagggtctggtgtgctgagtgatcaaaaggaaggctctgtgaggtggaggagcagaggtgggcaccccacaccaccagggcaaggagtgcagatgcaaatgccaaggcaacggagctgcaggggaagtttttttttttttgagatggagtctg

SEQ ID NO: 36281 - DNA, 995 bp, Artificial sequence
  DNA replication origin
cccctccgtccctactcaccgccttgtatccccatcaccatcctgagctgtcactagatgagaatgtgtctgtctccaccaccataccgggggccccccaaagacggggcctggggttttctctgtcactgctgtgaccccagctcaggtccctctgcatcacacagcacacacacacccttctctgtccatctgactcccccacacccctgagctggggagagtcccgtctggcctcagtgtggccagggaccctgggcctctccatttcttgtgtgcctgctccagagcccttcccgggccccatcccagatgaagagacatggtcatccctggcctgggcttcactaaccaagtgccctccacaccaaggagcctgtcacacggtgctcctgatgccctgctcagcaatggcagccactcccgtggctcccaccagctgagcagtgagacgccagcaggctagaggcacagaacaaggaggccaggggaagagcaaggaggcccagggtggagcatggaggtcaagggtggagcaaggaggccaagggcggagcatggaggtcaagggcagagcaaggaggtcaagggcagagcatggaggtcaagggcagagcaaggaggtcaagggcggagtgtggaggtcaagggcagagtgtggatgtcaaggcggagcaaggaggtcaagggaggagcatggaggtcaagggcagagcaaggaggtcaagggcggagcgtggaggtcaagggcagagcgtggaggtcaagggaggagcatggaggtcaagggcagagcatggaggtcaagggtggagcatggaggtcaagggaagagcaaggaggccaagggtggagcgtggaggtcaagagtggagcaaggaggtcaagggaggaacatagagtcaagggcagagcatggaggccgaggggggagccaggaggccgaggggggagcaaggaggctgagggacgagccaggaggccaaggactcgtt

SEQ ID NO: 36282 - DNA, 1649 bp, Artificial sequence
  DNA replication origin
tcaccacacagcctccacctcctgggctcaagcgatcctcctgccttggactctcagagtgctgggattacaggtgtgaaccactgtgcttggcctcacgtgttttacacgtggtgttttgtgtaatcgtcatggcagcctcaggcatggtcacttccgcttgttggtcaacgtggttcgctggcatcaaagagatgacgacgcttgcccggggctgcatggtaagcaagtgacggggcaggacttgaaccctgctccctgattctggaacctgagtgggtatccctgcaaagccatgaggccctccatgaatccctctagaacagaggacggggtgggggcctggcgggactgggtggaaggcgcctaccttcgtatgccttggctgcgttcaccaggctggaccactcgaggccagcagctgtgtcaggcaggggcatcagcccagggtccaggcgccgcagggggcggtcccgcccatcagccagcgagagctccgaggctgagatggtggctggatggggagggtggagatggcagtggttgagtgtgacaatgcgggagacacaaatacatgaagacatcccattgcttatgcagagatgctacatgcccaggaaaacctccagcagggtaaggggtctgggagtgctggagcctacagaggcctgacttcaaacagggtgctgggccaggcctggcagagatgccatctggacaaaactctgaaggggaggagggagtgcaccaggcggattacctgggggaggaacattccaggcagacggaacagccagtgctaaatccctgaggcaggagtgtgcctggaaggtttaaggaacacagaggcggcccctatggctgggagagggtgagcaagggaggaagcagcaggaggcgagaacagaggcaacacggccggaccgtgtggggcctgtgggtcccagtgacgactgtgttctcaccctgagtgccctggaagactccctctgggtgcatgtgggggacggactgtgtgtttggggggggatttggggggagacagggagcaggtaggagctgtaaccataacccacaatggagacggtgatgctgggcaggaccagggtggggccgtgataggacacaggggcagattctgggcctacttttcaggggcagccaataggatttcctgagggttggatatggctgtgaaacaaagagaagggccaggattgcggctctgatcgggaaggctggggtgggggatcagaaatctgtttctggaggtgctcggtggagatggccctggacattccaaggagatggtgggacggaggctggccacaggagctggcgacgaggagagtcccagctgcacctgtgattggaatcgccagtgtatggacagtgtttacacggggtggggttgccgtgggggggcaggttcaggtatgacacgctgagcagaggagaggcctgtgacatctcaggagttggaagtgagaagcaacggcgccagcactgcactcgcacctgctgcggctattgagagagtcccaggcaccaggctcgggctctggcctggggctctgtgactccttgaagcccctgagggaaggggacagaggacagccaggtacagagagaccagaagacacacctca

SEQ ID NO: 36283 - DNA, 1313 bp, Artificial sequence
  DNA replication origin
gggttttaaaaaagggaaactgagactgcaggtgggggaggtggtgggttttggggggatgtcccctaatccaggagtgccccctcacttgtcaccgagtctcctctattgcctgcctctgctgtgaattaacttgttctgtgtattaaactgggcctgacccctctgcccacgactgcctcgttctcccgtctggtttggggcatcaccaagaaggaggaccgggggtcgacgggccttgttgggggtgaggcgaccagccagcccctacctccatccacctccttcttcccctgcctgcaccctgcctctccccggctttgtcccagctccgccctgctttgccagaaaggaggagaagggggatggggtggaggggctcccgcccagccagctgtggttgccctggcaacgggctgctgcagctgcagcgggcgcagccgggagggaggcgggagccgggccgggggaagggaagggctgggaagaggacggtgggttggcccctcctgaggctggggtggggaacgggggtgtcaggaggtgtcatcccagacccagacatctccagggggctccgtgtcctggatgtggggcaaatcagcggtggcgataaggtggaaagagaggcgctaagggagggcaggagggtatctagacacgggcactgggagagagactgagatgtgggcgacgggtggggggcgggagtgaggagtgagggaactaggacacagatcaggagagagaaagagacgaggacagtcacacagttattgagagaatcagaaaaaagagcaagagggtgcagaagggagagagacaggaggaaggaccaggagagaggaagggagcaggggtgagaaggaggtttaacggcagagagggaataactaataaaaaatagctgacatgctgggagagacgggaggaggagaaggaggacggtgattggggaagagcagcagcagatttagggagaggtcctccaagaggggaggcagagaaggaggtaacatctatcaggagagggaagagtgagagggagccacattgcgggtggagagagagagacttgggatcaggggcaggcaaagtcccaggacaacaggcagagatggggagagacgcgggcggcaggggagagaaggagacagactttaggggaacagcagaacaatctgcagagagagccggaggtatgagggacccagaaagattggggaggagagacagggatgtccgagacgggcagaggaagctggaaactgggacacgaagggaagggccgggcctcaaagcacagtttgggc

SEQ ID NO: 36284 - DNA, 850 bp, Artificial sequence
  DNA replication origin
aaaagacaaaaagttaaaaaaaaaaaaaagaagaaaagaaaagaagttaatatatacaaagagtcctccaaggcctggctgggtggaggggcgctgctgagagtgtccaccgggcacccgcctctgccggccccccgccgggcgccccaaccccaatttctggagctgcagccgtcccgcgccccacccaaggtgggcgccttcccctcttgtgcccagggcggtgggcgtggtgtccacccgcccctcctggtgcccacggtggatactgcatgatgtgaaccttggttttgaactctgttcctgcccctccccgaccgccccagcctgtgcccgccccgtgcctgccgtggctggtgggtggcggtggtggggccgggtgggcccccgcccagcgcctgctggaatgagaagcacagactccgccacggactccttttctctccctcctcccgccccgccaggcctggcggcccccgcccccctcgctggccattttgggggagtgagggggcgtggttgtttcttgtggttgtgtgtgtttgttgttcgggttttaaaaaagggaaactgagactgcaggtgggggaggtggtgggttttggggggatgtcccctaatccaggagtgccccctcacttgtcaccgagtctcctctattgcctgcctctgctgtgaattaacttgttctgtgtattaaactgggcctgacccctctgcccacgactgcctcgttctcccgtctggtttggggcatcaccaagaaggaggaccgggggtcgacgggccttgttgggggtgaggcgaccagccagcccctacctccatccacctccttcttcccctgcct

SEQ ID NO: 36285 - DNA, 817 bp, Artificial sequence
  DNA replication origin
cctgcctttatttttaattgaaaaaaaaatttaaaaaggcagagttgggagtcccgatgagaactgttttcacctctccccacagcttggggtagctactcactcttcccagctccccacgcctggactaagaggtccatccttggggctgaggctgggggcagggtggagccttgcctgtggtgagagtccctctctctgtcccccctaccccagagttttacaaagaattggcctgggtccctgaggcacaaaggaaacacacaggtacggatgcctccttctgctcctaaagtctgcagccacctttgcggggtgcccttgcctgccccgtgccaatgcctgtctgctgtcttgcagccaagaaggcgcccgacggcactgtcatccccaacggctactgtgacttctgcctggggggctccaagaagacggggtgtcccgaggacctcatctcctgtgcggactgtgggcgatcaggtgatgctccccacctgaggtttctgggggccgggtgcagaggacattcaggagtgcagacctggagggagggaggcaaggcggtgaggaccgaggggacccggagcatgtaggggatactgtggataaccagagctagcgaggctgatgcaactgctgaggattgtgggaattgggtcggatcagtgaggctttagggataatgggatgtggctctcatggcactgtgggtagctgcctgtgcttagcatggcatcaagagtagtgagaggccaggtgtggtggctcacgcctgtaatcccagcactttgggaggcagaggtgggaggatcacttg

SEQ ID NO: 36286 - DNA, 1611 bp, Artificial sequence
  DNA replication origin
gcaatttgaatttgcaaaagacactgttttctcactttcttttttcttttttttcttttttttgagacggagtctcgctctgtcacaggctagagtgcagtggcgcaatatctgctcactgcaacctccgcctcccgggttcaagcgattctcctgcctcagcctcccgagtagctgggactacaggcacgcgccaccatgcccagctaatttttctatttttagtagagacggggcttcaccatgttggccaaggtggtctcgatctcttgacctcgtgatccgcctgcctcggcctcccaaagtgctgggattacaggtgtgagccaccacgcctggcctgttttctcactttcttggcccctcactcctgactctccccacaggcatatggcatcgggggtctccggaaacgccaggacaccgcttccctggaggaccgagacaagccgtatgtctgtgatagtgagtccttctgaagagggggaaaggcagagagaggggtgcccagagactccccacctcgtggccctctccctcccgttccagacccgggttgggaggctgctcaggtctctggctgaggggggaggtgtgatcctggaggccagggtggaggcggcaggggcccggaggggctgacaggccctcctggctcgctcgctccccagtctgtgggaaacggtataagaaccggccggggctcagctaccactacacccacacccacctggccgaggaggagggggaggagaacgccgaacgccacgccctgcccttccaccggaaaaacaaccataaacgtgagctggcaggccaggtgggggtggccaggggccctgggagtggggaagaggagcccagctgggggtgggggtgggggggcattagacatttctggaaaatctccagctcagccgttccctccccccaccgaccatggggatgctggctccggggttgccatggcaaccaaccatcgctccttcgctcctggccgggcgtaatatttctgggtctgatttattgtttcaattagagcttggggagggggggtgatagatggctcccctcccgccctgccttccctttctcctttctctgctaagctttggtcaaggggcagggtctgtggcctgggagcccttggcttccgcccttgccaatcccatgccagttctgacagctgaaggatgggggaggggaggagggtttgggagaggcagtagggagacactgtcttcccacctatctctcagaggcagaggctgagtgtcttcacccctggccactacacacccacgcacctcagtgttcggagtttttcttccgagtgtctgtttccataccagatcttggctggggtactcgctgaatttgttagatacaaattactgagggtgcagttgggagtggctggctgggagacatgtatgtgagaagggaggcagggagcccttcctcaagctgtctaccaagttttgacccaataaagaggacatgtcagttgtctcaaggagttgggaatcctggctgggtgcagtggctcacgcttataatcccgccactttgtggcagtggccgaggtgggaggatcactggaggccagga

SEQ ID NO: 36287 - DNA, 1312 bp, Artificial sequence
  DNA replication origin
cgtcgccgcgattggccgtggccctcgtgctcccgccccccgggaatgaatggatgggcggcctcagcgcccgcccgaccgctgggaggaccgacccggcggggacctgctgggggcaggacccggggagcaagatggccactgtcatccctggccccctgaggtggtgcgggccggcgggaggcggagaggaagcgcgggcgggtctacgcgggcctgtgtgtgtgtggcgaccgggggtggggccgaaggggtgtctggggggctgtcaccgagtgcggggctgcgcgggggtgcgagagtgtgtgactgtgggtctctgacaagaatggtgtcggatgcaccgctccctggcggggtggagggcgtggggggcctccagattctttttggggaagggagacatcatcccttccctgcaaccctcgggtctgggagagactgaaatgacccgggggtgcgggggccttggcaactggagtgaagtccacactacctttgtcttgggatgtggagtgtgtgtgtgtatcacttatttgtgttctggtttttttaagaatttttgggggataggtgtgtggacatgtgtctgtttccttttattctgcactagatatctttggatatttgggtctcccagtgtgtgtccgtgtcctttggaactatatgtcatttgtcttgtgttctgtgtttttgggtatgtagggctgcgtgtatttgtgtgtaaatttttgtgtgactatgggtggatttggctgtttctgtgttttatatgtgtgtgtgtctgtgtggatgtgtgatattttagatactggttgcgcatcgtgcatctttgtaaatgtgtgtgtgtacctgtgtgaatctgtgtgatttctttgtgttgtgtgtctggatattgtgtgtgtggtttgtgttgtgtctttggatacatgggtaagtgcctaggggcgcaagtggtttctgtagttcctgtcttttgacatgcttgtgtctttggatgcatgagggggtgtatgtgtgtgtggtgtgatgtttccatgttgtgtgtctttgtgtgggtgatgtgtttctggtgtgtgtctgtggatatgtgatgtgtctttgtgcatggttatttgtgtgatttgtctccacactatggaacttgggatatttgtctttttcagtagatatttatgtgtgcacgtgtgtgaggtttgtctgtttctcctttgtgagtattgggatttgtctctctttgtgtgtgaatcccgtgtgactgtgtgtgatttgtgttgtgtgtctgcatgtgttcaggtagggatacgtcccg

SEQ ID NO: 36288 - DNA, 822 bp, Artificial sequence
  DNA replication origin
acctcctgagttcaagtgattctcctgcctcagcctcctgagtgggggagtataagcatgcgccaccatgcccggctaattttgtatttttagtagagactactaccatgttggccaggctggtctcgaactcccatcctcaggtgatccacctgcctgggcctcccaaagtgccgggattacaggtgtgagccactgcgcctggcctgccagtcacctcttaaaatgctttacctatatttactcatttaatcctcacaacactccagtgaggcatcatcctctttttacagatgaggaaactgaggcccagaaaggttaagtcatttgccaaggtcacatggccaccaagtggcagagctaggatttgaaccctggaggtgtgactactgtttctaacctgcactgctgctgtcaggcctgcagaaggcgttgagcagggcggggtgaccgtgagcgtggctgctgggagagacagccccgggtggggtctctggagccaggagggacttgggtggggggcggtgagggggtgtctgctggaagcatgttggtgagaagtctgtgtgggcacctgggaggtgtctctgcgtctcttagtattgcagtgtgtgtgcgtgtggctgtgtgagtccgtgcgaaggtgtgtgagtaggagtgtgtgggaggctgtgagtatccgcgtgaatgtgtgtgtaaactgccatgcgtgggcgtgtgcgagtccaggtgtgcatgtggttgtgtgcacgcgagagcaggatatgtggacgagtgagggcgggtgagtgacggtgcgtgccccgggcccctcctccgcgc

SEQ ID NO: 36289 - DNA, 1060 bp, Artificial sequence
  DNA replication origin
gagagtatgtgggagtggtgtgtgcaggtggttagggcagaaggaaagaaaggagagcccgctgcaagtgtcagcctgcgtctgtgggtagatatcctgctggtgggccgggcatggtggcttatgcctgtaatctcagcactttgggagggcagggtgggcagatcacttgagcttaggagtttgagactagcctggccaacacagggacaccctgtttttacaaaaatacaaaaattagccgggtgcggtggcacaggcctgtagtcccagctacttgggggtttgaggtgggaggatcgcttgagcctgggaggtggaggctgcagcgagctgtgttcatgccatggcactccagcctgggccatcgagtgagacgctgtccaaaaaaaaaaaagagaaaaagagaaagaggaaagaaagagaagaaaagaaagaaagaaagaaaggaaggaaggaaggaaggaaggaaggaaggaaggaaggaagagaaataaaagaagaaaagaaaagaaagaaaaatagaaattctgctggtagaggaggactgttaggaaggtctgcactcagtgtctacactcgggcttctcttaatcaaatcgacatgagagtttggggtggggcaggagtgagtctgcgtgtctgaggctagcggtgtgggaatcaagtgtaagagggtgtgttacgggacctgtgagctaatgggaggtgagagaggaaggtggggtcacagctcaccgtgggtaaggtgtgaggtggccactatagggccctggaggccagagtgatcgtaggggtgtcagtgcccctcacttaatccccttgtcaccactccaggccatatgtgaatcagagacctacctcctgttccaggagaggggccggccaagaccttacctggcttagatgggcgagtttgtggaaagggtctaagactagaggagtgtgtgtgtgtgtgtgtgtgtgtgtgtgtgtgtgtagaagtgaccgtgagtgtaggaggccttgactggatctctctcttggggggatttcaagtgacaaaaatggtgaaggctag

SEQ ID NO: 36290 - DNA, 1587 bp, Artificial sequence
  DNA replication origin
gcgttcgcctcttcccgggcccggtggctgggaatccggaagcctgggtccgagcctggcccctcctgaccctctcctctccttgccatccctcgcgctctccacacctccccttccccctctccatctcgctcttgcttcctcttcgggatcccggactccacgtcccagcgctccccaccccccgttcccaggcggtgacagcgggctccaagtgacaggcactcggccgctcccgccctccctccccgcaggcgagcgaggcgctcccctccccctcctcccgggcctggtggaggaggcggagggcgagcgcccgcggcgtcgcacaaaggggccggggcgacctcccccacccttcccccaaccccgtgcgctggctgccttgaccttgaacatcgagggctgggggcgggggtggggggtggggggagagagggagagagggagcgcccccctaccccacccacgagaagggatgcgcctgctggctggaccagaggccgccagttgcttctggtttctggcgggaatgggggtgggaggtggagggtgggagttgggagaggaaggggggcagggacttagaggcaagcgcctacacgtgtggcttcgccgtgagcagggtgccgggagcgggtgtgtggggctcgggtccgtgtgaggtggtgtatgatggtgacacccctctgctgccctctcaccctaagtggcacacacagacagctgtctctcctgtgaggggacatccgcaaaatggctgggaacggggctcttgtgcaggttggtggatctacaggcgatggggcccctcaccctgaccctggcccagacccctgggaggaggtgtgctacagccgtgagcaggggcccagctacagtaagcctggactgggagggccctacccctctgtgcccttcccttccaaaaggtctctgtgggggtgaaggtggggactccctggctcctgaaagaatgtgagtcaaatcccctggggagaaggagctgcagggtgccgccctcggaagttccgactgcctgagttccaaaaccagcttgagccacgaatgttccctgccgtgagcctcagttttgccatctgtgtatgggggcttctaacagcccttaccacccgatgggactgtcgtggggctaaggccatctttgtaaagcagttagcacagagactgacactgaccaaatgtagtgattattattagtagtatcaatattgatttatgaaattgatttctactgtgggccagctcccacacagggcattgggggatggggcaggaggattgtttgggccagggagaggactgggagttcaagtgtgtaggagagtatgtgggagtggtgtgtgcaggtggttagggcagaaggaaagaaaggagagcccgctgcaagtgtcagcctgcgtctgtgggtagatatcctgctggtgggccgggcatggtggcttatgcctgtaatctcagcactttgggagggcagggtgggcagatcacttgagcttaggagtttgagactagcctggccaacacagggacaccctgtttttacaaaaatacaaaaattagccg

SEQ ID NO: 36291 - DNA, 1172 bp, Artificial sequence
  DNA replication origin
tgagagggcagcagaggggtgtcaccatcatacaccacctcacacggacccgagccccacacacccgctcccggcaccctgctcacggcgaagccacacgtgtaggcgcttgcctctaagtccctgccccccttcctctcccaactcccaccctccacctcccacccccattcccgccagaaaccagaagcaactggcggcctctggtccagccagcaggcgcatcccttctcgtgggtggggtaggggggcgctccctctctccctctctccccccaccccccacccccgcccccagccctcgatgttcaaggtcaaggcagccagcgcacggggttgggggaagggtgggggaggtcgccccggcccctttgtgcgacgccgcgggcgctcgccctccgcctcctccaccaggcccgggaggagggggaggggagcgcctcgctcgcctgcggggagggagggcgggagcggccgagtgcctgtcacttggagcccgctgtcaccgcctgggaacggggggtggggagcgctgggacgtggagtccgggatcccgaagaggaagcaagagcgagatggagagggggaaggggaggtgtggagagcgcgagggatggcaaggagaggagagggtcaggaggggccaggctcggacccaggcttccggattcccagccaccgggcccgggaagaggcgaacgctcggaggaccgcggccagggagaaagggagggaatccccggagaccgagggcgctcccggcaccccctcctgggcagccggtccccaaagggatcagagatgctcccgtttgatgtgtatgcgcggggagagggagggatgccgcggtccagactgacggcgggttcggggcttccagttcccgggatcccgggaggaaaaaggggaggcagcggggatggaactggggacccccgacgtctcagctcccaccctgcggccgcgagggccggggtcctcagagaaagaaggggaaagagagaaaggcgctttgatgagcggagagcgggtgatggaaaccctggagaccgaggtccggacttaggtgttcgagctttcagccccggccggggcaggcccggcacctccggagaccctgagggagagatggaggagagggaaacccctacccccactctgggtggggaaa

SEQ ID NO: 36292 - DNA, 1201 bp, Artificial sequence
  DNA replication origin
ccgcgaccctggaggggctcccgcccccaaccccagggggcgacagggggtggggacccccggggcaagggttcgcgctgggggcccccattcaactacggtccgcgcgctgcgtccccctcctcagccccagggcgggcgggggaagggctcctggtgggggggtctggacagggggcggggacggcagggacactcacgacttgagcgggttctgaatggcggtggccatggcccgctcggctgggccgcctccggcccggggcgccgctgccgccgcgcgcgggcccagcccggcctgcgccgcccgctctgccgcccagcgcgctacgatttcattcattcttggggctgcggcgcgagcggagcggggcgggccgggggcggggctcagccaatccccgcgcctcccagcgcacgacgggacgtggagtctaggggcgcgcggcggcgcccgagggcgcccctgcccggactacacgtcccagggggcgtcaggaggaccgcgctcccattggctgctggggatacagggaggggcggggctccccccagagcatctttcctccctccctgggagtgctcggtctccaactcgggatctccaccctccaggcaccgcgggcgcggaagcaggtggtccctagcttctagatgtccccagggtatgtggatgaccctagggtctgtcgtgtattcttgtctaggcctatttgggtgtctcttctatgtcggacagcctgtgaacaagcacaggggttaatcagtgcctttgttcatttactgagtgcctgctgtgttccaggaactcttctaggcactggggatacagcaatgaccaaaacaaagttgccgctctcaaggagctgacattctagtggagaaagacagataataagaaaataaatagataaaatcatttcagacagtgaaaggtgctataaagaaaagaaaatggggccagtcgtggttgctcatcactttgggaggcctgtaatcccatcactttgggaggccaaggcaggtggatcatctgagcttaggagttcaagaccaatatgggcaacatggcgaaaccccgtctctacccaaaatacaaaaaattagctgggtgtggtggtgcatgcctgtagtcccagctactcaggaagctgaggtgggaggatcacttgagcctgggaggcagagattgcagtgagcc

SEQ ID NO: 36293 - DNA, 1054 bp, Artificial sequence
  DNA replication origin
aaggcagagagaagggatacattaaaaggcacacttggccgggcgcggtgcctcatgcctataatcccaacactttgggaggccgaggagggtggatcacctgaggtcaggagtttgagaccagcctggccaacatggtgtaaccctgtctctactaaaaatacaaaaattagccgggcgtggtggcgggcgcctgtagtcccagctattagggaggctgaggcaggagaatcacttgaactcaggaagtggaggctgcagtgagctgagatggcaccactgcactctagtctgagcaacagagtgagactccatcccaaaataaataaataaataaatgtcacatccactcatttctagagaacgatgatggtctccatccctctgtggatgtgctggggacacagcagcaaataagatggccccagactttgccttaagcttggagtccagaagagtaacagactcatcaccagacagtgatgtccagaggggtccaggtggggttaggggacacaggcagaggggtcggggctgggacaagggggacacaggcagaggggtctgggccaggattggggagcacaggcagaggggttgggtttgggacaagggggactcaggcagaggggcccaggtgggatggggagcacagacagaggggtccaggtgggatggggagcacaggcggaggggtcggagctgggacaagggggacacaggcagaggggtccgggccgggattggggggcacaggcagaggggtcggggctgggacaaggaggacacaggcagaggggtccgggcagggattggggggcacaggcagaggggtcggggctggagcgggggagacacagggcactgtgggagcccagaggcggctgtctcctggcctagcctgacagtcagggatgccttcctggaggagaggacacccggcctgcatgtgaatccttttgagtcctgaccccctgatctacccagacacagggcaaggttcctgctctgacctcttggggccttaatgcctgatcttcttaatgcccatcac

SEQ ID NO: 36294 - DNA, 2582 bp, Artificial sequence
  DNA replication origin
gcctgggtgacaaagtgaggctctgtctctaaaacaaaattaggtcaggcacagtggctcacccctgtcattgcagcactttgggaggccgagacaggctgataatttgagcccaagagtttaagaccagaccggacaatacggcaagatcctgtttcttaaaaaaaaaaaaaaaaaaaaaaaaaaaaaaaaaaaagccaggcatggtggtgcatgcctgtagtcccagctacttgggaggctgaactgagaggatcacctgagcctgaggaggtcaaggctgcagtgagccaagattgcaccactggactccagcctgggtgacagaatgagaccctgtctcaaaaaacaaaataattttttttaaacaataaaattaaaaaacataaaataaaattttttttaaaaagccactacccacttctgatggcccagctgctcccttgggaccctccaggcctctccatgccccagcatgaaaggattaacctgggttcaatagggggcttccctgatccagctctgggggccattgtccttcctgactggtggatggccctggcaatatttggtgttttccctggctctgccccaatatcaatccctccacccataagttcagagtcctcagagaagggtatccatttcacagaactcctatgcatccttcaaagcccaccttaatgccacttccttcaggaggccctcccagatttcttcaccacccccagagtgaatagctccctcccctctgccaagctcccaggtatcttgagccattcagcacactttgttctgattctcacactcaggcccttctccccccatagtgtgtgagcaccttgatgccagagaccatcttcctctcatctttgcagcctcagtaccaagggccattataagcacagcgcagatttcatggagtggctgaatgatttgtttgctgtgtgatcacctgtactgagtcaatatcggtcacctttggtcatgagcatgccccttgacccagattcctgcaggagcctgcatataggggccctgcttgctgggactggggatgggggtggggtggggagttcaagggaaggcaaggtctaggatataaatcccaagggcgtgggctcagcagggcccgttctcatgctttctggcccgggaggagtgattctccatctggcaggcccagctgcagtgctgggacagggacatgagcagaggccacaggaggagagagggaggttgtggggggagctcggggaagcccatggtaacccggggggaggaaaaacagccacacagtgttattgttacagaaccattaaatacaacttatacacaagcaagctgggcggcgtccggggggcagggagagtgcaagagggtcaggggtgagcagtccgggcccggtcctggagggggctgaggctgccgtcgtgggaggggcttggctggcggaggccgggctgcctgtggaggccttgaagctttgccagcagctcctggatgaagtcctgagacagggtgggggagctgagaacatgggaacagtgcgggggcaccctctgcccctgtccagcccagtccctgacctgggcgcctcctcctgttctctgattgtggggtggggggagttaggggcggaggctatagacatagagagaaaagtgagccgggagaaagacagagatggggaaagggcgatgggagggatggagagaaagagctaggaagagagatagagatccaaggagacagatacggagtgggggagggggagaaacagacacagaaacagagagacatgtagagatagagacagagagagacataaggacagagaaagaaacagagacatgtggagacaggtccccagagatagatccagggcgaacagaaatgcaatgacgtttgtccctagagctagttggagaaacatgaatagttttcccttttaaagcagggaaggaagtgggaggggttgggccgctcagcttcagggcctgggaggatggagggcccccagaggtggggaagggagcccggggtggcggaggcagtgacaggggaggacagagggagactgagcccgaaggctggtggccaaaggacaggcacaggagaggcaaaaacagggcagatgggggaggacagaatggagccccctcagcagatgggggagagagggagagagacaagtaggaggacaaaagacacccctggagaccagaaagagctgcggagggcaggttggggccgggggtggtggggccgggtggtgttccccagagacccttctgccagcttcttccccctcccccatcagagtacttggggccagaacagggagagaatgagggagagaaaactcacctcgacaggtttcccacatgacttcaggagtccctaaaacccccaaccaagaacaaaacaaaacagtaaatgactaacacctactcccctccagccccttccctttcccaaaaggccccagcagcaagacaaatggaagtcagactccagggtggactgcccaccaagcttcaagagaggaacagagcccaaggggcatgtggatcgactca

SEQ ID NO: 36295 - DNA, 1432 bp, Artificial sequence
  DNA replication origin
ctgaggcctgaggcggccggggtggggcagacctcccggcgagcccgagcccccgcccccggctagccccgccctggcccgtaagaagcacccggggcgcgaggcgaaggcgcacagcgcggggccaggctgggtccagcagcgcgatggcagctcagcggctgggcaagcgcgtgctgagcaagctgcagtctccatcgcgggcccgcgggccagggggcagtcccggggggctgcagaagcggcacgcgcgcgtcaccgtcaagtatgaccggcgggagctgcagcggcggctggacgtggagaagtggatcgacgggcgcctggaggagctgtaccgcggcatggtgagcccggggagggctcgggggtggtcggggacagatagagcccgggcgcggagaccccacgcccttggggtctcggtgcacactcgctggtgcacggccagcctggtctgcacaagaggacgagcgccccagggccgggcactcattggcctggccatccgtgctctatggcattgtgcttgtggacacaccgagagcaacacacaaagacttgggtctccagagatgtgtccaaacgcctgtggagggccaggggtttagcatgaggagggaggaggctaagttgagctgaaaccgccacgtctggagaaagagtgggggaaggggggtgtcataaagccaaacacagacatggtgacaggggagatacagccacacagagacccacggcaaaggaagcaaaagcagacacagatgtgcacagtgaaggaagctatagccactcacggacacagcccagaagtaacagccatgcacaaacccacaaggacacaagcgggggctgggggggggtcacctacagttcaacatatgctacagtcacagccacccgcagacacagcggcatgggccacagccgtaggcagacacagcacaaccccactggaacacaaaatgactcaagttacggcccttccttatctcctaaagaaaaaactgaccaccttcaagcacaagcgctgatccgcagccactcaaagacataaaacaacagaaattggcccagcacagtggctcacgcattttgtgaggccggggcaggaggattgcttgacgtcaggagttcaacaccagcctgggcaacatggggaaaacctgtctctaccaaaaatcttaaaacttagccgggcgtggtggcatgcacgcacttgtaatctcagctcctcaggaggctgaggtgggaggattgcttgagcctgagaggccaaggtcacagtgagccaagattgcaccactgcactccagcctgggcaacagagcgagaccgtgtctcaaaaacaaacaaaacccaacagaatttataactacacccagacataaaactgtgtaagcaccgggcacggtggctcacgcctgtaatc

SEQ ID NO: 36296 - DNA, 1209 bp, Artificial sequence
  DNA replication origin
gcaatggagcgcctcgcgttcaggtgccgacgctccgggagggtccgccaggtgccaaagcccccggaagtcgcctttccggaccttcagtgtggggacgcccggccttctcggcgcgcgatgcctgggtctgctcctcactcgcgccctcgccgcctgcgacactcaacggccctcagcgcgttcagagccgcgctacacctcccaacgcgcggaggtcgccagagccaatggcgaacgcctattggaagcggctcccgaaggtggccgggcaggcagggggcggggcgcacctggctaggcagggcgagctgggcgcaggcgcaaagggcaggcacctgcgcggccgctccccggccctgggcgcacctgggcccgcccctggtgccggggaagaggcggggcttgcgcgggcctcgcccccaacagaacctggcggggcggggcggggcgtctgcccgctgagcacctgccacccttcccttgggcttggtgacgacgtcggaggagggccttcgctctaggactggcctcagggtgggaggagggggcggcagacacgcgtttcttggaagcctgtggttttctgcccgcctcgccgcagctttcctgtgaattccttcctgaatttcaaagttcactgggctcatgctccagggcttaatgctggggacccagcggtggccatgccagactggtccctgagtcaccaaacaggaacggcccagagtagtgatagcggaagcttagcacaaagtgatgaaagctgtgatggggaaggccaagcttagggatcagaggctgggtcgctagaaaaccagggcatgatgggagcccagacagctttcccatccagcctgagagagggccaaggagggcttcctggaggaggtgataggcccatgcaaaaacagccccgagccctggctccaaggttctcaggacagatatggagacaaatacttagcacaggcagcatcagaattgagaggaaggaagcccctggggaaacccagagaagacacctgaccaagcctgggagtcaaagagggcttcctggaagaggagttacgtgaacagactctagaaaggggaatggagtggggcaggcacacgagtagaggatagccaacaaggtaatcaacataaatgcattattattgaaaacacttttagattatttctttttttttttttttttgagatgga

SEQ ID NO: 36297 - DNA, 1949 bp, Artificial sequence
  DNA replication origin
gcctgcccggccaccttcgggagccgcttccaataggcgttcgccattggctctggcgacctccgcgcgttgggaggtgtagcgcggctctgaacgcgctgagggccgttgagtgtcgcaggcggcgagggcgcgagtgaggagcagacccaggcatcgcgcgccgagaaggccgggcgtccccacactgaaggtccggaaaggcgacttccgggggctttggcacctggcggaccctcccggagcgtcggcacctgaacgcgaggcgctccattgcgcgtgcgcgttgaggggcttcccgcacctgatcgcgagaccccaacggctggtggcgtcgcctgcgcgtctcggctgagctggccatggcgcagctgtgcgggctgaggcggagccgggcgtttctcgccctgctgggatcgctgctcctctctggggtcctggcggccgaccgagaacgcagcatccacggtgagggccgggcgggtaggctggaggcggggcgcagggggcagaggctcgggggtcaacgggggtctgagcagggagaactggcgggggaggaaactgggggctacttgatggcgttcagcgggtgtggtggaaccagccctggaggattgagccttgaaatgaggtttgggagccttcgacagcgaagacgggcggaggagcgagggttaggagagtttccttcgggtggaggaagagtcaaggggtattgaccaagaaggcgtggcactgccccttcctgtggcaagaacggggtgaggagccgaattgaagaccagccttctcctggcggtggaaagttccatggccaaagctcagggagaggccaggcctgtgagatggtgggggttgggttgggtgacctggtggccgttttagactcggaagaagcccatctcacccctgcctctttggagattggacaagagcctcccctgaagtttttgtagttgagttgcagtaaagtaggtgcccgagaaggagggagcaagaaaggaaacaagctttggggaagaggaagctctgctaaggctcgagagagtattggcgttgagcagctggtgttggggtctttggattggcccttagaagtcggtggtgaataaggtgatttaaacttctacactcttaaggaagtgtggtctgaaaggtctctttgaacaagtgttgttataaccttaactgcttcagacaagcaccagcgtgttttgaaaagagctctcttgaaagcaagaattcattgattcagcaaaacttactgaggccctgctacgtgtcaggcactggcgctggttataacagttaactcagactagctgggttcctgcattcacagagctaatattccagtgggagaggcagagctagtgaaggtttaaaaagcacttgccatgagattaagttactgagaattaaatgaaccaggtgaagtacaccaacagggtgacgtaagatgttgggggcggctttagctcaggtggtcgggggacgtctccgtgaggagggtgacatctgagctctaacatgaagaatgaggcagtagccacacggagacctgggggaccagtgtccagttgcaggcaatagagtacaaaggccttgaagctggaacaagcttggttgggttcagggaaaagacagagccagcctggctggagcaggcgtgaaggaggggaggactggaggaggatgggaggtgggagaggttggctgcagccagatggcctagggctttatagacaggtgctggtgcttgaacccgggaggcggatgttgcagtgagccaagatcgcgccactgcattccagcttgggcaacaagagtgaaactcccatctcaaaaaaaaaaaaagaaggccgggtgatgtggctcatgcctgtaatcctagaactttgggaggccaaggcgggcagatcactggaggccaggagttcaacacc

SEQ ID NO: 36298 - DNA, 1438 bp, Artificial sequence
  DNA replication origin
ctggactttttcagtttaagtaattacgttaggatgtacctcccagttacctggcctcttgctacctctggtgcttactctgagctgggacatggcctcttgctacctctggtgcttactctgagctgggatgtgccatttaacctttgaaacagccgggtgcggtggtgaagttacttgccttgcccgaggtcactcggtagtagtaattgacaaagccaggtctcactgcagaggccttctctgttcagagtggcctacctgactgctgctgccgactggacctactgacctttcagaagtactagtgtctgactgggtgaactcatgccctcactcatcgtaagttctgtttgtttgaaagcttgaacagcttaatcggaggcagaaggcagttttgacttttttttcctcgctccttcctgattgcttctgttttctccggaagcgagtcatccactgggagtgtggtgttgctgaagctccatgcagtggctcaggtgctgctggatgagtgtggtggtgagggaggagtgaacagagaatgtgtgagggagggaggatgggggttggtcaaggaatttattctgtatgaaaacatgagggggcggagggccgaggtagatggtagggccagcagattgttggagttgaggttctgaagggaatgaaccagacagataggatgcagtgggtagtgagtgagatgcatgagagggaggttctgaagaggtggcagttactgagacaggtctaggtgtgaccctgagaggaagcgggggggcgagggtgggaggagatcaggtggaggtcttgggacctagaggtcagaggaccatctacctggatatagaaatctccaagaatgatcataagagcagcgggagaggtggcaggcccggagctaaagttgggaaggaagaagtagttgtctgggttggcagataacgtgccaggcggggtagtgaatgatttactctaataatggaagtctcccagctggggattttggggagggtggagggagaacagtccagaagcagctcccaggagcaaggagacctccccacttggaagggccccaggaggtgtgccctcaggggagattccaattaggtaagagggtggcaacaatgttcagaggagattgaggacatggaagatttgctcaagaccagtcctgagtaccagagggcccaggagttgggggaggggagatggggacaaagcaggccccaccgtgtgagagtgagggttaactcaggggtcggggcttcttgtgagaagcatcatgtggtctatgattgatgtgttggtgacgctctgagtagtgagggcaggtgggaagggacaggtggacgggccggacaaagagtgtcctgactccaacctctgcagacagaggtggggggaaagctgagcttatgccaggtgagaa

SEQ ID NO: 36299 - DNA, 836 bp, Artificial sequence
  DNA replication origin
agccaatcttcccgaagagcaggcccatgaggaccccgccaatcatcctgggggagggagaggaggctgtgtgaggacaaggcccaagggctggggctggcgtgaagggcgggggtactcacccgacatatttgtagcccaagaaggccaccaggtcgatggtggtgaggtcggtgttgacagtgaccagatagaggctgagcaggatggccagcacctccagggtcagccaggccagggctgagctcgcttgcagccccaggaggtctggggagaacctgcaggcacaaagccccgccacttggttggctggttcagaccccccacccccagcacccatctggggacagctctgtgttgggtagggctggacacctggcagtgaccaagatggatgtgcgcgctatcctattcccacggaaatcccatccagagaggatggcagacccatccctagacagtgacacccagagcaggcagggctggagtcacagggggctgtgctgacagtcaggagacaggtgtcagagagggcttcccaggagaggggacaccgagctgaagcctgcaggaaggagctggtcagggacaaagcccttggcctctgccacatccccagggcctcaccagttagttaatgacagatgtgttcagtgccataaaggaaaagaacagggcgatgtgagcaagaggaggggcctgatctagcctggggggcaggaaggcttcccggaggaggtgatactggaatggagccagcagggatgtgcaggtactcggcagtagtggaggggaacacgctcctgggcagaggggagttgatgtgacaaggcccc

SEQ ID NO: 36300 - DNA, 1435 bp, Artificial sequence
  DNA replication origin
agacaggtgtcagagagggcttcccaggagaggggacaccgagctgaagcctgcaggaaggagctggtcagggacaaagcccttggcctctgccacatccccagggcctcaccagttagttaatgacagatgtgttcagtgccataaaggaaaagaacagggcgatgtgagcaagaggaggggcctgatctagcctggggggcaggaaggcttcccggaggaggtgatactggaatggagccagcagggatgtgcaggtactcggcagtagtggaggggaacacgctcctgggcagaggggagttgatgtgacaaggccccaggagacagtgccagccctcccaaggaaaggaatagaccggagcgtgcagcgggaggggcagtgccaggctgaggagctggggcttgattgggagccatggatagcagggcggggcagggtgggccaggcccgcacctcagacaggaccatcctggctgctgctggagtaggggtgcagtggggagctggtgatgacagagggaggatgaggatgggtctggtagtagaggccaagaggaagggtggatggagaagggtcacccagcacaggggatggtgacgcaatgcatgtgggtaggaaggacagggaagaggcgagggtgatgctgacagtgaccctgagggctgtatcttgggccaactgggagcaaagtggggctgtcctgaaaggggaactgagaccttggaactgagaccttcctgaccaaccatgggcctcccaaaccccaccttattcggcctgccccaggcctcccttacctatcctgggtccccagcgcaagaccagccaccaaaacgtaggtgatgaaagccattgctgtgggagacagacacacagacactggtcaccagaggaagaactgccctgggcctccaggcacccacacacccgctccatataggcccggaagagagaggagggtgcagggtagggggagggtgaaacctggaatgtagaggtccggggcattgacgtcaaagcggggggccaccggggtgtcctgttggtactgcacttcccagtcctgcggggatggggagacgggcaggaccctcagagccaggcccctcccaccctgctacaggccctcctccctcgaggcgaatctcccggctccaccatgcacctgcccccacccctgagccccccacaggcccactgcagacccacattcccctgggggtgctgacctggtgtaggtaggggaagaacagcaggcccagctttctgcccacatacatggtgtccacagcaaagtaatacttgagcttggtgatggggatgaagcggtcgatctggggaggcagagctcaagtctgaagccctgtggccccgtgcatccccccactcccaccagccccgcccactcacgttcttatccaccagctcct

SEQ ID NO: 36301 - DNA, 1214 bp, Artificial sequence
  DNA replication origin
caggcaccttcctggtgcattcagtgagcattgggaggcgcaggtggctggagccaagtcattgagggggagcataggagatatggacagcggccttgtgtaaaaggcttggtacaggattttgtgcccaatagcccccccttcctctcgcacatagtagcttttgagataatcatcatcattgatatctggatggatggatgataagtggatgggtgggtgggtgaatggatggttagatggatggatgatgatggatggatggatgatagatgggtggatagatgaatgagttggtggatggatagatagcttggtgagtggatggatggatggatagatggaaagataaatgcatcagtggatggatagttggctagataggtgggtggatgggtggatggatgggtgggtgggtggatggatgaatgggtaggtggatggatggatgggtgggtgggtgggtggatgcatcattagatggatagttggctagatgggtggtggatggatggatggttggataggtggatggatggatggatggatgggtggatggatgaatggatggattgatgggtgggtgggtagatggatagatggatagatgggtgggtggatggatgaatggatggattgatgggtgggagggtggatggatggatgggtggatggatgaatggatggacagatgaatgcatcagtggatggatagttggctagatgggtgggtggatggatggctggatggatggatggatgaatggatggatggatggatggttagatggatagatggatggatgggtgggtgagtgggagggtgggtagatggataggtggatggatgggtgggtagatgaatggatgcatagatgaatgtatcagtggatggatagttggctagatgggtgggttggtggatgaatggcagagcttgcacctgccagtccatctgacatcaaagccagtgtctctaatggtgacaccaccctcctctgcagcaggaggcagagctgtgggatgaatgaggttcgccaggtctcccttacctatcctgggtccccagctccttctcactctcttcccttgcagcctcgaagcggaggatccctgtgtcccagccgggcatggccgacccccaccagcttttcgatgacacaagttcagcccagagccggggctatggggcccagcgggcacctggtggcctg

SEQ ID NO: 36302 - DNA, 1119 bp, Artificial sequence
  DNA replication origin
ggctgaagcaatcctcccgcctcggcctcccaaagtgctggagttaggggcgtgagccccggcaaggggcagacactcattttctgtcgtggcagacaccgcctcctcctgggattggtcccggcctcgccctcctgccactcaggccttgactcgctttactgcatgagcccagtagcccagtctccgcctcttacgtaaggcaccgcccagtcgtccaggcctccgtgaaggggggggctggaggggtcgggggggtgggggcgaggccttccctcaatcctgacgtccattggctgtctcttcgccggcggggcgtgggtacgggagccgggcgggcacgctccgaaccgcggcttaggtggcggcggcgaaggatgcacccggcaggcttggcggcggcggctgcggggacgccccggctgcgtaagtggcgtacgtggccggcggaggagatcgggcgggcgggggcgtggcggggcggccgcgtcggttggcgaggtcactgcaggtcagaggtcacgagatcaaggatctggaaccctgaggtgtgcacagcgctgggatgccaggttcgggtaggaggccccttggggggcgattctttaggaaattcctttagaagaaaacaacttgggactggatagcgtgcgatatgcagagaaatgcaactttcattcatttgcagttagcgatccgcccttccctgctccccacccttccgtggctccccagtacccgcctgctgtcgcccacacccttaggacagcttcgtggccccccgggagcgcagagggccatgcctaccgctcatttaagaagcgaacctgtattgtgctgttggcccccttttcctgtctcttcatctccgtgagtgtgctgtgtgtttcatttattcattcaacctaacttgtctcaactcccatgtgtcaggccctgtgttgggatggagatgttgtgggagccctgaggaggcacatgacccagcctaggggtgtcagtgaagcttcctggaagaggatacttctttttcttttttttttttttttgagacctagttttgttcttgttgccaaggctggagtgcaatggcgcgatctcaggtcaccgcaacctccg

SEQ ID NO: 36303 - DNA, 1595 bp, Artificial sequence
  DNA replication origin
tcgtgagggccccggggtccccaggggttaaggatgaagtggggatcccgggtcctcgccgccttgcggtgaggcgcttacgtacccacggtggtgatcagcgtgctggcgaagaagagagcagaggcgaagtcccaggcggggtccgaggcgttggcggaccccgaagcgttagcaagcacgacccgccccagccgtccggccgccagcactcgctccacgaaggcgtccagggcgggggcagccacacacgggctgcgctgaagcagctgcgcccgcagcgtctccagctcggctcggagcctggcttcgtgcggcccctccagccgcgccaccaacagcgcgcccagcaccaggtacgcggcgtacgcggccaaggcgcccgccagaagcgcgcccctccgcatggcacccaccgggaccccgcgagccctgggtggccccgctgacgtggcccccgcctccggaccgtctggcacctagttccagttccgggagtgctacaggcgcggcagcagatgccccaagaggaagaggaaaaaggggaggtggggggcggcgacggaggaatgccccgcctccgggaaactgaggcacgcccaaccgccaggtgttcgttcggagagggtggagcccagtgctcccagacccagcagaccaacgggatggaaagggtggaggtagtcctctcttcccctcattccttccttctcgtcctcctggaaggctggttctctatgttagaagaatctgaactttcctctctgctcgcaggccgaggagtcgccccccatcgcgcacagcagctaaggttgtgcactgcatcagggcgcgcggctgacggagcaaggggcaaactgaaatccaattctcgctccattcgccaagttgtgagcctcggagtgggaacagcggacaccacagagtcaggtgtcccctgtgcccgtgtggacagagtggggatcctcagctactcaccaaagctttgttcaatgcccactttctgctgacccctcgctggatgatcctggagactcagtaatgatgagaccatcctgcgccatgcattcatggggctcccagtctaactgggagactgacacaagagtgacccacgcctgttgtcccagctactcgggaggctgaggtcggaggattgcttgagcccaggagttcgaggctgcagtgagctatgcctgggagagagtgagaccctatctctaaaaaaaagaaaaaagacagcccagagtggtcagggctgtgatgagggaagcaagggtacaatgatcaagcctggaatcagggagccctagagggccctgggagtccagaggaagcaaccacccctgcctagggaggtcaagagagcttcctgaggaaggggctagctgagctgaagcatgaaggatgaatggaaacaagccaggcagaatcacaaatacacgcctctatttaagaggaaatttttctttctgcgcccccccgtaagtctctccacttctgcctccagccagaactcagcgccttcctgacagccttttggagggcagcccagagtcctaaccccatccgactggcagaggagtggggcttgg

SEQ ID NO: 36304 - DNA, 2175 bp, Artificial sequence
  DNA replication origin
tctctcctctaccacaataactttccatttttaacaagtgttagcatatttttttcttttacaacacacacagcacccttcttctaagtagtgtggtgtgttggctagcagcatgggactctagagcctgatggccttgactaaatctctactctatgccgtctttgctgtgtgaccttaggaaagttacccaacttctctaggcttcggtttccatggctaaaaatatacagcctataaaggcgcctgcctcacaaggctgttgtgatgattaagtgagttaaagcatgcattggcaagtcctctgtcaggctactgctattacagggaaatggggagtgttattatctccattttagcaatgggggaggacactgaggcctggcaatgagccgcggctgagcagggatgtagccaggctgtgcctgacgtgtgtctggcttccctcatctgccctgccagggatgacttcttagaagccaggatctgggaagaggtaggaggcgtgcacatgacccagggaagctcagaagcaggtcaggccgccctggcagcatgggcagacccaggggaggtcagctaacgagaagtcacccagctctgctgccaggggaccaaaagcaaaagctgccccctattgttggccgggagggcgagttaggagtctgggctaaccctgcaccagcctcctctcctcaacaaatccccaacaaagaaacaaagaggaagtctgggagctgagaaggggctgggggagcagcagagcctggcaacaaagagatttcccaagtctggcttctcagggtttcccaaaactcggggtccctccacggtgggtccttttgacacatccctagctggggctgctgaattgggagtcccaggtccagagggaacaggtggtgtccctattgggaggaaaatcctgcattgagagtgaccccatataggggagatgtcaagatggggtggggtacctagggaagggttttgtgtctggggtcagagttgcctgctggggagtatggggccaggagacagatgacagtctggagcagaggcccaggtccagagggccaggagtcccagatggcggtgccaggtccttgctgaggaatctctgttgggagggaggtctttagtgaggacaccctgagaggtctggagatttagggtcctcgctaaggcgccagggtcaggaggaggttgagatggggtttctccaggggggtttcccagaaggacatatctggagggtcaggagacatggcaagggtggcaggcccagactagagataaagtcaggggtcctggcatggttgagttctgggtccagagggggcaaggatctcccttggagggtggcgtgtcctgggtccttgctggaggtctctgaggacagtcctaggcttagagggggctggacagacccgggtcaccaagaggattaagaccggggaatgcagtcccagtgcagtggctcaagcctgtaatgccagcaatttgggagggcgaggcgggctgatcacctgaagtcaggagtttgggaccagcctggccaacatggtgaaactccgtctccactgaaaatacaaaaattagccaggcatggtggtatgtgcctgtaatcccagctactcggcaggctgaagcaggagaatagcttgaaaccgggaggcggaggctgccgtgatccgagatcgtgccactgcactccagcctgggcgacagagtaagccctgtctcaaaaaaagaaaaagaaaagaaaaaaaaaaaagaccgaggaacggggtcccagctggtctctgcaaaggtactctgaggggagctgggtgtttcctacttaggaggaagggctcggacttgggctccccgagcagagcagatatcatgagcctgggtcccgggtcctcactggggtcttttcgggggatccgaagcccagaggggattgggataagggtattcgtgagggccccggggtccccaggggttaaggatgaagtggggatcccgggtcctcgccgccttgcggtgaggcgcttacgtacccacggtggtgatcagcgtgctggcgaagaagagagcagaggcgaagtcccaggcggggtccgaggcgttggcggaccccgaagcgttagcaagcacgacccgccccagccgtccggccgccag

SEQ ID NO: 36305 - DNA, 1308 bp, Artificial sequence
  DNA replication origin
tccaccatccatctctaaaacttttttttttttttgagacggattcttgctctgtcacccaggctggaatgcagtagcacaatcttggctcactgcaacctccacctcccaggttcaagtgattcttctgcctcagcctgctgagtagctgggactataggcgtgagccaccatgcccggctaatttttgcatttttagtagagacggggtttcaccatattggtcaggctagtcttgaactcctgacctcataatctgcccgcctaggcctcccaaagtgctgggattacagacctgagccaccacgcctggcccattgtctcgcccattttagaatagggcaagctgaggctcagagccaggcaagagcctgcacccttcattctttgttttgagaagtactgatcgagcgcccacagcagtgatgaaacacgcagaacctcctgctttgctgaactggcagcctatgagaagacggtaaaccatagagcatgctagaaggtgttaagtgctatgggaaaaaaaagtgttgggtaagaggatgttaccatttagggtgctcaagggaaagcctcactgagaaggtgacatttggatgaagaagacctggagaggagagaggggagcattctttggggaaggaacaaccagtgcaatggccctggggtgggagcgtgctgccctggtggaccctgtggggcttcatgggtcatgatgaggactctttccttttacctgagtgaggtggggccacagaggggctctgtgcagggaaggggcatgactgaactcaggtgttggcaggctctgctggctgaacagattgtaggggctggggatggggaagggagacccaggaggaggctgctgtggtggacaggaccagggtgggggccatgggactgggtgggggagaagtaagtgggttttgggcctatttgaaagttgagataataggcttcactgacagatggagtgcggcatgagtgacgagggcgtcagggatgaaggcaaggctcttggcctgagcgtcgaaggacagaggtgccatcacctgggacaggaggggatgtggggagaggcaggtttgggatgaagccatgtgtaggtgtgggtgtccgcagacctctcgctgcaggtgttgagtgggcaggagggttttccctggctgggtcctggggatcagatctgtaactccaacaccttggaaggcaaaggtgggaggatcactagagtccaggagctcgagactagcctgggcaacatagtaggaccccatctctacaaaaaaatttaaaatcaacggg

SEQ ID NO: 36306 - DNA, 3426 bp, Artificial sequence
  DNA replication origin
tgaggcctgaaattcaaggctaacctgagatagggtgttgctcttttgcccaggctgaaatgcagtggtgtgatcacagctcactgcatttccgtgtatttcagagctcactgcagcctcaaactcctgggctcaagtggtcttcctgcctcaacctcccaggtagctggggtcacagggatggaccaccacactgggctaatttaaaaaaattgttagcaacagggtcttaccatattgcccaggctggcctcaagcgatcctcctacctcagcctcccaaagtactgggattacaggtgtgcagcaccacatctggcttaatttttttttttttttttgagacagggtctcattctgtcgcccaggctggagtgcagtggagggatctcggctcactgcaacctccgcctcctgggttcaagcaactcctgcctcagcctcccgagtagctgggattacaggtgcccgccgccatgcccggctaattgttgtattttttggtagagacaaggttttatcatgttggccaggctggtatccaacttcagacctcaagtgatccgcctgcctcagctttccaaagtgctgggattataggcatgagccactatgcccagccagagactccatctttaaaacaaaaacaaaaactcagggtgtggtacccaccaacctggcttacccagccttttaggtgagtctaatgcatgctcaaatttgaaaaccactgggttaaacgtctggtctggagttcatcaaaaagtcatggcctgaatccttacctgtaaggcatcagaatgcaaatgaaaattaacttaatgaatattttacttgagccgggcacacttcccacaacagtataggatggctgtccttgtcctgttttgtagaggacggtgctaagcagcctattcattctcacaaggtctccaggaaaccacacttttttaaggagtagaattttggggtagggccgggcgcagtggctcacgcctgtaatcccagcactttgggaggccgaggcgggtggttcgcctgaggtcaggagtcgagaccagcctggccaacatgatgaaaccccgtttctactaaaaatacaaaaaataaattagccaggcgtggtggcgggagcctataatcccagctactcgggaggctgaggcaggagaatcgcttgaatccggggcaggggcgcggaggtttcagtgagccgaaatcgcgccacttcacactccagcctgggagaaagagcgaaactccgtctcaaaaaaatatatatatatatatatttgggtaggaagcacaagtagggaccgtgcttgctgccagaacaaccaatagaaactccttgaaggccttcctggcacaaacgtagtctccagcaccctctgccgaccaggccccgcgccctcagtgctgagacagcctccagccctcggtgccttaggggttgcgcgtcaccttggagaccgcgtgagaggagggcgtgcctctgcaaaggcggaagtcggctgtggaagtgtgggcggccattttgagaccgggcaagaggggcgggactggtgcggccgagtgacagttgaccggttttaaccaagtgactggtaccacggggccggggaaaaagctgtgccatccaggggcggggggatgccggggacggggaggaactaggaaggggaggggaaggggaaggcgagaaggggagaggcaggggaaagaggggaagagtcgtgggagctgggagaggagggaaagaggggaagagtcgtgggagctggcagaggagggaaagggggagccgaacgtgaagggcgaagggcggggcggggcaggagagtcggggtatagagcaggcaggtgttaatggcatgggaaggaagagtaagaagtggggcaagaaggtgtcgcggtacgaggggaaggtgagactcaagaaggtgccggctaagaagctggtgccggcgtggaaggagaaggtgtggggcgaggaaacaacgaagggcgaggaaagatcccgaggcgaagagacagttttcatcgagaaggggcagggcgaggaggaggggcgttaccagagggcgggacggggcgacgggcccgcgcgggaagaaccaatcgccgagaacccggggaaggaacgggtccataaagaccaagtggaggagtaggggcgcggtcaggagcggaagcagagtgaggagcaagccccgggcgagaaacgggggcccggccgggagcaagagcaggggcggggccgggagcaagagcaggggcggggcccggagacgggcgagaccaggtacagtacccagcccctgggcagaccccgagcgaggagaaagcggcgataccaagagaagtgcgagggtggggcaagaggttggggcacagccgggtggaagtacacgggtgcgatcgcaggcagaagcagtacgggggaacttaagagggggactgtcaaagcgagaaatagaaaccaagaccaggtgaagagcaagagtggaatacagggagggggcggaataaggagcaaggtgaggataaagttaaaggaagagacgtggaggcggcggggcggaacgaggcggaggagcaggggtgtggccagaaacattagtagggctggggcccggagcaatagcagaggtgcgatacccacgagggtcgggggcagggccaggagcaagagcaggggcgggaccaggagcaagtgcagaggcggagccaggaacaagagcagaggcggggctaaaagtccgtgcgggggcagggccaggagcaagagcaggggcgggaccaagagcaagtgcaggggcggggccaggagcaagagccggggcgtggccaggagcaagtgctgtgagaggcgcagaagcgaggtggaatcttaaaagtgggctccagagagctgtccggcgcgtgggtgttgactcctgcgttctccaggttctagccacgttatgtgcggcccagccatgttccctgccggtcctccgtggcccagagtccgagtcgtgcaggtgctgtgggccctgctggcagtgctcctggcgtcgtggaggctgtgggcgatcaaggatttccaggaatgcacctggcaggttgtcctgaacgagtttaagagggtaggcgagagtggtgtgagcgacagcttctttgagcaagagcccgtggacacagtgagcagcttgtttcacatgctggtggactcacccatcgacccgagcgaggtgaggggaccagggtcaagtgaaccagagggattttgaacccgcactccactcatttctggacgtgtggcctaacctctctttgcagaaatacctgggcttcccttactacctgaagatcaactactcctgcgaggaaaaggtgagtgggtgcagcacggataggctcattctatgagccttggttttcc

SEQ ID NO: 36307 - DNA, 915 bp, Artificial sequence
  DNA replication origin
ggggtttctccatattggtcaggctggtcttgaactcctgacctcaggtgatccacctgcctcggcctcccaaagtgctgggattatagatgtgagccaccgcgcccggccaataattttatttttttagagacagggtcttgcgctgtcacccaggctgaaatgcagtggcttgatcatagctcattgcagcctcgacctcctgggctgaagtgatcctcctgcctcagcctcccaagtagcagggactacaggctcaagccatcacaccagtgtactttcaattagacagggtctcactatgttgcctaaggctggcatgaaagaatttctgagagtagtattaataaatgcaaataataaaatgaggtaatacgttagaaaggaggggggggcactgttttagtgggggtcgttggagaaggtcactctggaaaggcttgagcagagactcaaatgataaaaagtggggattattaggagagccaggtaaagctttccaggccgagggaagagccagcacgatggcccagaggtaggaaagaggtcagcatgtgtgagaaactatgaagaggactttgtggctggagcagagtgagtgagagggagtgtgggaggagaggtcagggaagtgatgggggaaggtttttggggcttgatgggccatggtgaggacttggcttttactctgagacagagcctgagagggccctatgcagaggagggattggatctgattccaggcttcactggctccctcctgttgttgggggagcagggcaggagcagtgagacaaggaggaggctgctacattgcccaggcaggagatgacggggacaggaccagggtgttagtggctactgtcatcctcacaggaaggaggtccctgccccactagcaccttctcctctgca

SEQ ID NO: 36308 - DNA, 881 bp, Artificial sequence
  DNA replication origin
ccctgggatctccccacaactccccatacctgcctccacgccatgggtcccactggggcctctgtgtggcccctctaggccatggaatgtgctgagctcccgccccccacataccctcctcagatcatggccccacagaggcccccagcaaaccccacacccctgccaggttgcgatccctcccgcctcccccaggcccacctttgctgcggaagggggcagcctccatctggatctgcagctgctctatcttccagcggtagaagttgactggggactggaaggtgaccagcaccaggggctttagccccgtcaggtggcccatgcgcaccaggtcctcagagggctgagggtgagatggccccacaagtgtgtccttatggtagcctctgggtgccccctgccttaagcccgcctctaacagtctgtctcctgggctgtccgggggcagcacactgtccaccatgtgatggtcagaggacatggtctaggtttggggcttggatgggggatggaacagcctaggagggggcagaggggtaaggggctgtggagggagtcggaggccttcctggaggagatgactccagagccagtgtctgcagacagaatgtgcatgtagggaatacatagggaagggcagcatgggatgaacaaaactgtgcaggtgggagggatgctgggaaggtgggagggatgtggcacccagggtgctgctttccactccagggattcccagttccaggcttaaaaaaaaaaaattagattgcccaggctggtcttgaactcctggtctcaagtgagcctcccaccttggcctcccaaagtgctggcattaaaggcgtgagccatctcatctggcccccagtctcactcttgag

SEQ ID NO: 36309 - DNA, 1304 bp, Artificial sequence
  DNA replication origin
aggggagcgcccttggtcccagtggaggtgagtttccaaacttcatccctcaaacaatggggccaccacactgggcagagggtgaggtgggatcagaggaccccatggtcctgacacacacacatccggctgtcatacccgcagatctggtacctcctggagggcagctaccgggtctaccagctgttcccttccaagggctggcaggtgcacatcagcttaaagctgatgcaacagtcctctctctacgcatccaatgagaccatgctgaccctcttctacgaagacagcaaactgtaccaggtgcccggtggagctatgcggggacatcggggcaccccaggagggctgaccccagctcacctggccctgccttccccctgcagctggtgtaccttatgaacaaccagaagggccagctggtcaagaggctcgtgcccgtggagcagcttctgatgtatcaacagcacaccagccactatgacttggagcggaaagggtgagaagacaccggaccatgacaggggtctgagggctcccggcactgccctcctgaagctaccattcttgagagaggggagaccgagctaaccccagtgaaaacctcagggctatgatggcaggagttcagcacttatggaagctcagaggaggagcccaacctagtggggggaaggtgcatcagggagggcttcaaggaggaggaggtgtatgcactgtggcaagaagggtgaggaaggattagccaagtgataaggtggggaagggtgttccagaaagggggaaccacctgtgcagaggccctgatgggagggggacaaagtgagcctggtggtcatggggagaaacttgggcttcatcttgagggtcttgggagagccatggatgggactaagggaaaggactgcaggatcggattttaccgcgtgccgtaatgatgcctccggtcatcgtcctgcggagggtggatcagagcaacccagggaggcagctggagtcgggacagggaaggggcgctggggtggaaggaggaagcaggagatggaataaagataagaggtcaagtggacaggcagatggcgactgcccgttgagtagggaggactctggtctcagggatcaagggagggacgtccgaggggatgtgtgcagaggcctctgggcagcaggggctgacgctgaggaggaagattcgggctggattcgatacgggaagtgggtggggtgggaaagaggcctgcggaagcttccagtgcgcggggtgccttagagccagcagcctttcccccttgccactgcccagg

SEQ ID NO: 36310 - DNA, 714 bp, Artificial sequence
  DNA replication origin
gtgtgcagaggcctctgggcagcaggggctgacgctgaggaggaagattcgggctggattcgatacgggaagtgggtggggtgggaaagaggcctgcggaagcttccagtgcgcggggtgccttagagccagcagcctttcccccttgccactgcccaggggctacttgatgctctccttcatcgacttctgccccttctcggtgatgcgcctgcggagcctgcccagtccgcagagatacacgcgccaggagcgctaccgggcgcggccgccgcgcgtcctggagcgctcgggcttccacaacgagaactcgctcgccatctaccagggcctggtctactacctgctgtggctgcactccgtgtacgacaaggtgggcgtccggcggcgggcgggcaggcctgagacgggactggggcagccgggagctggcttagagggcgaggcctgtggagcggagcgcagcgggattggagaacaggactggtggtgggtgggcgggggacctgggggcggggcctggcttgagcaggacttccaggggaaggcgttgggggtgtggccgggttgaaagcagggtttggggatgggctggggtgtgtatcttctgctctgggttgggggctggctttgaggctaggaggtggtctggggatgccgcttgcctggaggctctcgccccgctgcccaatcccttcacggtgccgggcgatc

SEQ ID NO: 36311 - DNA, 877 bp, Artificial sequence
  DNA replication origin
gtgaggagcgtctctgcccggccgcccatcgtctgagatgtggggagtgcctctgccccgctgccccgtctgggatgtgaggagcgcctctgtccggtcgcgaccccatctgggaggtgaggagcgtctctgcccagccgccctgtctgagaagtgaggagaccctccgcctggcaaccgccccgtctgagaaatgaggagcccctccgcccggcagccaccctgtctgggaagtgaggagcgtctccgcccggcagccaccccgtcctggagggaggtgggggtcagcccccgccaggccagccgccccgtccgggagggaggtgggggggtcagccccccgcccggccagctgccccgtccgggaggtgaggggcacctctgcccggccgcccctgctgggaagtggggagcccctctgcccggccaccaccccgtctgggaggtatgcccaacagctcattgagaacgggccatgatgacaatggcggttttgtggagtggaaagcggggaagggtggggaaaagattgagaaatcggatggttgccgtgtctgtgtagaaagaagtagacatgggagacttttcattttgttttgtactgggaaaaattcttctgccttgggatcctgttgatctgtgaccttacccccaaccctgtgctctctgaaacatgtgctgtgtccactcagggttaaatggattaagggcggtgcaagatgtgctttgttaaacagatgcttgaaggcagcatgctcgttaagagtcatcaccactccctaatctcaagtacccagggacacaaacactgcggaaggccccagggtcctctgcctaggaaaaccagagacctttgttcacttgtttatctgctgac

SEQ ID NO: 36312 - DNA, 989 bp, Artificial sequence
  DNA replication origin
tgtttcagagagcacagggttgggggtaaggtcacagatcaacaggatcccaaggcagaagaatttttcccagtacaaaacaaaatgaaaagtctcccatgtctacttctttctacacagacacggcaaccatccgatttctcaatcttttccccacccttccccgctttccactccacaaaaccgccattgtcatcatggcccgttctcaatgagctgttgggcatacctcccagacggggtggtggccgggcagaggggctccccacttcccagcaggggcggccgggcagaggtgcccctcacctcccggacggggcagctggccgggcggggggctgacccccccacctccctcccggacggggcggctggcctggcgggggctgacccccacctccctccaggacggggtggctgccgggcggagacgctcctcacttcccagacagggtggctgccgggcggaggggctcctcatttctcagacggggcggttgccaggcggagggtctcctcacttctcagacagggcggctgggcagagacgctcctcacctcccagatggggtcgcgaccggacagaggcgctcctcacatcccagacggggcagcggggcagaggcactccccacatctcagacgatgggcggccgggcagagacgctcctcactttccagagtgggcagccaggcagaggggctcctcacgtcccagacgatgggcagccaggcagagacactcctcacttcccagacggggtggcggccgggcagaggctgcactcttggcactttgggaggccaaggcaggcggctgggaggcggaggttgtagcaagccgagatcacgccactgcactccagcctggacaccattgagcactgagtgaaccagactccgtctgcaatcccggcacctcgggaggccgaggctggcggatcactcgcggttaggagctggagaccagcccggccaacaccccgtta

SEQ ID NO: 36313 - DNA, 740 bp, Artificial sequence
  DNA replication origin
agagccccactgtgggcagggcctgagacgcagaggtgggggcttgcgaggtgggcttggcttggaagtgggaaaggcctccaggggaagcaaggtggattacacgtgggaccccacggggattacttgtccagggggctgttgaagcggtagatttcgtcctcactgtagtccttgaggctgtccagtgtgggcccgccacccaccaccagcagaacatagctaccagggacagaagtgcacacagactggcctccgggtctcgagtcctgcacccatctccttccactccctccacctgccctagctgcaagctggccacgcctttacctgccctggaaactgccggagtctcctgtcaccaaatcttgaatcaagaagaaggggtagaaaactatggggttggaggggattgagaccagaagaagaaattagcttggcccgagaagctgaggaccgagacgggggaaagtgagatgccgcaggaaaaagggtgggtagtctgcggggagaggaatggggagggagagcacaaagtagtgggggcaagagggcagtgaactgtgcaggggaagggactggacacacactgtcccggaagagaaagcagggcatctccgggttcacgttaacgcagtcaaagtagtgtttgttcttcaggcggctgtattccagcgtgtaggtgatgtcgaaggccaggcgcttgcctggggggcagccaatgaacactggcaccatca

SEQ ID NO: 36314 - DNA, 739 bp, Artificial sequence
  DNA replication origin
tcggagggagcagcattccaggcagagacttcagcttgtgcaaagttcagccccatttaagtaacacaaaggcagtcagtgtgacttggggatcaagaggcctcctaggggcagaaaggataggtgggcccaatggactaccgacagatgggggccaagaggggccaggctacgcactcactcgatgcctgggctctcgtgggacatgatgtgaaaggctgagtctttggtggtccttgtggtcctcgtggtccagataaggctgttggtcctgtgcaggcccaggtcatctcagccaggggttggggggcggtgtaggggaggtatgacctcagtggtcagtgtggagggaggccacaggtgggtgcaggggacatggtgttaggggcgggcaggagtttgcctgtgagatcctaagagccccactgtgggcagggcctgagacgcagaggtgggggcttgcgaggtgggcttggcttggaagtgggaaaggcctccaggggaagcaaggtggattacacgtgggaccccacggggattacttgtccagggggctgttgaagcggtagatttcgtcctcactgtagtccttgaggctgtccagtgtgggcccgccacccaccaccagcagaacatagctaccagggacagaagtgcacacagactggcctccgggtctcgagtcctgcacccatctccttccactccctccacctgccctagctgcaagctggccacg

SEQ ID NO: 36315 - DNA, 826 bp, Artificial sequence
  DNA replication origin
gcggcaggcttctcgagctccgggcccgcggcaacctcgggcgctgttctgcaggccgcgaccggcatgtacgagcaactcaagggcgagtggaaccgtaaaagccccaatcttagcaagtgcggggaagagctgggtcgactcaaggtaaagtcggcaggcccaggaaaccgagtgttgcgggcgtgggaggcgctacgaggtgtctggacccaaccaagtcccgggccgcggaagccacctcggtgccagcgagactgaggcgggctgggggatccgatggggtgaaagatttggaacagccaaagtgggggctcggagggcgtcaagaagcgagagagggacagggagcgttgatggtcacgcctgtaatcgcagcgctttgggaggccgaggcgggggagcgtcgcttgagcccaggagttcaagatcagcctgagcaacatagcgagactctgtctctacattttttttttaagtgagagatgactggaatggacccacgcgggggtggtgggggaatgattggaagacttatggcagaactgagtgaggggttagatttttggtgcgtggaggcttaactggtcggagtggcaggattgggattcgggcttttcctgatggtggattccaggcaagaccaagtgggaagtgaggactgcccggagtgataaaagaatgaggctgaaaaggtgggctgtgtagagggtgtgtggttaagaccaggctgggttaggatctgagagatctggggcttaggctcgcatctgttgggagagggggcagcctagttgtgaaggcaggactgaacctagaagaaata

SEQ ID NO: 36316 - DNA, 1619 bp, Artificial sequence
  DNA replication origin
atctggctgaatcccttgtgggatgtggaaatttcacaagtcttccagagttagttttcccaactgtgaaatgggaatgatcactcctttgcaaagtggtttgtgctgagcctgtgagcttggtaccaggttagctcagaattggggcttatggattaaggggaatcagatcccccccgccctggacccatcagtctgggtgctgggtgaatggaacctcagttactgctgctctggtccagcttcacgattgtttccaagatgtgctttaatggcgatcctgccctgctgcaccctacccactgccttggcgagtgattgacaggctgctggcatctggattggttattttattggcatggaggggaaggtggagggtgttgagccgactacactcagttggaatgggtggcctgcaagtcgtagtgctccagcttggccaccagagagccggacagcttgatggtggcaacccagggtggctcgcccaggtggttggtggatgtgctcagcctagtgggggagggtagagtcagcaaagcccagcaatgggaccaggcctctagcccttctagggcctccctgtccccatatgaatagggaagcttctgaaggctatattggaatatcccaaaggcagtttagggcagggctgtggccacttaataggaaagggagctgagggctggcgagtgtcccagctaagcttcaagaggtccagggcagtctcccagtggttcagcactcccaggagtcagtatcagaccccagtggccagatctggtgattcagtgtgggtagggggtggctggaggatgcattgtccccctggatgtgggactcaggaggagcctccccagcacaagggctgggacatcagtgccctctggcggctgaagccttgagtcccagagtcaggagaagtcctcagaggctagaggggtcaggagtccagggctgcccctgtgcccagtaaagttggaggcgtgcatctacccccatttagttccaggaagacagtcatcccctcacccccatccctgagtggcctcggacgtggtcctccttgataccctcagggacagggtcaaggcagtgtatagggtcaggccagctgggaccagcctccctctctaatggctccaagagaggtacaggagggccaagagtccacttagggattggatgccatagggctgggccagggtgtccccctttccccgtcaaaggtcagcatgggatcatgggtcctcttggtcctgaagggtgggagctcagctaggtttgagatgtggcagagatgaaggccacgggtcattctagggtcaggaagccaaagggctgagtaggactctatccagcagtctggggttcggcaccctcctgtcccttctcccctctcaccaggcagagacgttgcgtggcaggcggcgatggcgtggctggtggtggcagtaacacttgcagggacaggagttaagcacctggaagggcagccagtggcgcgcagcgcgggtgttagctgccccagtctgagaggccccgctgccaccaccccctccaccactgctgtcaggcacggtagctgtagctcgttcgcgaggaccatctccatgcaa

SEQ ID NO: 36317 - DNA, 994 bp, Artificial sequence
  DNA replication origin
gcccggggggaaggagagggtcttgagaagcgatgttgccgggtcttaaaaaggcggagcttagaggtaaattgccttaggggcggggcagatgagaggtccaaaggggaggagcgacgcatcggtgttcgcgtgggcggggcctcgggagggaatgagaggggcgggacattctaaaggggaggggctaaggagaacaacccaaaggggtggagcttagaaccagaaggcctgggggcgaggaacaagacctcggagtatttcaaggggagacctaggttcgtaaggggccgggctcccgcgggctcgcaggagggcggggcctcgagctccgggggcggggcctacatctcggggtccgccctagttgtctcgcccacttgccttcacccgcacccccgttcttttcggttattttctgctacggcagttccctgccctgccccgggcccagggcgccgcggtctgaactctgctcggctggaggactcggtgagtgggttcctctggggggaggcggggccagggcggagcttggggacaggggtggagcttgactgtggatgccagctagtagacctggagcgggaagaggtttaggggtgaggcctgaggatctgcccctgcctgggaagagggcgggacccaggtgctctagagagaggcggggagtcggagagttagaggagaggactgagggatcagcatgaccagccaaggggacaggcatggaaccttagtacataatggggctggtagtgaagtatcttaacagcagctgtgttggggacatgggcaagaaggcgtgagtgtcgaaggtcggggaacaggagtgcgacctaaggacttgggcctgatcggatcttggagaacaggggcggggccggtgcggacgcattagatcaagtacagccagcctcgtagggtccccacggccctggcaggctgactggagtaaatttttctgactagtctccgagctccgtcagaaatg

SEQ ID NO: 36318 - DNA, 1076 bp, Artificial sequence
  DNA replication origin
ttcctcaacggtgagggtccaggacggaattttgtgaatggggcatcctcggagaaagtccagaccccacaaatgaagactggtaccctgaatggctgccgcgcagtttggggggtccccactctctagtcctcctagccggggccttgggggcgcctgggtgggcagaaggcgcagcgcggtcacggccgccccctcatcggggcaggcagtctgtcagcccccgccccctcgcccccctcggcacctgcctgcgaggctccggccgggctccgagcggcggcgacgcggcctcctcctcctccttttcgttccggctccctggctggctccggcggcgctggagacgggcaccgggagccggggcgaggggggagggagggggaacctggaagacgggtggggggggaaggggcggcttgggggaggggtaagagcgaggcgggcttacttgcctgctgggtcctagagcccggcactagctccagagagcaaccccccagcccccattttcttaagatccagaggggatcccccacttttccacccatctgcgccattggtctctaatgctatgaggaggggacggggcagggacagggactggtctcaaggttctaaagaggtggtggtctacgctgtggcttgggtgcctggcagagttcgataaggggtggggcgagaggggagccttcacaagtgggtggggttggagggcctgggtataaggaggtttggatgctgcaggcgaggactagtgcgtgcgtcacgaaggggcgggcccacggtggatgggccttctcggcgcccggggggaaggagagggtcttgagaagcgatgttgccgggtcttaaaaaggcggagcttagaggtaaattgccttaggggcggggcagatgagaggtccaaaggggaggagcgacgcatcggtgttcgcgtgggcggggcctcgggagggaatgagaggggcgggacattctaaaggggaggggctaaggagaacaacccaaaggggtggagcttagaaccagaaggcctgggggcgaggaacaagacctcggagtatttcaagggg

SEQ ID NO: 36319 - DNA, 1021 bp, Artificial sequence
  DNA replication origin
ccagggtccctgtgctggatggcagtgaagggctggacactgatcccgattactgggcggagggctacgtcctctgagctggggggcggggtaaaatggttctgaaggatgctggggctggggggcgggaagggaagagggaggaaggatcaatctgcccccccatcccatctttcccccctggcttccctcggctggggcctgggggagcagccttgatttttgtgaatgaaatgctctctggatgtgtcttcggtcgcccgtttctgacttcctctgcctccgtctccctctgagcctctctttctggccatttctggttctctccctgttccctgcccatctcccgttgctgggtgactcagtgagctttgcatccggtctcattcataaatccgggaaggggtgggtgggggggaaagagcctgggtttctcacccagcctgtggcctggacgacagggtgcggaggcagggttgggagaacaggagctgagttgatgggcccagagaaaatatatatgcgcaggcacccagctgtgagggggagcactgggtggggctgtgggtatgtgctgagggaggagaagggggtgatagggataagcaggagggggagggaagggcaacaccagggctatgggggtggggacggagagatgggggaaaggtgggtacagagagaaagggcagacatggagaagaagatagaggtgagagagaagagatggcatgaggaagaaaggagctgtgtggaagacggtggccatggggttgaaggtgggtattgctagcttagggtgcagtggacctggacgtgagagatgaagttggaggggagatgagggttgagggaacattccatgggagagcagggtttgagctcatgactgtgttgtccctgtccttccccccacctcctgcaggtacatggtgcgggtccgagctgtggtgatggcccgagatgactccagtgggggctggctgcctgtggggggcgggggcctcagccaggtgagcgt

SEQ ID NO: 36320 - DNA, 1253 bp, Artificial sequence
  DNA replication origin
gtggggacggagagatgggggaaaggtgggtacagagagaaagggcagacatggagaagaagatagaggtgagagagaagagatggcatgaggaagaaaggagctgtgtggaagacggtggccatggggttgaaggtgggtattgctagcttagggtgcagtggacctggacgtgagagatgaagttggaggggagatgagggttgagggaacattccatgggagagcagggtttgagctcatgactgtgttgtccctgtccttccccccacctcctgcaggtacatggtgcgggtccgagctgtggtgatggcccgagatgactccagtgggggctggctgcctgtggggggcgggggcctcagccaggtgagcgtgtgtcgggtccgaggggccaggcccgaggggggggcccgccaggggcactacgtcatccacggggaacgcctccgggaccagaaagtgagccaccctggggcatgcggggagggtagggacctggggagggaggggagaggggctggcatgtggagcagaggtcaggttgcctcccagcctaggaatcaagctggggtgtgaagtttgggagtgaatatctgtcctgtagataagagttgggaattgcaggatacatggggtgtttggagggtcctgtccactgccacttccagccagactatcctcgctgtctccctgtactgctcctcctccccgctccaaccccaggctgttccacagggggcactgcccccccccccccgccccgactcacaccatgtccctcctctgctcaaaaccctccatcttgctcagagatccttgccacgaggccctacaccacctggcccctgtctgccctaagtatagtgaagcatttgctggggtccatttgaaagtgtcagagatggttgacaattctatacatgggttcatcaggaataactgggctgtcgggcacaatgtggagggacagtgttgaatcagtttcagctagggatgtagtagaaagatatggattgtgtgaaaggcttgggggaaaggttttttttttggagcaggagtcagtggagggatttgaaatggagtgaaggaatatggtgatactaggcaaggatttgagggaacatcaatagggtgttggctagcatctgaaggggaatctgtggaagtctgataagactgttttggagtaagtgctggctgggtacagtgcctataatcccagccactcatgagtctgaggccggaggaat

SEQ ID NO: 36321 - DNA, 1217 bp, Artificial sequence
  DNA replication origin
gcagggcactgccagggagagcgcggccagcgcggcccagcgcgcggcggggcgcgggtggcccggctcgcaggcgcacgggtccgagaagtcgccctcggcgtccgacaggcagtggtagagcaagctctcggcgcaccacaggcagcttagacggcgcaccaggaggcgacccgggtccggggcctctgcgcagcggccgccacgcccgtctgctctgcgacggaagagcgcgcggcaatgcacgcagcgcgctgcctcctccgcttccggggaggccttggcaggcgcagaggatgggcccgggccggggggtgggcgagcggggggcgctgggggcgcagcctcggtcaaaggggcaggtagtgccgctgggggacccagggcagcgcccctcaacgcgccggtcttggcgaagcgcacgacgcaggtggacagggcgaggggcgcgggtggcccggagcgccggtaatcctcgtagccgcggccgccccaccccaggccccctgcccctgccaggggctctgagggttccggaatccccgtgaacggtagaagcggagggtagctctgcggaacgaagggacaaacagatcagaatccatcccagtcttagcctcaaggatccagttccctagcgcactcttgggtctgggattcagattttcaagaccccagcttgcttctctcccaaggtccctcaatccccacttttctccagggacagacagaggaatccacgcaccaaccccacacctttaaggacccagaggccgaaggttcctagtcctgtcctctcttaagatccaagagccccagctcccagccccctctaccttgagatccaggggttctggacccagccacctcctccttaaaggcgcaggagtttggttcctgggcctcttttacccttctgggtaccgactctcccaccctccccgtgaatttaacagtcctcttccaggagttccccaaatatacactctgaaaatggtcctaaacctctctggacttcgaaacccctcaaaatctccaagagcgcaaggagactcgggaggcccgcacccaagcctcctagaaacccaggcctccaagcctctccctatttccccgccgctttctcccagtccggcccagttatcaggtcagccatcccctggaatctgtgttccccacctccccgggccatggctcccgctcccttcgggccccga

SEQ ID NO: 36322 - DNA, 1063 bp, Artificial sequence
  DNA replication origin
tgggtagaaagaagctgaagattccaggacatttggggtctcaaaatccaggtccaggagggactgcaagagagggctatttgagaactcgagaccagtatctcgggtcctgaggtgttggtggccttcagtcgcacatctgaggaccccaggcacctctgagtcctataaatgatatccaaagctcctgagaaccctggcttgggggtgggtggacctatggaggtctttgatccctggcttccagagcatcttggtgtctgatatctggatcttgggggctctgggatgggtctcccaagtcattttggtaagagaacagctcgtgtttcagtatatccgagcactcagtgcatcttaagagtctggggtcccagggtgtctgggagttccctggacatcttagacttcagtgttcccggactggaggccaggtctgtgggcactaagtcgtgggtagatttgaggggcagcatctggagattccagagcataacagagtttcaaactctgtttgaaactttctcaggggtcctgctgtctcaggggtcctgggactatgagaatgtctcagatgtgggggcaccaggtcttaggtgaatattcaggaactgtttgtgggtgactccaggtcctatggtctcaagatctgatctgggagttgaataaaggcagagccagttatgggcaagtcctgactaattgtggggctgtaatctgagggacatggtgccaggcgtgaccgggttctaggttgttcatttcaacagggacctgcccttttcgggatctatgtgctccctggcctttctgagatgcaaagtatggggacgcctggagcctcctcgtggggtgtgggggtgggggaacgccagaactcaggacgcctgggacttcttagacagacaccccaatgaagctggggctggggtctctcagtcctaggtttgggttccaggttccaggtctgagatctctcaatccaaactcaagctccaagttccggatgtgcctaggtttgggttttaggtccgaacggagtccggggtcctggaccctcaat

SEQ ID NO: 36323 - DNA, 1284 bp, Artificial sequence
  DNA replication origin
gggccgcggtggcccaggacctgctggctctggggtaaaagggtgtgcggtgaggctggtgggtgcaggaaggccaggtctgccccctggacgcggacgaaaagggattcccagtgacatccccgccccctcccgctgcctcggtccccacaggtatggaggtgtcccgggggcggcgtcgcggggcgcctcatgcccagacttcagggggctgtgcgtgcggctggcggcggagctggcgacgctgggcgccctcgagcagcagcgagaggcgggcgcggaggtgctgagcgccggcgacggtaaacacggagcgggagggtggcaggggggccgccacggggccaccgagccctgacacccctgtcctcgcaggccctggcgcggaggaggactttctgcggcagctcggcagcctgctgcgggagctgcactgcccggatcgcgcgctctgcggcggggatggcgcggctgcgcttcgggaacccggtgccggactgcgcctgctgcgtgagtcccgggatgcagaagtggcaaggccatggcctccggagcggcgggctctgactttttaggggaaatcgaggttcccaaggggtgtggtcagaactttggggcggcccagagggtacgaggtgggtggggtgagcatgttggggcaagcagagcgctctaaaatgggcgggggtagaatttcgttttattttttatttattttattattattatttttgagatggagtttcactcttgttacccaagctggagtgcagtggcgtgatctcggctcactgcaacctccacctcccaggttcaagtgattctcttgcctcagcctcccgagtagctgggattacaggcgcgcgacaccacactcggctatttttagtagaaacggggtttcaccatgttagccaggcaggtctcgaactcctgaccccaggtgatctgtccacctcggcctcccaaagtgttgggattacaggcgtgagcccaccacgcccggcccggggttagaattttaattggagggcctaggagctcaagtgggttggattaggaggaaggcttgaggtttcaaagtgggcaggagtggaattcgtaggaggggacagggtctcaaggtggggcttactctggaaggctttaggtgggggggactagaaggtggaggattttgttttgttttgtttttaagtggaggtggggtctccctatgttgccctgtctggtcttcaactcctggcttcaagcgatcctcccacctcagcctcccaaggtgtt

SEQ ID NO: 36324 - DNA, 1575 bp, Artificial sequence
  DNA replication origin
cacctgtaatcccagcacttttggaggccaaggtgggtggatcgccttaggtcaggagtttgagaccagcctggccaacatggtaaaaccctgtctctactaaaaatacaaaattagcagggcatggtggtgcacccctgtaatcccagctattcgggaggctggggcaggagaattacctgaatccgggaggcagaggttgcagtgagccgagattgcaccactgcactccagcctgggcgacaagagcgagactctgtctcaaaaaaaaaaaaaaaaaaaaaaaaaaatttctggagatggggtctcgctatgttgcccaggctggtctgaaacacctgggctaaagtgatcctccaatcttggcctcccaaaacgctgggattacaagtgtgagccacactgtacccagcctataattatttcttaaaaacccagattttatcaagggtgtgtcatcactctcaaaacttccctagcttagcccatcttacaaggcgctataggatcttcccagggcatcttcggcttaatttcctgccactttctgacctcagccagtcctccccatggggactgcaaagttctctgctagcctgtctcccatctgtctccctcacagtccagctccggaccagacacactgaaagcagagagggatcagcaccatgagtggatggatgacagggaggaggaatgctggcagagcctgggggtctgggatttggaggagcaaggacttcatgtggtaccaggacccctgggcaggaatggacagggcttggggaattaggtgtgggggctcaagacagctgaccacttggagctttggggagggtagtgggattcaccttggtgctgtcagggctcaggtgggcatgggagtccttgagtctggagatggcactgtgacacaggccccctgtgactgccatcagcgtgttgaaattctgcagctggtggagcctctaggaagagaagcatgcacacagggccgtcacgggagggagggcaagtcaggagttcagatgacagcatcccagttgaggtggggtcccaggcatgtgtggaccaatgtggggatcagacaggtgagagaaggcgggtgtgtgcggcaagagtgggacatgccatgtgtgggcctcacaggggtgtcagatggctatctgagccgggagggtcaagcaagtgattgactgatacgaggttagaaaatctggggagacaggaagtacgagaagttgggcggatttggggaatagacaggtgtgtgtcaggtggaggaggcttcagacatgtcagggtgtcagccatctgggggtctgactgctctgagagtcacacaggtgcggggaggcaagaaggtgcaggctctgggcaggagctgggagccaggcagaggtgaatagggccagagagatatggaggagtcagacagatgctagacaggtgtggggccaccagggcagctggggaattcccttgccctccttttgacaaatttcggcagaggttgctgtggagagagtggggccagggaggaatggaaaatgctcagactaaggacaccccagg

SEQ ID NO: 36325 - DNA, 1200 bp, Artificial sequence
  DNA replication origin
ggtgaggtgctgagccagctcccccgtctccaagtggtcgaaaagcaaggacactttgcgctttttgcccaggcctgggctgctcattgggagtggggggccagggccaccagggctcaggctgggggccaagaggggcagggtattggagtggctcacagttgagggcttggggatatagagggagatggcagaatggcgatggggcagggaagaggggagcacagggctgactcacaggtcagaagagtctcccagtcttctctgggctgagttgccctcccgggccacggtggcccagaaacgacctatgacttcttctagctggggatcctggtgcatcacctcagggtgtcgcatcagccagtacctgagagtggtttggagatggtgagatgaggccgggggtggcgaaggtctctacaaggggtattttgggctgaggaatttctaggtgctgagctagggggtctctaaatgtgtgtgggggtccctggagggttggggtttggaggggcaccaggcttggagaatctctggagtaggatgggggtctcttaacagagactggggggatctgtgggaaacagaccggggagtcacttggaagtgggattattgggaagcaagatcgtggagcgtcctaggaactagactgggggcttccgggggtgaaatttttggagggacagaatgagggggtcttatgggctaggctggggtctgtgggaggtagagattttggggatcagagttggaggtctctgggcaccagctaggagggtctatgggatctggttggtgaggggggtctctaggaagtgggggttctaaggaacggaactaagagggtcttaggaaccaagctacaggtgtctcagaagtgggattttggcctgtggggctggttgggtctgtgggaactggcctggggattctctgaggaatgttttttgagggggaagcaggatggaagtcgtgggtcctgagagtggggatctcggcccagccctacctgaccaggtgacagatctgcagccgtctcagctcctgggtgtcccctgtggccttctggtatttgagttctggtcaaggctctgttttccaggatccatgacctgcctgctccccattcccattgcccaggttctcacgactctgccctctgccctccacccatagctcacagtcctggaggat

SEQ ID NO: 36326 - DNA, 2825 bp, Artificial sequence
  DNA replication origin
atccagcccgggctgtcacattgcattcaggtgccattagaaagcagtctataaataaagataaaatagcagtctattattaaaacaacacgcaaaagagagaatttagagaaagatgagcttaaaaagcaatttaacttgagcaagtttccaccttccagtggatcactttgcagaccccacttgggaggcctctggagccagttggactgaggttcaaatcccagctcctcctgttaccaactgtgtggccttggtccatctgtgtcccactttgagcttcagtttccccattttaaaatggggataagccaggcacaacagttcatgcctgtagtcccagctactcaggaggctgaggcaacaggattgcttgagtccaggaggtcaaggttgcagtgagctataatttacaccacttcactccagcctgggtgacacagcaagaccctgtctctaaaaataaaaataaatgggatgattacttgaggtcaggagttcgagagcagcctggccaacatggcgaaaccttgtctctactaaaaatataaaaattagccaggtgtggtggtgcacgcttgtaatttcagctatttgggaggctgaggcaggagaatcgcttgaacccaggaggtggaggctgcagtgggctgagattgcaccactgtgctccagcctgggcaacagagactatttcaaataaataaataataaaaaataaaataaatgggatgatgctggcttgtatctcaaggagttgtcaggagcaggtagagggcttgggtgggttgatcttgtcagtcactgtctttttcataaggaccagggtgggaggaggggcctgtggtctgcagtatttgtggtatccgggccaggcccccctggagacgctgcccctcggttccgcaggacgatgaggtggtcctgcagtgcagcgctaccgtgctcaaggagcagctcaagctctgcctggccgccgagggcttcggcaaccgcctgtgcttcctggagcccactagcaacgcgcaggtctgtgcaggagggagaggggcctggggacaggggcgtctgaaggggcagagaatcttgggtccaaagaagagggttctgggagtctgaaaggaggtgctgacaggagagaaagtgaggaggggggctaaggctaagaggggctacctgaggtggggaggggtggaggtctgagaagggaggggcagggggtctggggtgttggagggaatccctgtgtgcacagaagtgtggtaggccagggcgggggctgctgatccagaacgttccttggcaggtggctgagtgggcagaaagcctcgggtttaaggggaggtagcctgagagtccagaagaagggctggttggggaacgggtctcaggagggaggagcagggaaactgagggacggctggggcgtggggagggggggtagggagggacgaggcaaaggacctggagcacaaggaggaggggttttattttttatttttaaaagtttttcaggtaacaagactgaattattatggggtgttttagggggaaggaggccctcggcgggggcgggggaggatgggacagggcctgagatgcggagggcatctgatgggggtgggggcttgagggtcttaggtagtggagtctgagggaaggtgatccccaagtccgagctcgggaattctgagggtgggggcagctggagtctgagagggcaggggatcgaggggccgagggccttggatccaaggcaaaggggcctggagggtcaggggacacccgcaggggcctgacttgggagactgggggctgagaggtggaaggagcctggggtctgaaaggaggagacctggaggaggggcaggggctggcagaccaggggatgtggaatctgatgggggggaagtttcagagtctgagcgagtggggtctgaggagcagagtcttgagtttaggagttggacggtgggagactgaggagggagtataaggttgagcgccctcctgtgtctgtgaagcagaggtcagaggtgtttgaaggaaaaggcaggagcgaggactgtgtgatggtggaggcaggaggtggggcttcctttggggttggagggatgtggggtcatctgcagaggaggacacagaacaggagattcctgtccttggagcagggtcagtgtgtctcaggggagaggcatgggggtgaggcttcctatgagattaggtggaacacgggttagtggggagggttagggttagggaagtttctatggagtctgggtgggtctgaggtgtttgagggaggaggcacagaagaggtgttttcgtgatgttggtctagattcagtgtgtctgagggggatggcagagggcagggccttcctgtggggtgggggtggggtctggcgtctcaagagtgtgggcatccagactaggggagggagtgtggcagggaatgttgctggggtgggggggtcttctgacccctcacttacatccccctcccaccccagaatgtgccccccgatctggccatctgttgcttcgtcctggagcagtccctgtctgtgcgagccctgcaggagatgctggctaacacggtggaggctggcgtggaggtgaggaccccacctgggggtgggcggggtggcagagatgggcgagaggacccaggggtcgtttagggcacggtggcaaggatgggtgagaggacccgggggtcgcttaccatctgctcttcttcctctctctgccctgccccccacaggccctcaatttggataagtgggtaggtccggccttggatgtcacctgtccttccaccc

SEQ ID NO: 36327 - DNA, 821 bp, Artificial sequence
  DNA replication origin
ggaatataaaatgctccatccataggcatctcagagatatagtccctgcttccgtgaatggggaaactgaggcagagagtcctgcaggagtctgagctgaggctgttttacctctaggcctgagcatggtattttacagggagcatcttgtcacctgtgactaggccagacctcttggggatctggagagtccggggatctgtgcttattctgttccctccctccccctgcagtcatcccagggcgggggacacaggacgctcctgtatggccatgccatcctgctccggcatgcacacagccgcatggtgagtgcaacctcggtgggcgtgggcaggggccagggcatgtggggcctgctagaaggaggctgacctccctctacaaccctagtatctgagctgcctcaccacctcccgctccatgactgacaagctggccttcgatgtgggactgcaggaggacgcaacaggtgcagcagctggaggggatgggggtgtgaaggggccccgcagcagggattcagggggtagaaggtctgcagaacgccaaggcaagcatgagactaccctggggacatgaatgggggcttcgtagcagagagtctgcggtacagtccagacagggagacagacacacgttggggaccactaggcagagagtctgaagtcaggaacggggaactgttaggcagagagttggtggcagtgataggagagttgtgggccaagggcccgggaggcctggtggagggagagccctggggaagagcattctgggaagccatcatctgacagccacccccattccatccccaccca

SEQ ID NO: 36328 - DNA, 837 bp, Artificial sequence
  DNA replication origin
atgttgcccattccttttctgtacaacgtggaaacaataaataaataaataactaaataaagggaagatggagcctccatgttggacatgcgtagccccaggtataccttttctatcggcacattcccccatgcaagcttgtagctcgattttccaggctgctctttgttagaaaagaaattattttgggggctgctttccgttagaaaggaaactctgccgaggactctgttgcccttactctctgcctaaataatttttttctacctcttgtatcagtgccatcaaccaagttaggggacagtcagtgttggctcagaaggacagggatcttaggctttactgccagtgcctagaacagagccacttactacagccttgctgaatggacaagtaggaatccttggggaggcactcgtttgcaaaaacaggcctgtagttgaatacatgagccaagggcgtagagacggggcctgggccatgtccaaagtggggacacgtgagcatcatcagcaggtggatggtgtttacagccgcagactggatgagttctggggaggtcggcttggggtgaagctggcagccatgatggtctcacctcgtggaaaggtggtctggcattctatctgggacaggttcaatttgggggttagagctttctggtcggggggaatgttaagtcagcagtaggtacaggtggaaagggtctggcctggagacagagacaggaaggagatagggatagagagatagagagggagaggcagggacagaggtgagagagatagagagacaaagacagacaaaaccaaaaacagggacagagagagacagaga

SEQ ID NO: 36329 - DNA, 1520 bp, Artificial sequence
  DNA replication origin
cccttggccattgtgtgacctcggacaaatgcttttccctctctgcgtctcggtctccctctctgtaaaacgggtgggtctgggggagtcttgcgggagtgaggttgcggcagtgacgttgcggcagttagcgctcccagccgtggctgacagctgcgaggtccctgtaggagcctggacagcttcagcgggaagccacggggctcggggccacccgctggcacggcgctgcccatcgagggcgttatcctgagcctgcaggacctcatcatctacttcgagcctccctccgaggacttgcagcacgaggagaagcagagcaagctgcgaagcctgcgcaaccgccagagcctcttccaggaggaggtgaggacgtggcgagggcggagcggggcctgtgggcccagggggcgggaccactgaggggcggggccacggcgctgggcggggcagggcctgagggacctggggaagtagggtctgagaagggggcggggcaggagaaggagccggacaggaaccccagccagtgagaacacgatggggcggggccttgggaggggcgggcctgctgtgctggtgggcaggacctttgggaaggggcagggcgtatggccgaccagggggcggggcctggagagaaggatggaataaaagagctgaggggcggggcctatgtgaagctcaggtatagggtgaggcctggggaggtgaggccaggagtggggccagaggtcagaggtagggctgccgactcagcgggcggggtctgctggcgcggggtctgtggggtgggcggacagaatcagtgtggggtatgggaggtgccgaggcagaaatagatctttgggcattagggaggggaggccagctgtgaacaaaacagaaaaaaatctctgtccttatggagttgacatggcggggagagacaggagatcaataaaataaataagtaaattgtatggcatattagatggtaataactgttaaagagaaaaattcagcaggtaaggggtagggagtgttggggttttgcagtttaagacagagctgtcagacagggtgacctggaggaagagaggaagccatgtgcaaaggccatgaggtgggcgggtgtttggcatgttccagaaacagtcaggtggtgattggagcagggaggcttgggtgggggagtgggaggaaatgagggcagagaggtgacgagggccaggccttggtgaggactttggctttgggagccacaggaggttttggtcctctacagtcacagctagttagtggcagagccggtcagtgtgatgccactttggttgtgctctccactttgaggcactgctcctctcactactgatctaggccccaggatgcagatacaacaattgttttgttttgtcttgttttttgaaacagagtctctctctgtcacccaggctggagtgcagtggtgtgatcttggctcactgcaacctccacctcccaggttcaaatgattctcctgcctcctcagcctcccaagt

SEQ ID NO: 36330 - DNA, 1080 bp, Artificial sequence
  DNA replication origin
gaagagaaggtgtttcaccgtgttgcctaggctggtcttgaactcctgacctcaggcgatctgccccccccccccccacttagcctcccaaagtgctgggattacagatgtgagccactacggctggccctggataattccttaattctgagaatgctaagccctcacccatctgagtgtcaaccctggagtcaaggcgagggatggggagcagggctgctggatggtgggaaagggggtgctggaggagcctcccagggctcacaggtgttcttggaaagaggggtcatgatggaggagggtagagggaccttggggtctcaagaacgtccctctgcctctagattgtcctgccgccccatctggagcgcattcgggagaagctggcggagaacatccacgagctctgggcgctaacccgcatcgagcagggctggacctacggcccggtgaggggctgcctgcagcctgcgggaggccggctagacttgcggtgccaggagggagagcggctcaccggcggagaggagggagggaccacagggcaccagggggtccttggactgagggtggcagaactagggttggaggtcaggggtcatagtctgggcatgtggggagtgggaaggaaaggggagcacatggagttgaccctgggttttctccaggttcgggatgacaacaagaggctgcacccgtgtcttgtggacttccacagccttccagagcctgagaggaactacaacctgcagatgtctggggagacgctcaagtgagggcccaggggagccgggggttggggctggctgctggtgcggtgggggagggaggcatggagagacagggcaggaggtagagactgagagagagaaggatggaggggacagggattgtgagacataaacaaatggggagtggccgggcacggtggctcacacctgtaatcctagcactttgggaggccgagacgggtggatcacttgaggtcagcagttcgagaccagtctggccaacatggcaaaaccccgtctctactaaaaatacaaaacttagccgggcgtggtggtgcacctctgtaat

SEQ ID NO: 36331 - DNA, 823 bp, Artificial sequence
  DNA replication origin
aaaaaaaaaaaaaaaaaaaaaagaagcaaacggggagcaagaaagggacagaggcagaaagagagagaaagaaaaggtggggatggaaagagagagagatgcagaaagagacagggagacaggagaaagtggcagacaggaaaagacagacatagttagttatacagacaaggcgcagggaaagacagaagtcatgaagcctgaggccaggatcaagagagacagggccagagcgccccaggcactgaagcagcagaggtagagggagctggagaccctgaggccgtgggaggagacggggcagggagctctgaggggcgtgacctgtcgcctccactcccccacccccaggactctgctggctctgggctgccacgtgggcatggcggatgagaaggcggaggacaacctgaagaagacaaaactccccaagacgtgagtgtgggcagccaggtcccgtctggggatggactgggggctggggatgctgtgctaagggctggggaggtcgaggggtcttgtggggaggctgaggttagggaggaaggagacttgggttagggtgaaggtcatagggtcagggctctggggtcagaggtgaatgtccaggattgaggagttaggagtttcagagagagagagagggagggtatgagtccaggatccaggctcagggtctgcctagagtcagggaaaatgagagcagaggtcacatgtccacgtaaggggtaaggggccaatggtaagaggtgagaatctggaggtcgttggagtcgtctaagtaagggatcctgaaattataggtgagcagttacacgtcctg

SEQ ID NO: 36332 - DNA, 939 bp, Artificial sequence
  DNA replication origin
tgcccattgaagacataggccagctcgtcagctcccagctctacatcaggcctcagctcgggcctcgcccagcccacgcgcatctcgcctgtggtgactgcttcaaactcgaagtaccagcggccgctctgcactgtataggatttctctgcccggaagatgcgcacccggtcacaacgagactggttctccacctgacctataaatgaggccaggcagagtcagagaggctagggaagatgtggatcccaagacatcgagaagttggtagaagacaggctttgggggacagtaagggctttggggaactgttggaagagggtcaatttcttggagttagaggagaattggggaacctcagaaaagtcagagagaggcagggacctgttgagagagacccccatctctgtagcagtcagaattctcagaaaacagggatactggcagagacacagaaggaaaaagccagctcagtgaactggtcagagttatggtctggggttaagggtcaagatcagggttgattagaatgaagggctgagaccaggattggagggtcagagccaggattatggaagggatggaaattcaggttggggccaagagttgagaaactgaaggttggggaccatggccagggtttggggtcaaggctgggattggaagccagtgataggtcaggagtcaggttaggggtaggggtgaccaggctctctaagcccttggttgggtgccttcatgtggtagctacagttcagagattagtgattagggatcaaagctagaggtcaggaatcagagtcaaaggtggggttggcactcattgggttcctaggctgacggctctggtttgcagtcatagcccaggcagggctggcgtcaggtaaagggaagtggttccatcaggttccgagttggaactggggtaaggctcagagt

SEQ ID NO: 36333 - DNA, 1414 bp, Artificial sequence
  DNA replication origin
aaaacaagaaagggcatgtgaaggggtctcagccctcaccgtccccaatctcaatctcccggaaggctgtttcggagcctgagtcagacatgaggacctcgccattgagggtgaagataatggtgttctctgtgaggtcgatcatacagccaacgacatcgcccggctgccaggggcgcccaaatggttcactgcccaagtgccagcgctggccctgtgaggacagccagagaagacatggtgtggggagacacacagagaaatggagagataaggaagcagggagggagagatatatgaagacagacattcgaagtgtcaggttcagggcaggtggtatggaagaggggtcaccccacagtgtctccatctttcctcacatttgcatccatgatcacaggaatttttctccccactaatctctgtgtctcatcccttctgcctgggttctctgctgttgccatggctagcattatgcagaccaccaaagtggtagtggggggctggaagcagcagtaagtagagggatggaaaggaaaaatgaacctatcagtgtccccatacagatccatatatgcttatatacatgcacaaaatagatgagtggctaatgagacagatagatggatgagaaattgggtacatggctggacagaagaatgattggaaagttgagagtttacctgggttgatacagagaaagaacaaagtgtaagtaggggcaagcataaataaatggatgacagatagagggaagaagggaaggatggttgtataaatggttgttggatgggcagatggttattggatggatggatggacagttggctggaagaatggatggatggatggttggttggatggatgagggatgaatggatgatggatggatggttgaatgcatggatggatgcatggttggctggtcagatggatagatgatggatggatggatggatggatggatggatgatgggactatatgtgcatgctaccttgcctagctaatttttttattttttgtagagatggggtctccctatgttggctggatgaatggatggttggttagctggatggatggttggatggatggatggatggatggatggatggatggatggatggatgatggatggatggatggatggatgaattgttggttggatagatggatgtctgatagatcgatggatggatggatggatgaatcattggttgaatggatggatagatgggtggatgagtggtacagtagatgcatgaagtggggacagagtgaggcacagacagaggcagggccagagtagacaagctgtgggagagaccacaggacctggcagaatggtgcccagggaggtacccacgcggtgcccattgaagacataggccagctcgtcagctcccagctcta

SEQ ID NO: 36334 - DNA, 1175 bp, Artificial sequence
  DNA replication origin
ggatcctggggctggcgggagcctggtgttacccctagaggtgttgggtcctggggctggcaggggcctggtgttacctctggaggtgttgggtcctggagctggatgggacctgtgttacccctggaggtgttgggtcctggggctgcatggggaggtctctgatggtggctcatgagaccccctttccccatgcgggtggccaggcgagagcgtggaggagaacgccaatgtggtggtgcggctgctcatccggaagcctgagtgcttcggacccgccctgcggggtgagggtggctcagggctgctggctgccatcgaagaggccatccgcatctccgaggaccctgcgagggatggcccaggcatccgcagggaccggcggcgcgagcagtgagtctcccggccccctcctcaatagggcaacccgccctccctggcccctggctgcctccccaacccacccaccttccctgcagctttggtgaggaaccgcctgaagaaaaccgggtgcacctgggacacgccatcatgtccttctatgccgccttgatcgacctgctcggacgctgtgcaccagagatgcatgtgagaccctgagccagggcaggatgggaagggagggcaggcacagccgctttgaacgcctcatgcaggcactcggtgacacggagtgagctcccatatgtgggtggtcctggactagcaatgttggggacacaacagtgaccaagacagccccagggcctggtctcacagagctcccagtccaatgggggagacggacagtgacacccagagtggtcagggctgggatgggggagcacaggaagaggggtcggggctgggattgcagggcacacggagaggactcaggatggggatggggaacacagggagaggggtcaggatggggatggggtcacagggataggggtcggggccaggatgaggggtcgcagggagaggggtcaggatgaggttggggggaacaaggagagaggtcgggactggggtgggggggcacaggcagaggaacgagggctggaaactctagacagcctcctgagaaagaggcctgctctaccctcctgtgtggtaagggagggagcagagcagtcactgagtggggcaccagcgcctgatgagtgcccctctccctccctctactcccc

SEQ ID NO: 36335 - DNA, 848 bp, Artificial sequence
  DNA replication origin
acatgtttgcatctaggtggatctgtgggttaggtctccccattcatggactttgccttctctcaaacttggtagagtgggtagagactccgagagagtgggtttgattccttggctgtagtaagacttctcggagactcaagtgtctaatgggataaggagattgggtttgggaggctctgttacagagcaggtaagagacttgagttggaatccagactggaccattgcctagccacatggtcagggttttctcctttggggtccttcctccacccctctctcatcccattccaccaactccccaccctcctgtccaccccaggacaaagagatttaccgctggcccatcaaggagtccctgaaggccatgattgcctgggaatggacgatagagaaggccagggagggtgaggaggagaagacggaaaagaaaaaaacgcggaagatatcacaaagtgcccaggtgaaggcggggcctgggtggagggcaggggcacgatggggggagggtctagaacaaggggcatggccagacagggaagggatggagaggagaggggcccagggaggtaggtggggcaagaggggtgcagaaacctgagatctgggaaaggagagggcaggggtctgaagaactgcaaagggcagaggagagaaggatggggtggtttagagacagggccttaaggaaaggacaaggggtcttgagccaggggagggtggagggggtagaatggactagtggggcctggggaggggctggcctgggcttcctgctagcccatcagcccacctcccatcttccccttgtcctctcagacctatgatcctcgagaaggctacaa

SEQ ID NO: 36336 - DNA, 864 bp, Artificial sequence
  DNA replication origin
ggtgaggaggagaagacggaaaagaaaaaaacgcggaagatatcacaaagtgcccaggtgaaggcggggcctgggtggagggcaggggcacgatggggggagggtctagaacaaggggcatggccagacagggaagggatggagaggagaggggcccagggaggtaggtggggcaagaggggtgcagaaacctgagatctgggaaaggagagggcaggggtctgaagaactgcaaagggcagaggagagaaggatggggtggtttagagacagggccttaaggaaaggacaaggggtcttgagccaggggagggtggagggggtagaatggactagtggggcctggggaggggctggcctgggcttcctgctagcccatcagcccacctcccatcttccccttgtcctctcagacctatgatcctcgagaaggctacaaccctcagccccccgaccttagtgctgttaccctgtcccgggagctgcaggtgagagccctgatccttttggggggacatagggtgtctttgggggggctggcatcctctgaatctagcccttgactctgcatccactcccaggccatggcagaacaactggcagaaaattaccacaacacgtggggacggaagaagaagcaggagctggaagccaaaggtgagggcgcccatgccgcccccacgctacccccgtggattcaccgtgtggttttgctgattgccttcatgcccctgaaactcggtttctccatctgtagatgggaataataacagcgtttaccaccatggggtaatgagatgagcaccagcaagcaatgtttccgttattcgtatcttctttatcaccataattacgcatgccggg

SEQ ID NO: 36337 - DNA, 1752 bp, Artificial sequence
  DNA replication origin
agagccctgatccttttggggggacatagggtgtctttgggggggctggcatcctctgaatctagcccttgactctgcatccactcccaggccatggcagaacaactggcagaaaattaccacaacacgtggggacggaagaagaagcaggagctggaagccaaaggtgagggcgcccatgccgcccccacgctacccccgtggattcaccgtgtggttttgctgattgccttcatgcccctgaaactcggtttctccatctgtagatgggaataataacagcgtttaccaccatggggtaatgagatgagcaccagcaagcaatgtttccgttattcgtatcttctttatcaccataattacgcatgccgggcactgcaggaaccacttcagtgagagtggcccgggtcttccccagagccctgatttctggtctttgcctccccaggcggtgggacccaccccctgctggtcccctacgacacgctcacggccaaggagaaggcacgagatcgagagaaggcccaggagctactgaaattcctgcagatgaatggctacgcggttacaaggcacgcgggttggggctcccgcggaagagcagcaggcagaacacacccggcaaaggctggaaggggcggggccagagaggggtggagccgagaggaacggggcctgaggagcaaagatggaaccagaggggaggagctaagggagtggggcctggacacagaggcggggccagatggggaggagttcgaaatgggcggggcttaagcacaggcgggaccagagaggagaggaggaagagaagggcggggcccagggagcagaggcggggccagagagtggaggagactgagaggggcggggaccggtgattggaggcgggaccaaagaggagagaaggctgaaaagggtggggcccggggaacagaggtagggccaaagaggaagaggctgagaggggcgggggctggggagcacaggcggggccagagaggggtggggaggtacagaggggcggggactggtgagtggaggcgggaccaaagaggagagaagggctgagaagggcagggcccggggaacagaggtggggccaaaggggaggaggctgagaggggccggccctggggaacagaggtggggccagagaggggagaaggctaagtggggtggggcatgggggactcagagtggagccccaacctggggtgaagccaaagctgatagagacggggccagcaggagcagaggcggacctgagaagggtgggaaactgtagggccggcgtctgggctgatccttctctccacatctccatgcagaggccttaaggacatggaactggactcgtcttccattgaaaagcggtttgcctttggcttcctgcagcagctgctgcgctggatggacatttctcaggagttcattgcccacctgggtacggagaaataccccccgcttatgcccgccccacctgcagacaccagttctgcagaccagactcacctaggacacctgttcatgcactcaatccgtcctccccttatctgatgtttattgagcttctactatgtgccagacactgttctagatgctggggtacagcagtgaagatgacaaatgacccctgctctcctgcaactactcctatgttggattcaggcaattagcatcataaataactaaatcgtttagtgttagaaggtgatcagtgttatgggaagaagaaaacaatagagccag

SEQ ID NO: 36338 - DNA, 1367 bp, Artificial sequence
  DNA replication origin
cgcagctgaacgagtacaacgcctgctccgtgtacaccaccaagtctccgcgggagcgggccagtaagctgtgtggggcgggagcagtgctgggagtccaaatctccccagcacagggccttggggagaccctaatttgggggtagtgtggctgggctgggctgtgagcggctgaggattccccaggttgggagtgccacacattcaggaaccccagagtttatggttcgggggcatttcaaggccgttacatggggagaatttagagattaatttgatttttgaaaacagaatctattgataaaagttaagaaaagtagcacttggtggccaggcgcagtgggtcacgcctgtaatcccagtactttgggaggccaaggtaggaggattgcttgagtccaggagttcaagaccaacctgggcaacatagcaaaaccccatccatggaatttggagctatggaatttattttagtgatggtgacatttgagggcatcatcaagcttggagacatagggtgaggggtatttgagcataagaggattgagggaaggcagggttcattcattcattcagcaaatatgtatcgagcagttactatgtatgaggcgctgtcctagtcacctgaggttcagcagtgaacagataaaacagacaaaaatcccctgagtcctgggtccagaggctagaatgaggtgtggacctgggggaaatatacgctccaaggcaggaaacttgtcttcttggtcagctgttctcccagaatggcacctggcccagagtcagcaagtgagcaagtgacaggttgtcggtttcaagggactgaaccgggtgtgggattcagagagacaaggcggggagacagggtggggttggaaaaggtctcttttggagtatgctgtacagcaggggtgaggggaatgggcttgggatgtgggagattttaggagggaaggtttctaggggtgagattttagggagcagacaggctcgggggtgtgaagtgtttgcggggccactgagtttcaatgtgagggttgggagaggtagttgggttggagggtgagatgggaagaatagggtttgggagactgtttaaggggggtggcaattcaatggtgtctgatgtattgcgggggaggccagggcactgaggtctgggggtgatggcttgacattccctgcccccgtccctgtaccccagtcctggggctccccaacagtgtggaggagatgtgtcccgacatcccggtgctggagcggctcatggcagacattggggggctggccgagtcaggtgcccgctacacagagatgccgcatgtcatcgagatcacgctgcccatgctatgcagctacctgccccg

SEQ ID NO: 36339 - DNA, 798 bp, Artificial sequence
  DNA replication origin
gaaacaggttgtagatcagggtcaacctagaaatcaggagctgggatcagaggccagggtaaggggccagaggctggggtaagaagcccattcacaaccttggggtcatagccagaaatcacatagtgaggtaagactctgggtatgggccaggtcagaggttaaagattggggtcaggggtcatgctagttaagggtgaggtaacaggccaggtgcagtggctcacgcctgtaatcccagcactatgggaggccgaggcgggtggatctcctgaggtcaggagttcgagaccagcctggccaacatggtgaaaccccatctctaccaaaaatacaaaagttagctgggtgtggtggcagacgcctgtaatcccagctactcggggctgaggcaggaaaatcgcttgaactcgggaggcagaggttgcagtgagccaagattgcgccattgcactccagtctgggtgacaagagtgaaactctgtctcaaaaaaaaaaaaaaagttaggtaacaggtgaggcgtctgttgttgggggtcagaggtcagggatttgtgccaggctggggtcacaggatagggactgggtcttaggttcaggttaggggctatggctgggatcagtgttcagggactatatccaaggttagggtcaggctggggtcaaatggcagctgctaggttggagatgctgtttgggagtcgggctgggaacggagtttggggcctgtgtcagaggccggaggtggcatcagagcccatcgcacccctgcagtgttcgcacagcccattgtgagcc

SEQ ID NO: 36340 - DNA, 1496 bp, Artificial sequence
  DNA replication origin
gcatgacccctgtgccaggcactgctgcaggccacacatgcagcttctccctgagtcctcgcagagccctggggtgggggctgctggctggatgccctcagaggctcaaaaggatgaccccaaccaaggtcacacggctaactatcaagacaggattctaaccccagtccatacagtccagagcccaagctttaaaccatccacggcgagggtgctgccccctccccaaccatgctccgtgtgcctctcccacccccattacccttgacctcagcccacgatgctttggtaaaagctgagagttgctctttttttctttttttttttttttttgggaacaaaagtccagaaaaaaaaaaggaaagaagaaaaagaaaagaagtcaaattgccaaaagctgagggttgggatgggaacggatgggggtggtggggagggaagggaagggaaggaggatgggtgggggctgggaggggaggacgggggtggggaacagaagcaggggttttctcgaggcgggggcgtgcagaggctgggggaagagggcattagccaagagacatgcggaaggtcccagatgtggggctgacctgtatatctcccgcctgcttcaccggaccgcagacagagacaagaagggttaccccagccccgcagagaagcccaggcccaactccaagttgccagcaccccacctcctctgccccacccgccatgtattctctagctgggcatttccaggccttggctcggggtggggggtcgttctctgagacctgagaagggcagtgctgagaaggatagggaggaaagcaggaaatggggtaatggggagaggaagaaagaaatggaagagggggaaaatggggaggaggaggaggagggaaatgggaggagagagaggcttggagaagaggaaaatggagaggagggaaatgggaggagggagaagatacaggaggaggaaggagacagagatgagagaagagggagatggagaggaggagggagatgggaggagggagaagatacaggaggaggaaggagctggggaggaagggagagggagaggaggtaagaggggctgctctgaggactgcagggattgcgcccaggacgggctggctgggtgaggacaggccaggtaggaagtcctagagggtgctcccgccctctctgccaagtgctcctcccagaaccaagccccgaccttagccattttgcttttgttgtcagcagtcaggaaggacatgttgttgatctcattctggaccacaaagttctgctcctcgcgcttgaagttctggtgggggaagcagtgttgcagaccggacaggtgaaggcaggcgcctgtgggctgcggctcctctggttgtggggagggcggttggggtgggcactcacgtgggacttggaccagtagatgaagatctcgcccaccatcctgaacagctcctccgcgctgggattcggctccgtcagccactgcgccctgg

SEQ ID NO: 36341 - DNA, 2204 bp, Artificial sequence
  DNA replication origin
gaactcctaacctcaggtgatctgcccgccttggccttccaaagtgttgggattacaggcatgagccattgtgcccggcctaattgttgtatttttagtagaaacatggtttcgccacattggccaggctggtctcaaactcctgacctttgaggtctttcttcaatgcctggtctttggtaaatgctcaaaccttcactaatattgtggttactttctgacttgcttcttttgcttgcagaggaaggaggcatacctttccctgaaggtgaaggttgttgtgcagaaattcccggacctcctcatctgtgtctttctggggagacagagccaggctgggtcactctggaggtcccatcctccttcctgacccacaaccctttccttccaggcccagcaccccaggaactgaagaggtttttctggggtgggggtgggggtctgagagaaacaaaaggatgcagaggttgacggggtcagaaggggtcctagaggggccggagggtcacagagtcaccttgaagatacagtaaggattcgaggggcctcgtggaggtctgggaagaggcaaagggtgacaagaggatctcatcaaaggtcaaatatggccaaagagggatgactggggggtcagagtggggcagggagtctttgaagatcagaaggggtcagcagaggtcatgggggatcacgtaggtcaacggagtcactggttacacaggggccaaagggggcatcagcagggtgggggttcactggggttctaggacggggagccctcaaggaccaaggtgaggggtccatggagccctggagggctctctggcgtcctggcaggactcagcagtcctgggaggtgcctgaggttctgagggaaggggtgtcctggtggtagcaggggagaagtcggtggtctttaggggtccagggggttagtaggttgtcagggtgttggtgtggtcctggggggagggctataggggtcttggggcagaatcctgggagggttccttagagtccctgaagctggaaaggatcggagaggagggagattgtccttgttgtcccacacaaggggtaagtggggtcccgggaggcctccttgatatcccagcaagcttaagaggttctacagcccgggtattttggtctccaggacagttgagacctcagaggtttgggtacagtcccgggcttggggttcatggatcctggggagttatgcagggtcgcagggctccctgagcccctgagagtcttgggggcttagttgggcttcaacagggcccaggtgtcagcagggtcctgaaggaaagggatggtgagccaagggctcagcaggaacccagaggttcagtcttggcagggagggaaggaggggtcatgagggtctcagtaggtcccaaggggcttgaaggggccttggtggagggttcagaggatctcaggggctcatcttgttggggggactctcagggtctcagcaggtttggcatggtccggtgggggggcagtggggtcctgcagtcctcatgcgggtcccaggggtcctagagcttttctaggtttcagtgagggctcttaggtctgtggtgccctggcaatatcttgaacggggtcctcagggcatcccaggggcacagtgagtcctcagcatcccggaaaagaactcagtggggtctgaagggaaggctcccagggacctggggggctcagtggcattgtggttgttccctaaggtcccaggggttcagtgggtgctgggcggcatcctggaaggttccgaggacggggctgggcaggcaccagggcgtaacgggtcttggccagcgtgatgaggtcttggtcggtgggcgcacacatattcaggccgatgggcagcatcttcttcagtgtggccacgatcagtgacgtctgcacagagtaccggtccccccggcgcttcttcttggtgcgttcctggtccgagccaccggactgtggggacacagggctcagcaccagcccaagccccaatcccatgcctcagccccaacccgcggccatcatccacaccccaggccccagtctggacaccaggcactccctccccaactgccgacgacacctcaatttccaccccagacttgctgactctacacttcaggcccacagccatgaccggagaccctccagacccaagtccacaacccaaattcccagtt

SEQ ID NO: 36342 - DNA, 1358 bp, Artificial sequence
  DNA replication origin
acgtggtgaaaccccgtctctactaaaagtacaaaattagctgggtgtgatggcgggtgcctgtagtcccggctactcaggaggctgaagcaggagaatcgcttgagcccaggaggcagaggttgcagtgagctgagatcgcaccactgcactccagcctgggtgatggggcgaggctccgtctcaaaacaaaaagatgaagaagaagaaaggcctcaacatgcactcacccattgagtcctcccaaaaacggaaaggggacatccggcggacactgtgggaagggtccctcacgccggccactccttcttcctcccttcaggtcgaaggctccccgtctctgcgctggcagatggctctgtaccggggcgtcccgggtcgcgaggaggacgccgatgaccccgagaaaatcgtgcgcagagtccaggaagtgtcagccgtgctctactacctggaccaggtgggtggggccggaggggtctttctactgggtctctgggcggagcctggcggggggaggggcttcaaggatgtgggtggggtctggagatgactattaagttttggggcagggcaggaggtggagcctcgagtttaaggcgaggcttagaatggatcgggggaggggtctgctgcttaatcttgcatctgggggcgggacagggaaggggcagatctttaggtctaggggtggggcctagaggagatgcgttgagtttgtgggcagggccttgggtgggtcgtagaattggtcgtggcctggctcgtggtcctggctctgtgggacctggcctaggatggaaacttaggtctggaggcggagtcaggaccctgactctgttggtggagacaaggttttccttctgccgtgtgagtcttaacctgaatatggacttcgacacagctgggcagtttcatccagggctgggagtgagaggggcagggtctggggatgtgactgtcctgctatcccctccccagaccgagcacccttacaagtctaagaaggccgtgtggcacaagcttttgtccaaacagcgccggcgggcagtcgtggcctgtttccgtatgacgcccctgtacaacctgcccacgtaaggcccccagggacaagggaagcgtgaagggctgcggagaaagggtggctggagagtctggagaatggagggccaacgtgatggggccttgagggtggttgggggctgcaggcgcatgggaggtcgggaagcacggaggagggcgcgtcccagtgacgtcacacctctcccctgcaggcaccgggcatgtaacatgttcctggagagctacaaggctgcatggatcctgactgaagaccacagttttgaggaccgcatgat

SEQ ID NO: 36343 - DNA, 802 bp, Artificial sequence
  DNA replication origin
gggacattaataagagaacagcaaccagggcgtgacatttggggcacgtggagggtggggtccatgtagtgatgggtgagaacacaagacagaatgacttctggtggcgggggggggcggaggtgggtggtggacatggggagggagaccccagggggatggagggggtgggactgggggaccacagcagagggagggacccgagggagcccttgggaaccagtgtcttggaggaagggagctctgggcaatggcgggtgggggtggggtgggaggaatcccaaaggaagatgtctcagggggtgggaagcccaagggagggcctcaccagtgccatcctcattcaccatgcccagcccctcggccttgttctgtctctcaaaggcattgagatccaggacgctgaggaaaagaaaggaaagatagggggtatgtgatgaagcctctgccctcctctctcccagggcctggcagctccccaccatggtagcctggagagccacagtaaaccatctatgcgctgaaatcaagaggaagcagaaatgaagagttggcagaagctaggacatatggttgggccaggatgaaccatgcgcaagctgaaataatgaggaaccagaaaccacccatttagcaaaagctgcagagggtaggaaaaatcagccggcagcaagaggtgaataaaggcagacaacagtagaggcagattaattgggatcatcagagagctcctaaatctcccactgccaagttccccttaaattctcaagtttttggttccactgtctggaattcataatgc

SEQ ID NO: 36344 - DNA, 590 bp, Artificial sequence
  DNA replication origin
gcagagggaatgaaagaagaggatggagagggagagagagagatgaagacatagaggtagaaaggcaggagcgaggatccgggtagaaaggttagacacgtcacaacacggcaaagaggagacgcgattaacccggattagggacattaataagagaacagcaaccagggcgtgacatttggggcacgtggagggtggggtccatgtagtgatgggtgagaacacaagacagaatgacttctggtggcgggggggggcggaggtgggtggtggacatggggagggagaccccagggggatggagggggtgggactgggggaccacagcagagggagggacccgagggagcccttgggaaccagtgtcttggaggaagggagctctgggcaatggcgggtgggggtggggtgggaggaatcccaaaggaagatgtctcagggggtgggaagcccaagggagggcctcaccagtgccatcctcattcaccatgcccagcccctcggccttgttctgtctctcaaaggcattgagatccaggacgctgaggaaaagaaaggaaagatagggggtatgtgatgaagcctctgcc

SEQ ID NO: 36345 - DNA, 781 bp, Artificial sequence
  DNA replication origin
gtgtgtgcaagagaatgaggtgagggtgtgtcaggggcgtgtggggagtgtgagggaatggggaggggaaccatatgtcagccaggtgtgccagctctgctggggacatgccgggaccacgtgagtgtacccttggggcaagcgagtgtgtgagggatgttcaagcatttgtgggctgggcataggaggagctgagatagggcatgtcagattagagagtaggtctgagggctcttctgggtgagcctgagaccgtggcccaagtgtgcatgggtgagcatggttgtgccagggctacagtgagggcaagtggacagtgaacaaatgaagcatgccagggttctgagagggctcattggcatcctcagggtgtgtgtgcaagaggtgtgcacccacgtgtgggcccagaataagttggggtacacatatgctaggacttcagaaggcatctgggggcaaacgtgatgactggtgaagggtgggtcagcatgccagggcaccccagagcccccaaggcgagcgtgtacaagagtgagcatgagcgggccaggaccaagagacggcacgccgggggctactgggaaggtgagcaaggggtgtgtcgccatgcaggttcgaggaggtgagagtgtgggtagggctgcatcagggctataagggcctgccagagctcccagggtgtgggtgtaaggggaaagcatggcgtgtgagcagccacagtcaggacacactgaccctgcttcatgcccaaggggtgtgcatccttgtgtgggccaggtcc

SEQ ID NO: 36346 - DNA, 945 bp, Artificial sequence
  DNA replication origin
cagaggcagggatgtgtggacatcctgggtgccaggatgctgcaaccacttgtgtgccagatgggggtgtgtatgcagtggggccccgaggggcacagatgagtgtgcaagatctcaagggttcctgcggagtatgtgaggagacaccgggggccagggagggatcaggagtaaggagggcgtggcggcatgggaagatgccaaaagtgtgcaaccacgagaggctcagtgtgcacggtggacgtgggcacacggggcaggtgtgcaagggcctgggactctgtggggggacaggaggagtatgagtgtgagaggggcctgcagttatgcagtgtgcgtgaggcaggcatgaatgtgggaaggggagccaagggtttgtgtactggctcccagaacatgaggacagggctctgtgtgggacatgagcccgcgtgcatgagctggtgtcccctgaggagacatatgaagggcccactcatgaaggaggtgacgggtgcgcaaacctcccgggctatgtgtgtgagacaagaaggggtgtgcaagtacctggcggcatctgaggaacaacaagcaagtgtgtgtgcaagagaatgaggtgagggtgtgtcaggggcgtgtggggagtgtgagggaatggggaggggaaccatatgtcagccaggtgtgccagctctgctggggacatgccgggaccacgtgagtgtacccttggggcaagcgagtgtgtgagggatgttcaagcatttgtgggctgggcataggaggagctgagatagggcatgtcagattagagagtaggtctgagggctcttctgggtgagcctgagaccgtggcccaagtgtgcatgggtgagcatggttgtgccagggctacagtgagggcaagtggacagtgaacaaatgaagcatgccagggttctgagagggctcattggcatcctcagg

SEQ ID NO: 36347 - DNA, 1132 bp, Artificial sequence
  DNA replication origin
gccgccgaacagcgagccccagagcaggcccagcgcgcccgccgccgcccccgcgccagcggccccagcgcgcgtcactgctgcccagagcagcgccgccactgcggtggccgcctcgcgggccgtaagccgccgcagccgccgcacgcgccgccgcaggctgcggtagctgaggcctcgcagggcccggcctgcggccgccacaacccgcgccgtcgcccccgccgccgccgtggccgccgtgccctcgagccccgccgcgccctcctccgcgccttccgcgcccgcctccgccgcgcccgcgccctcgtcctcgtcggtctccggctcgccctcgggctccgagatctgcgcggcgatctgcatctcgaagatggtgtcctcgcagaaactcacgaagagctccatcttctcagcctcgccgccctcgttcaccacgtcgaagatgaactggcgcttggactccttcacctgaagcgaggggcggcagacaggatagggcgccgtcagcgggggctcggacagcagcgacagcgcagtggcagctacaaggggtcaccgcggcaggcgctgttctaaatgcattgttggtattttgtttttgagacagggtcaggctgggcgcggtggctccgcctgtaatcatagcactttgggaaactgaggctggcagatcacttggggtcaggagttcgagaccagcctggccaacatggtgaaacccccgtctctactaaaaatgcaaaaattagccggtgtggtggcgcacccctgtaatccgttactcgggaggctgaggtaggagaataacttgaacccgggaggcggaggttgccatgagctgtgatcgtgccactgcactccagcctgggcaacagagtgaaagtctgtctcaagaaaaaaaaaaaaaaagacaagatctagctctgtctcctaggctggaatgaagtgacgctgtctcactgtaaccttcgtccccagggttcacatgatccccatgcctcggcctcctgagtagctgggattacaggcgcctgccaccatgctgggctgagtttttgaattttcagtagagacagggttttgccatgttggccaggctgatctggaactcctggcctcaagtgatctg

SEQ ID NO: 36348 - DNA, 1094 bp, Artificial sequence
  DNA replication origin
gcggccacggcggcggcgggggcgacggcgcgggttgtggcggccgcaggccgggccctgcgaggcctcagctaccgcagcctgcggcggcgcgtgcggcggctgcggcggcttacggcccgcgaggcggccaccgcagtggcggcgctgctctgggcagcagtgacgcgcgctggggccgctggcgcgggggcggcggcgggcgcgctgggcctgctctggggctcgctgttcggcggcggcctggtggagggcgccaagaaggtgacggtgaccgagctcctggcaggcatgcccgaccccaccagcgacgaggtgcacggcgagcagccggccgggccgggcggagacgcagacggcgagggtgccagcgagggcgctggagacgccgcggagggcgctggagacgaggaggaggcggtgcacgaggccgggccgggcggtgccgacggggcggtggccgtgaccgatgggggccccttccggcccgaaggggctggcggtctcggggacatgggggacacgacgcctgcggaaccgcccacacccgagggctctcccatcctcaagaggaaattgggggtgagagagcaggcggggttttggggttttggaaagatgggggattggagggaggaagagagcccggctgggtggagacacacacagaggagagaactggctagggggatgggcacacgcacccacggaggacgcacccatggaggacgcacacggggacagcgggcgccgggcaagagagacgctcagagacagagggatactcagacccacagagaaagagactcagagatggagacctggagaaagggccggggagagagagtgcagggccggacagagtgcagggccggacagagtgcagggcccggagaggtagagaaaatgatacctgcagagccagagagagtaagaaacccagagaccaaattagagggcaggaaagaccaaaactaagccaggcgcggtggcttacacctgtgatcccagcactttgggaggccgaggcgggccgatcacctgaggtcaggagtttgagaccatcctggccaccgtggtggaaccccgtctct

SEQ ID NO: 36349 - DNA, 1530 bp, Artificial sequence
  DNA replication origin
aaagggccggggagagagagtgcagggccggacagagtgcagggccggacagagtgcagggcccggagaggtagagaaaatgatacctgcagagccagagagagtaagaaacccagagaccaaattagagggcaggaaagaccaaaactaagccaggcgcggtggcttacacctgtgatcccagcactttgggaggccgaggcgggccgatcacctgaggtcaggagtttgagaccatcctggccaccgtggtggaaccccgtctctactaaaaatataaaaattagccgggcatggtggtgtgcgcctgtaatcccagctactcgggaggctgaggcaggagaatcgcttgaacccgggaggcagaggttgcagtgagccaagatggtgccactgcactccagcctgggcgacagagcgagactctgtctcaaaaaaaaaaaaaaaaaaaaaaaaaaaaaggaaaagaaagaccaagactaaaaaaagtcccgagacagggtcagggccactaggaaaagaccctcggagatactcgttgtgggaatgaagtacaccgtggaggaagggaccccaaacatcctcaggcccttggtgctgggaatgccttgggaatgtggaggtcaaggtggtgggaagccctggggacaagcagagctgcacttggagtcagcccgaccctgcgcagtgctttgggcaaagggcttcacctcgatgagcctcagtttcccctctgtaaaacgggaatcataatctgcctctttctggtggagggaagtgtaaaacttagattacccaggggaaataagagagaaaggagatgagaggagcaggcaggcagcctgagaagcgcttagggtgaggactcagccctgatgcttgccctgtccctaggtggatggagtggaggaggagctcccgccagagccagagcccgagccggaaccagagctggagccggagaaagccgagtgagtggccttggggctgaggggcctagcccctatcactgcctccctcctagagtaggagcctccagaggtcaggccccaaggctgtcctggccaccctgtgtcctcggcatcacccagcccagactcaggcacggaggaggggctctgagtaaaagaatcaagaaataaatgctccaacctgggcaacataaaaaaaaaattaaaattagccaagcatggtggtgtgtggggaggctgaggtgggaggatcacttgacccctggaggtggaggctgcagtgagccctgatcgcagcattgccctccagcctgggtgacagagcaagaccctgtgtcgaaaaagaaaaaaaaatatggagagatagaaaaatgaaaactcccatctaactgccaggccttcgcatgtgctttcccgctgcctggaacacaggcccccatgcctactctgagtctttctcatcctttccaattctccaggacacctgaccccctcctaagttgaggaggtgtctcctccagattcccacaaccccctgagcttcctccatcccagcccc

SEQ ID NO: 36350 - DNA, 903 bp, Artificial sequence
  DNA replication origin
aggtgggggctgggtccttacggcgtgttgagcaccagtcggtcccactgccccttcacgtcatcgtcctcaggctgctccgtgatgtacaggccatcaaactccagcttccgggccagctccttctcccgcttaaagattaccaggggcacctggatagtgggaggaggccaaaggtgggcgtcaggcaccttggctggaccatagtctcagcagaagccatgacatcttgctggggtctgtgtgtgaccccacatcagaagtgctttcccagtgataagggtagaaatgaggcccaggcagagggcttagggctgggatgtggggaacatgggcagaggggtcagggcagggatgggggaggcacaggcaggggggtcagggctggaatgtggtgcatagatagaggggtcagggccgggatagggggcatagatagaagagtcagggctggaattggggggcacaggcagagcagtcggggctggcagtggagaggcacaggcaggggtgtcagggctgggatgtaggggcatataggggtcagggctggaatgggggtggggcacaggcagagggatcgggccaggatgtgagaacaggggagctgtgggagcccaggagtggtgcctgatgccacctggggcttcccaagggagggaggtctgaactcagaactgaaggatgaataaaacaggcaggtgcaaggaggtggaagcagggcaaagtattgcaggcagagggaatagcatgtatgaaagttttaagcccaaagaactctagttcaatagcaaagtatcaagacagtggtccagaacctggttcctcagctataagccgtgtccgttcccaatctgaatgtcgtccttactggagacccctgtcatccttgctggagacccc

SEQ ID NO: 36351 - DNA, 1907 bp, Artificial sequence
  DNA replication origin
cgagaggtgacttgcccaaggtctcacagtagcgagaggtagagatggggtatgaatgcaggccgactggatcctgggcctgcattcttagccatggagctagcctgcctccgggccctgagcgcccactcccagcactgaccctggatgatggccaacaggatgacgatgacgaagaagaagaaggtgatgtcgaagaccaccctgtagagctcgtattcgtcacccgcggggtcctcgatctcgtccccaatgcctccgccagcccggacacccacgtacatgtgaaacaggtaacactgagggaggggagcacactggtcactcattcattcgacattcactgagtaccagccaaggccccgggataggcagggctgaagacatggtaacgactgagacagccctgggccctgccctcaaagggctcacagatacggcatcagacagggaccaacagccagaaatggtcagggctgtgacaggaacagcacgggcaggggggtgagggccaggttgggtgtggggcgcaggcagaggggtcagggccaggatggggggcacaggcagaggggtcagggccaggataaggggggcacaggcagaggggtcagggctgggatggggggcactggcaggggaatcagggccaggataaggggggcacaggcagaggggtcagggccaggataggggggcacagggagaggggtcagggctagcatgggggggcacaggcagaggggtcagggctggaatggggggtacaggcagaagggtcagggccaggttgggtggggggcacaggcagaggggtcagggccaggatggagggtacaggctgagaggttagggccaggatagtggggcacaggcagaggggtcagggccgggatggatggggggcacagacggagggatgagggccgggatgggtgggggggggcacaggtgtagggatcagggccaggataggggggcacaggcagaagggtgagggcgaggatgggaggggcacaggcagagggtcgaggctggggtggggaggcacagtgtgaccagggatgagctaggggaagcactggaagctttaacagcccgctggaggcatctgatccagcctaggtgatcaggtgaggcttcctggaagaggaggcaggtgtgagctgaaacctaaaggaggccttaggtggaggggtggtgggagagtgttcccagcagagaaggccacatgctgcctcgccatcagtgaggaaagagtacatcctgctgctgtgaggaactgaaaatggttgggtgaggctggaaaatagagctcctgtgcaggagagcagggagagatgaggcagggcctgggcatgtggctctgtgggccctggcccagcccgcggtcaaggggcttcctgtaggatgtggcatttaagtggaaaggtgaggtatcaagtgaatggggtgtgtgtgtatgtcaggcctggggtaggggacagagagaacatcaggtgcaaagggcttgaattgggagaaaacacacagtcctaggggaactgaaagaggaccaggcggctagaaagcaaaaagcaagagggtttgcggttagacccaggcagggccagcccttcccaggctttgtaagccacggcagggtgattcgactttatctacagtgggctggggagccacaagaagggtctgagtgggggtggggagggagcatggtctacctggcatttgggaacaactttacatatgtttttttttttttttgagacagagtcttgctctgttgcccaggctggagtgctgtggtgcaatattggctcactgcgacctccaccaccgagttcaagagattctcctgcctcagcctcctgagtagtcgggaatacaggtgcgtgtcaccccaccca

SEQ ID NO: 36352 - DNA, 1181 bp, Artificial sequence
  DNA replication origin
acagcgggcagctcagagcctggcccggtcagcagcgcgaacacggacagaggcgtcggcagtgggaacagcacctgctgcgggccgcacagggaggggcgggctagggggtggttcaggacggggcctcagggggcgtggcttgtagctggcctgggacttccgaaccagggccctaagtcttgggggatgccgtctagaaatgtcaggggataaggcctggtgcctccgcgggaacgggggtcgtgacctccgagtgggtgtggcttccatgtgggggcatgccaccttggcggcagacgggcagggccccaaagatagcaaaacctgcttagacactcaaagagacaggctctaaatgggctctactaggacacccagggagtggcagcattgagcctgaggaataattaggcccaggtgtgaggggcggcgcttaaggatcaggatggcttcagaaggacgaggctccaagcgcagaccgcaggtgggcggggcctcgggagattggggcggggcctcgacggaggtggggcttcatggagctcttgatagaagcgcaaagggtgcaaggccttagccacccactcctcagagttcccagcaccctcccaagccccttacccggacaagcaggaatttgttcatgggctggtaccactgaagcaggacaacggacgtctccaatgcaccgcacaggaacgggcccccagagctcgcaccctccgctgtggcatgggcaaggatgagtcaagatcaatgccctctatcctcctcgccacccacactaccacccatcttctgggttctggacacattgccttaactctgtaaccttctcaggtggatgcagttcaagcccctcctctggcctggccccgcccactctctgcacacccgtgaagctctctctcacccacacagcacgcccggcagcctttggtgtcctggatcttggtggaaaccatgttcttcctggagaataggtaggtgtgaaggggggtaggacagcaggaggcagaggggcatgggaggaattataaggctgtgtggtgccattcattgggagctggtaccttgccagtaggcggtgggggctaatgtgagcgatggggtttcctgctctggtctctttccgttccagcaggccaaggatgctatgagaatacaggtggggggtc

SEQ ID NO: 36353 - DNA, 1000 bp, Artificial sequence
  DNA replication origin
aatcatttgaggtcaggagttcaagaccagcctggccaacatggtgaaaccccgtctctactaaaaatacaaaagaagctaggtaggccgggcatggtggctcacgcctgtaatcccagcactttgggaggcggaggcgggcggatcatttgaggtcaggagtttgagaccagcctggccaacgtggtaaaacctcgtctctactaaaaacacaaaaattagccaggcgtggtagcacgtgcctataatcccagctactcaggaggctgaggcaggataattgcttgaatccagggggcggaagttgcagtgagctgagatcatgccactgcactccagcctgggcaacagagcaagactcagtctcaaaaaaaaaaaaaaaaaaaaaaaatgggtagagggatgagttggagagtgaaagtaggaatattggaattcaggggccaggagtgtcagaatataacaaaaaggttagagtttggagcacgagaaagatggacagctggaggttaatgatagggagactgggagcagcattttggggtgaggaattttagagattaggatgcagccagaaagggacagaatctagagatcaaagagatgaagacaaggtcagtgttaaaggaacaggtcacactggacagaaaaagtcctgtttgggggtgtctgagtttgaaggtcaatgttaggattggcattagggtatcagaactggggagaaagaggggaggaaatcagaggactattttgggggacaggtctaaggttggggtcagtttggttcagaagacagttgggcagagaagaaagaaccaccagaatatgggtagtcaaaaggagggagagtgagactggcttgcgggaccgtccgctctggctttgtttggggaaacagaggctgggagtattggtttggagaaagaatagagggtcagagctggggacagagtgtcagtgtttgaggtcagacaggtggggatctgggaggtccctgagg

SEQ ID NO: 36354 - DNA, 891 bp, Artificial sequence
  DNA replication origin
ggctcatgcctgtaatcgcagtgctttgggaggccagggcaggatggcttgagcccaggaattcgagactagcctgggcagcatagcaagaccttgtctccagaaaaaaattaaaaattagccaggcgtggcaggtgcgcctgtgaccgcagctactcaggaggctgaggtgggaggattgcttgagcctgggaggttgaggctgcagtaagccatcattgcactcctgcacttagccttggtgccaaaacaaatcatgagtttgagaccagcctggacaacatggcaagaccccatcctacaaaaaaatgattagcctgtttccaaaaaaaagactaataacagtaacagcaactcttggaggtggagtgctgacagtgcaccacggctttgcacctttacaccacctagtaacacaggtgacatcagcgccgtggccctgctctccctgtgctggcgccacacacaggctgtcgcacgtgatgggtgaagtgagtgcgcgcacctggatggagcctgactcggcctgtgggctggggagtatgggggcctgggctgactgttgggtctggatctggggctcagtatctggtctttgggagatttccaggtgccaaggttcagcctgagggcgggcaaaaagataggaaaagctgagggctggggctgaaggctggagggtgggtctggggtgagagtgacattcgggaggagtttgagactgggatgtggctgagggtgcagggtcatggaggataggtggggtcaagtcagagattggagcagcagcacattctagaaggaactggggtcagctctggggtggagagcaggtggggggctgacgctgagggtcaagtcaaaagattgtataagaagatggaaggaggc

SEQ ID NO: 36355 - DNA, 1674 bp, Artificial sequence
  DNA replication origin
actgggatgtggctgagggtgcagggtcatggaggataggtggggtcaagtcagagattggagcagcagcacattctagaaggaactggggtcagctctggggtggagagcaggtggggggctgacgctgagggtcaagtcaaaagattgtataagaagatggaaggaggccaagtgcagtggctcacacctgtaatcgcagcactttgggaggctgagatgggcggatcatgaggtcaggagtttgaaaccagcctggccaacatggtgaaaccccatctctactaaaaatacaaaaaattagctgggcatggtggcaggtgcctgtaatcccagctactcaggaggctgagacaggagaatcgcttgaacccggggagccgaggttgtagtgagctgagactacgtcactgcactccagcctgggccacagagtgagactccatctcaaaaaaaaaaaaaaaaaaaaagaagaaggtggaaggaaagaaggaaagtgggagctggagctgggatcaggttgggggtcaggggttggaggtgaagggttaagggaggtggggttagggaacagggcctaggtagctgggcagaggggctgcattgagggtctaatcagggctcagggctcggggctagaagaaaggcaggggtgcagcggggtcaggagtggaggaaaggccacatcaggggattgtaggaaggtgggggctgaggtggggcctgtggagctgcaggcagggcctcacttacatgtccacgtcgtcatagtcatcgtcagacgactctgacagttgcttcctgaagggtgacaggtatgagccttgggggccttgtccacattccagccccctccccatcctccctggggtccctgacctggggctgctgctcctgaggtctcgaggaggctgtaggcgagcctgtggggtaggaaaagggtcagcagtggcctcagggaagcaggcggtgtggtggggagtggggggacagcatctcacggtgttggctgggggtctggtctccattcctcggagcttcctgaactccatgtgccgccctagggtgggtgggggaagataacctgctgtgagctgggggcaaggggtaacgagatgggtttaagaacagaaagagtagaattggcgggggggttgcagtcaggatcttggggactgcaaatgatctcagggaactgtcccttggggaaaggggtcttggattacagggacttcatttgggggtcaagtttgggatcaagaccaggtgcagtggctcacgcctataatcccagtactttggaaggctgaggtgggcagatcgctggaacccagagtttgagacctgcctggacaactgggcaagaacccatccctacaaaaaatgattaaaaattagccaagtgactgggcacagtggctcacgcctgtaatcccagcactttgggaggtgaggcaggcagatcacctgaggtcaggagttcatgatcagcctggtcaacatggtgaagccccgtctctactaaaaaaaaatacaaaaattagccgggcatggtagtatgcgcctgtaatcccaattactctggaggctgaggcaggagaatcgcttgaacccaggaggcagaggttttggtgagccaagatcgcaccatcgcactccagcctgggcgacaga

SEQ ID NO: 36356 - DNA, 880 bp, Artificial sequence
  DNA replication origin
actttggaaggctgaggtgggcagatcgctggaacccagagtttgagacctgcctggacaactgggcaagaacccatccctacaaaaaatgattaaaaattagccaagtgactgggcacagtggctcacgcctgtaatcccagcactttgggaggtgaggcaggcagatcacctgaggtcaggagttcatgatcagcctggtcaacatggtgaagccccgtctctactaaaaaaaaatacaaaaattagccgggcatggtagtatgcgcctgtaatcccaattactctggaggctgaggcaggagaatcgcttgaacccaggaggcagaggttttggtgagccaagatcgcaccatcgcactccagcctgggcgacagagtgaaactccgtctcaaaaaaaaaaaaaaaaaaaaaaaaaaaaaacattagccacgcgtggtgaataagcctgtagtcccagctactcaggaggctgaggtgggaggattccttgagcccaagaagtttgaggcttaagtgagctgtgatcacaccactgcactccagcctgggtgacacagcaagatcctgtcacaaaaaaataaacaaataaataagttttgggatcaggaagttgggggctcaatgtagttacagggtgttttcaggatccgtttgggtattgaggttctgatgagatttctgaggtctccctgggaactctatggtcattttgcttttgtttttgttttgttttgttttgtccttgagacggtctcgctcttgtcacctggactggagtgcagtggcgcaatcttggttcactgcaacctccacctcccaggttcaggcaatcctcctacctcagcctcccaagtagcttggactacaggcgtgcac

SEQ ID NO: 36357 - DNA, 3213 bp, Artificial sequence
  DNA replication origin
gcgcggctcgcccccgggctgagtcgggcggccaggaagcgggactctgcgcaggcgccaagctccggagcgcggccttggtgccttttctggtttggcaggcgcgcgcgcgcgggagggcggcaacctcggcgctgtgcgcaggcgcggcgggcagtgcgcaggcgcgggcggagggcgggctgaagcagctgaagcggcggtagcggcggcggctcgggcagaggggcgggagctgaggcgggagcggacaggctggtgggcgagcgagaggcggcggaatggtggactaccacgcggcgaaccagtcgtaccagtacggccccagcagcgcgggcaatggcgctggcggcgggggcagcatgggcgactacatggcccaggaggacgactgggaccgggacctgctgctggacccggcctgggagaagcagcagcgcaaggtgcgcggcccgcgggccggacgggctggaggggcttttctgagggggcccggggaggggtgggaggtcctgaaaggtaactggagcgtctgtgatgggaacgggggggtcccgagaaggaattggcgggtccgggaagggaattggagtcctgaggaggaatcgccgagctagaggaaggaattgggaatctgaaaagagaattggcggctgggtggggaatatgggagtcaaataaaaggaatcgggaaggctgatgaaggatttggagggtctgggcgtgccattaggggaaaccgaggagatgactgggcaggctgaaatggaactgggatccgaggcgggcttgaagggtcggagcatgggttgggggtgctgggaggagaatcaggggaggctgagaagggaatttctgggtctgggaagtgtgaggaggagcttgagtgtggaggggttggttatttggagagcagaaagatctgaaggagattggaattgggggagcctcaggttgggggagttataaaggggatgaagaatcaagtgtgaggatggagtggagattgtggggtctgaagacgggtgggaagactagggaggctgggaagatgaaaacaggggctaagggtagaattgagcatgaaaagacatgggcttagggtgtgaggagggtagaggtgccaggactgggggtctgaggagggtggggtgcggaaggaagaagttaaggggcccgtgaatcagacgtttttgaagggggtgagatttatttgtggtgccctgttccaaaggggagaagattaagagataggaggaataataagaggaattgatgagggatggagaagccgaagtagaggggatacggagagtggggataatttggggagggatttctaaagaattgatgggaagctgaaaagctaaagcgttggagagaatgaggaagtgtagagggagaaggtgagatcggtgggagggagggtgagctggaatggtggataatgggagagaggttcgtttaggaaaatgaaagtctcattagaaagggaatgcgtaatggatagactgagaaaggaatttgaggagggggtgctggctcctggaggtgcagtcccgggactggagagcgtgtgtgtgtcgtgcaggcagaatgagtttggggaggaagcgttgagagtgtccaggaagaattgtgtcttttttggagagaccggaggtaggtgaagggatcctgaagcagagactgtgttcaggtggcactgtttttttggggggcggggggggcaacttggtagggccccacagcagtgaaaaggtgatcagaagtggagtgggatccccgagcgaggtgtcagtgtctgtgggggggggataaatccagtgtggttgaggggggagctctgagtgtgtgcaggaagagctaaagaaaggagcgtggtgagtgggtgtgtgtggggggaaggggttgttcagaagttttgtgcgtgaaatgggtgggaggtacttgaagttggaagcatttcgtgggatctggagatctggattttctttccagatttgttactgattcgctctgtggccttggacaagacccttgaactctccgggcagttttgttatctgcaaaatgcaaagggatccgagggttccctgcggtgattctgttaataaagagggatgtgtgtagagttgggactttggacagggctctgaaggtttgggagagtgagtttggtggagatttttcaggaacaggctacagggctttgagtggtgacctggcagagtggggagtgactggaagcctctcgagggcgcgagttggtggccaggagcttggcacaggcagcctagcccaggctggaggggaaagggtgggaagggtggaaggagcagctgttccaaggcagcctgaggtggggccgggcataaccttgggtccattaccagcgttgcttgaatttcctcatccgtagtaactgaggggcatggcagtggcttggtgggaggggtgtccttatccgtggccccacctactgcaggatggacaggttgcgatagttggcataaattcactttttgaggggaaggtgagatctgttctggagtctcaacaataatttattgcctgaggcagtgccaggttggaaaaggttgccaagagacctggaaagttgggagggagcaggggccacagtggtggttttgagaatgtctaggctttgtcttctgcagctgaaggtgctggagaaaataaacccctcccccttttttctcaggtgataagggtggggggaccttccttttctctcccttcctgtcttctgccactcctcaagtgactccttttgcgagccgggtttcactccctcccgagagttagggtgtgggctttgttcgtggttatagtgtcccttgcctacagggtgaggctggggcaccattcaggccctgggtggaaaccaggactccccagaacctccaggccttgctgccatgtgtcattctcttacctcccagctcccttcctctggggccgggcaggtttgagggaaaagggtggctcacagagtccgctaataccatctgctttcgtgtctcagccagagccagattctagtacctcctgctttacacctcctccagcaaatatttacccttagctgctctgtgggggaaactactgcttcacctctgtgccctttcctgttatggggtagggattctttttgaaatgggggaaggagtaatggaaaggaatacacca

SEQ ID NO: 36358 - DNA, 1221 bp, Artificial sequence
  DNA replication origin
ggcggccactgccacgcaagctctgtgggctctgcctggcctctggagggctgggaccgtgagtgcaggttgggctgcacatgctgagcctttcctggcaggaaggagctgcaaaacgggtaaagcccagtgctccccacgaagggcttggcaggggcaggcaggcagccctggtgcagatgatggacagggcgagtgggaacgccgggcagtcaaatcccagctctgccattgactgtaatgcagggcttcagtttccccgcctgagagcctaggatgccaccacccacctcccagggtgggctgtgttcaaacagaggtctgtgactcctcagcacaggcccagcaccggccaggcgggaaacctgccccaggggaccttccgagtcagaggccggcagggtcagtctgtgtggtgtggcggcccacggcctggccagggctccaaccacagatggccagcggtgatgcaagggcggtggtgaaggcaggtctgcagccccagcagcgaggtgtgcctggcccagctcaccttctgagcccccgagaaagcgtggtagaagcaggacacgtaagtcatgatggccttctcatctggcctcagagtgcccacaatatctgcacagagagagagagaaagagagagagaggcaggagagagtgaaagacgcagggagggcggccgggccggcctgaggctcatgcaggaggaagagcacttgctctggactggaagccagccccaggcctgcgtggacatgccttgcggggttttgtggagtccgaatagggtgcattccttttctaaccggcctgggctggagacagactagctgtgggccctataaaggcagctttgttttgggttggaggagtcagttgctaaatgatctgtctgaaaatgtgagtgagcagctcccaccacggagtaagaccctaaggggctcccatggccctcagagtggaacatgaatttcttatcccacaccacaagggtcttgttgggcctgacccatcactgcgtgtcactcactcctctctagctggtccctgaatacgccaagcttcttcctgtctcagggccttcgtagtgcttcaccctctgcctggaacacctgtgccccagcctgcatctagcagctcctgctgcaagtacctgctcacttcacccctccacattgacagcaccagctgaaggtcaccccagccatctctgtcccc

SEQ ID NO: 36359 - DNA, 1576 bp, Artificial sequence
  DNA replication origin
cagctgacctcatgctgcctcacagctcctgccgggccctcagcgttcacgcagaggcccaagcactgctccccccgcttgccttgtggtctctgaagtatctcaggcagcattcccgatgcctgctttgaagtgtcagcagttggcacaggttcagaggaggaggcagaatcgattcttgtttactgaacatgtactacacgctaggcaccctccaaggccttcacatgcacaggcttccagagggtccctgtgcacacccccaggagggctaggcgcagttagccccatttgagagaggaggaattgaagtttagggaaacagctattcctaaaactagaaggggggggccgtaccttctgtggacccctgctttgagcctcccaactagcaggtgcattacctaccgtcagtctggcctggccccactctgccacctcttggtactgtgaccttgggtgggtcacttgacctcagcttccccacctgtgaaatgggcatcgctgtagttcggtctcacaggattgttctgggcgtgaaacgagctcctgcaggcaaagggcttagcacagtgcctggcacggcagctgccatttaggcagctgccagggagccacagtggtggggagtgtggttcttcccagcctcgggccagaaaggcctcttcacctcctcagcatgcgattggagcttgtgtttggagtgttctgctagagggcacgggccaggagggtggagggaggacccctgacccacactcccgcgggagggtgggcagggaccagcagcaatggacgattcgtcaccacagaccccaactaacagcatgtttgccattggactcacccctacgggccccgaaccagccccctgcccaccacatggcctcaccagattgcttttctttctacccacactgctcccctgtgcttagggctgaactccagtctggaggctctgagggattttgggggagcagggactggcaggcaagcccaggacagtatgggtgggtgctgaggcactgggcctggaggcttgtcactggcccctctctgagggggtagtggaggcccggctgcagggcgctggctggtcagaaaggaaagtgctgggtccctgtgtgctcctcaggacagccccgtggtgctgctcctgctgcctcgtttccccagagacccagtccaagctcttgcaagagtgctctctggggttcatgttttataaacgcagagtgaaccccaggtctagcgccagtgtgcccattctgtcctgagatcatttatttctagtcaccgaagcgttcccgcctcgttcctttattcactcactcattcagcaaccctgaacaccgccagtgcactgagccccaagctggatgcgggaactcagcggtgaaacatgattcccttgccttgcggcagccccgtgctcacagagaggacttgagtttcgggtgccagttgtctctgccaagttaggagtcagggactgacctctgtgacccccacaagctgcagccctggctgtgttttccacactggcctggggcccatgttcattggctgaggaacc

SEQ ID NO: 36360 - DNA, 1000 bp, Artificial sequence
  DNA replication origin
agtgacctctggctgaggataatgaggtggccctgactttcactgggggaacactcacgtcgctggccagcttctcgtagtcctccatcaggtgctcgttctcttggttgacagccagcaccttacagatccggttggcggcagtttcagcctggaggggagcacacagtcagggctgcctgggggctggccaccctccctcctgacgggcacgtcccttgaaagcagctggtccatggcccacggaactcctcacagaggggaaggagaggaagcacagctccagtgagatggtgccctgtcccaataggccttgttggcatcctcactgctgactgcaaaatgcccctgggtccagaaagcccagaccctggaggcaccgaggagggttggggagccctcccactgctgctcgcaaaccctctagtgccccacacagaggagggtgaggctggacgggtcggctgcgttggacctaagactgcggaggagtctctcccggtgggaaggtgaaaggatgggaagccgagagctggagagctgggggcaacagagcaggggcgcccgggtcccggaggagcctagtggtccgtgcacaggagcacactcaggcctgtccactctcctgccttggaggcaatgttaataggagctccagaggacagaagtcaccatccgtggggcagaaaagtgctggggctttggagggtgagagtggtggacatagtccctgggcctgaactacaggagagcgtcctgccctgtcctgctagggggcagtgaacagtgtagaggaggcagggggtgcacacggggagagagagaccaggtacctttcaggaagcacagaaagggtccaagaggaggagttgaaacggcaacagaacaggaacagaaagagtgaggagggtctacagagtgatggggaaggaaaatggagaggcttggccaacggctcagagccagtgctgcaggcagcgacgcccagcctctcccctcc

SEQ ID NO: 36361 - DNA, 1080 bp, Artificial sequence
  DNA replication origin
ttctgccaggcaagagggaagtgcggcacccggcctggccaggcccttcctccctcactatccactctctcactcgcactctttcctggtagcaaaggggctgggctgctctgaggctggcagctgccgcgggaatggcgagctgagctcatgtgaggagggcacaagctgggccgtggccagggctgcaggccgtgtggagctgcacactcgcatgcgggccagggtggggaggggtgagaaaatgcactcaggaatgcaaggaagggctcagctgggcggagtggcggccggagggccagggagactgtgttgggaaggtggtggccagagtgggagaggagtcctgtgagtggctcttgtggctctcccaggcactggcagctttctgaaggcttccagacccctgggatctgaaatctcaaccttggcatgacccaaaagagggccagggacgtgatgaaatcccacatctggagccaacggccaggcagctgcagggctgccgagaacagaaagcacagtggcgctcctgcagggggagccaggcccgggaaggaggctctgggaagggatgggaggtgggaggagctcacaggtgggccatgctgaagggtgggccgaaggcagtgggtgagcactgtctgagggtgagcactggctgtggtccggcagcaggcccaggaggcaggccctcctctagcctgagggacgtgccagtgaacatgggctccccagccttccgtccacgctcacagaggtgtgggagagggaagccgactctgaacacagggtgcgggggatggaagaggcctgccccacacactcgccctggatggggaagacacgcagaggggacaaacagatgggtgtaaggtcacttccctgaagtgctggagggggcttggctgtgttcctggatgactgacagggtcccacctctgaggcgagggcagactgggcaacaaagaggacctggcccctgaatggtccctgctttctggggctgaaggaatccaaagcagcatttctttcctttttttttgagacagggtcttgctctgtcacccaggctggagt

SEQ ID NO: 36362 - DNA, 834 bp, Artificial sequence
  DNA replication origin
tggtggagggtcggggggggggttctccttgcctttgggatttggagtgggacagaggggactgtatcctgtcctgggggcgccaggtgcagagctgaggctgcacacttctcagtccgtcagcccggcaggggtgggctggggatggcagcaaactctggcgctcagggcccctctgatgaggctgccggaccaaatctgaattctaaaagcactgtgcggggtgtctgtgtccaggttcacagaccgggtcgcaaagcctgggtgtgctgagacttcatctgccctgggggtggtgaggatgccaccccagaaggcaggacttgggacctccggccccctgcctgtgcgtgtgaagtggcccaggctggggtcttggtgccgcacacctacaccctgacagtggcagggccctgctggccctgggagtggcggccgacgctcagcaactgtgatgggaatggacgaacagatgcagagacgaaggtgtgggctggtacggcaacggcgggaggggagaggccgaggaggtggcaggctgctcaccttgtcgaagtggttgaaggacgcccggaactcctgcatctgctcctggctgatgcccttggcgtcgcgggtgaggatctggttctccacctcgttgatggtgcgggcaatggtggtgagcagctgctcccagcccacgcggatgtgctgcggaaagacgggggcgtgatcgtgggccgggtgctgtgaactgtcctcaccgtggttcacacgtggaggactgtgaactgtcctcccgccctggggaaagcccctgctctcctgtacacctcacaggggacacgggcc

SEQ ID NO: 36363 - DNA, 1095 bp, Artificial sequence
  DNA replication origin
tgccactgctccagctgacccaggcctccaagcccccagtgccccaggccgggaagcagggcctctctgcaccctcccctctcgtggtctcccacagcagggaactggggtctactgccctcagcccaggctcacgagtaagctctggaggatggggaagaaagagagaaagagaaagaaaaaggggagagagtgggagagctgccccctctttctggagacttctagggaagaaggggggctcgggaagtcatcggagggaccccaccccggcagatgcagcagaggaagaggcaggcacggctgcgctgctcgggcggaggagtgtccccgaggacgaggaagctctggaggcggtgagggggagaggtgggggggaggaggaggaggaggaggaggaggaggaggaggaggagcgggtggctggggagacagagctgcataccaggctgtatcctgtggagataagcagagccctgaagtcatcggagtccatgctgcctgtctgcttctgctccgaggacgcaggcatagcagaggaggccgggcccagagtaggcaagaggggccgccccatgtgcacagcaggcagacaggacagtggcggggagcagggagacagcggccccaagagaccaggtaaaagggaaggggtccagggagatgtgggcagggaggcaagagagccatgagatggcacacaggatggcaggggtgggatggcgaggggagaaagagagaaggagagagagagagagagcagttaatgccatggtccgctggggcccagggtgcagtacctgccggtcgttctccacgtcgtagcccaggctgatgaggcaggccttgaactcctcgggccccagcgccccgccatgatcctgccggggccatccgaaggcaggtgtgcgggaggggcggcgtggagaccaggatgagggatcggggtcacatgcagagggcagggggaagggacacgtaggggagggaaacacagagttagaggcaacatggacaaggagatggccagggacacgtggggtcgggggcggcacgggcccctttcatcctttccccaacctcggaagctcaaag

SEQ ID NO: 36364 - DNA, 1861 bp, Artificial sequence
  DNA replication origin
catacctccacccccagagagatcgggctcaggacctgtgagcagctgctgcagtgtttcggggtacatggggggcagtgcctgggtgagggagggagtggggaaggggacgttggggtctctcctccccttctggagagattgaccttaaccagatgcccccgacccccaacacagcatgggcaaagcctggccttacaccacttccagcagctctggggctacctcctggagtggcaggtgaggtgggagactgggcctcttcccagaaagagagaaacctttactaacagagacataggcaccctgtgggctatcaggtccccagggaacgagggggtactggactaggctgacttggagagatctggctgggatatccctgcccccacccagcctcagcttgtcctctgggtcattgctcttattcccattttacagattgggaaacagaagtcccaagtggctaggctgcttgctgggggtccacaccagaagaaagggagttgggatgggcaccaggctgtcttgcctgggaggccccattggcagccctcttcagggcatggagggcagccctgactcatccttcctgcccaggccatatttaacaagttcgatgaggacacctctggaaccatgaactcctacgagctgaggctggcactgaatgcagcaggtgtggacagggtcctggggtggtcgtggggacaggacctgttctctcccatcccattgtctccaagtccccctgctcagctgtggccgtctgcactgtggccatccacaggcccacaccttagcttgttgccagtccctggcaggggttgggtgaccctgaaagaggccaaataaggaaggagaagggcaaggggcgtgtgtggggtggggaggacatgaaagggggatgtgcctggtaggggttctggggcagggagaggcccctccaggaaggggaagattaggagctggtatctgagagggtctggcccccagggcagcatggtagaatgttctggattctggtgcaccggggttggaatcctcactctactgactccaggaggggccctgggcacttgacttcatctctttgagcctccattttcctctctaaaatggccagggcctggtgtggtggctcacacctatggtcccagctactcaggaggctgaggcttgaggatggcttgagcccgggaggctgaggctgcagtgagccgtgattgtgcctgggtgacagagcaagagcctgcctctcaaaaaaaaaaaaaaaaagctagtacacagggtggtgaggagtcgtccatgcactgcagggcatagcacttagtgattggagaatgcagctttcattaccaaaagccccaaagagagccggccaatggcctctgctactaggctgagttcctcctgatgagctggaacaagcccagcacaacatcctaaccaagaaagagagccagagagaaaggctttccatgggctccaaggcagatgagacagtacagcactgtgaccctcatgtggaggggatttggagagtgggctggggtcagaacttggagttcccagatccccaaccccactctggggcctgtctgccaccacacagcagatggagccacagggagatgggggctggggtgactgtgatggagtcggagagccagagggagagggtttgggtgtggctgtgagtgtgagacccagagaaggtggtcaagtgtccaaaagagccagccgggcgtggtggctcacgcctgtaatgccagcactttgggaggctaaggcaggcagattgccagattgcttgagcctaggagttcaagaccagcctgggcaacatggcggaaccccc

SEQ ID NO: 36365 - DNA, 978 bp, Artificial sequence
  DNA replication origin
tcaaggcagccttgcctttcagcggaaggggagcttgcgagcagccgtggcccaggtcacggggcccacacaagatcccctgcagggagatgctgccaggctgagccctggcttcctgagcccaactcccagcagcgcggtgggttcatagacatagggtggcaccggctctggttgcaggacccctggctaagacccctcctcctgcccctatcccagccaactcaccaggctccagggcaatgcttagtaaggcctggagctgagaggcattgagttcttcctcctagtccaggaaagagggcttgtgaggccatttactcatccagctgctctgggccaagccctgtgctagggacacggcaggggctgacagagcctcagagccctagctccaggagtgggggagacagacctgtccccacagggccagggctgtgacgggggaagcactgggctgtggttgctggtggggggccagcagaccggcctggggcaggggggtggtcagggagagcttccagggctgggcaccttagatgagacctgagcctggctggaggtgtcaggagggagagggtggtcctgggagagggtatggactgagcccaaggccctgaggcagggaggagctgtgagcatttcaagaaaaggtcaggagatttaagcccggagggaggaaaaagcaagcaaaatgagacacctgagatgctggggtgggggaaggggggtccccaaggggaggccgcagcgggataccccctcagtccaatccccctcctcacctctccagccagctcctgaaacagctgctccaaccccagctccaggggcaggtaggggccctgccgcatggcggaagtttagcgctggccaagatccccgccccatgccgcccctccaggaacagtccccacctggagagactgcaggtctgcgctgatcacgtcgtcgatctccctgcaaattacagatggg

SEQ ID NO: 36366 - DNA, 998 bp, Artificial sequence
  DNA replication origin
accttccaaggccgctgggtgcgtggcttcaactccggcgggagccagcctaatgctggtgaggcctgaggggccctgagaggcttcctggggtggggggcgctgtggccggctaggaaacccccttttttcctcctcccttagaaaccttctggaccaatcctcagttccgtttaacgctgctggagcctgatgaggaggatgacgaggatgaggaagggccctgggggggctggggggctgcaggggcacggggcccagcgcgggggggccgcacgcccaagtgcacggtccttctgtccctcatccagcgcaaccggcggcgcctgagagccaagggcctcacttacctcaccgttggcttccacgtgttccaggtgaggtcctgggcaaagctgaggctggagggaacccggagggtggaggggcggggccgggccaaggagcgggggaggcatggaggggcggggccagtgggaagaggggaggtgtggagggcggggccaagggggaagagggggagtggtggaggggtgggactgaagaggatcggggaggaggggaggagtggaggagcagggccaagagggggcggcgctgggaggggagtagggggctagtagggctggggggccaggtctcagaggggagagggagctaagggaatgagagggaggggctcagggacagacagagggacgaggttagggacagagagaggctgggggttagaagggccagaggggaccaaggatacagagaaggcgctgggagcgcagatggggaaggaagagttggggaggggtcggcgagggcctgggtcggggactgcggggcaaaggttcaataagggtctaataggacgaagaaggagggagagagcacagaggtgagaaggggcagggaggagaccctgagcggcggccacctctcccctgccccgacgccccttgctcttgcttctttcagattccagaggaggtgagtctgggatgggg

SEQ ID NO: 36367 - DNA, 1033 bp, Artificial sequence
  DNA replication origin
cggacgccaagtgcagccccggccccagtgtgactttcagggttcagggcgtcgctggggctccccttaatggcggggttggggtgggagaggctgggagcactgtgagccccgagcccgcaccctcggcgaggcaccctgcagcgaccgcgggccttagccggggacagagaagccacgccagggctgtgatcggaagctgcacgtgggtgctcgggaccggctgttccggaaccttcgtccggatccacgccttggtgggcgcgcccaggcttgggcctggatccccgcccttgagcttccgtccccctggcggccgccgccgtcattgctgcctggaccaaggcggatgcaggaagctggggtggttcctggcctggcctgaatctgattctggtgtctggtggggacgccaggttcgccgcggggcccaggcgcgttcaggacctggggttttctgcccctgcgaccctcgggctgggcagtctcttcccgcgtcctgccctggagtgggtgggcggtagtcaggagggagccctgctcaggtgaggaggcctgggagaggccggattcttttagtcctccggggctcctgcttgaatgagttagctcttatttcatttggctgtgacgagtggtttcaacatactattttttttttcgtaaagataacatatacatgtggtacacatttcaaaacatacagtgaaatgaacatattattggcacaagtggtgaatgtggttgggccttcggattagatggtagcgattcagccgtgttaatgtcccgattttcaccgtgccttacagtgtgcacgtgggaacctgtccctgtttgtggaaaacatagttaggtatttggagatgcaacatgtttgcgattttttctcaaatggttcaccgagaatggagatttggagctgggcgcgatgcctcaggcctgtaatcccagcactttggaaggctgatgtcggagcatcgcttgaggccaggtgtatgagaccagccttgataatatagcaacagcccga

SEQ ID NO: 36368 - DNA, 1092 bp, Artificial sequence
  DNA replication origin
gggcgcgcccaccaaggcgtggatccggacgaaggttccggaacagccggtcccgagcacccacgtgcagcttccgatcacagccctggcgtggcttctctgtccccggctaaggcccgcggtcgctgcagggtgcctcgccgagggtgcgggctcggggctcacagtgctcccagcctctcccaccccaaccccgccattaaggggagccccagcgacgccctgaaccctgaaagtcacactggggccggggctgcacttggcgtccgcttcccctcccgtcacagtgaccagggctagggccgcggtcggggccgtcggggagagcggagggcgcgtgggaatggggctcgctgcgccacggaaatcccgcgccgcccttcgagtcctcccagctgctccgcagagccggggccgctgccatcgcgtctgccccgagggtgcgcaggcgggtacctgtcccgactcggggaacagcgggagcccggagacgcccgtcgggcttcccagccccacctgggacgtctctaggggcgggaggccaggagagaagagggtgggagagatgagctgcagggggatacgggacccagggacccgggatcttataacacgctttccacccgtaggattggggcccacaaatgaccagaaaggtgggactcattcgccccctttgcagatggacccatgttggcgccccttagatctgcagtgggggcaccaggacctgcggtgagcgcctctgcgccccaaacgccagcaggtccgcccgaccgcattcccagctggcttgctttgcacaaatgctgcgtcagggcacgccccacacccactccttcccagatcgcgaccctcacgccttcgcagacagaaagtgtcctaagcacaggcaggctcagagcccgcctccgcctcggattcgctgtgtggcccggagccagtatcttggcctctctgggtctcagtttgctcatctcagtgaatgggacacagacacagtcgcgctgcgggctaacgctttatttgccagccaaggccccgggcccgcctgggcttctgctcagaagatcctcacggagtccagctgca

SEQ ID NO: 36369 - DNA, 989 bp, Artificial sequence
  DNA replication origin
ttaatttgggggtactctgggaatggggagtgccagtccataagaccttcactttggtctgggcggtttatgttttgtttgttctttcgtttttttgtaaggtggggtctcgctatgttgcccaggctggtctttaacttccgggcccaagcgatcctcccttctccacctcccagagtgctgggattacagggtgagccactgcacccagccaacatttcatttacttattcattcaaagtaaattgtagacatcggtattcctcaccctcaacatttcttggtctgggtggtttctgagccctgacggccaccatcctcctcttccaggttccatgtaaacctgctgtgcggggaggagcagggctccgatgccgcgctgcatttcaacccccggctggacacgtcggaggtggtcttcaacagcaaggagcaaggctcctggggccgcgaggagcgcgggccgggcgttcctttccagcgcgggcagcccttcgaggtgctcatcatcgcgtcagacgacggcttcaaggtgcgtctctgcgacaggggcgtggacgccaagacttaggtccctggagcagagggttgggcaaagccaggctattggtggaaggcagggaggttcggggcggggtgaggggggtagggaagtcgtggccaaggcggagaagggtgtccttcgaccctctctctcgcctaaacaactcccacttgggtccgagggacagagagacagcagggtcaggacgaggcgagcaccagccaagtgtccaaggggtgggcgtcctagcgggaaggcgtggcccagactcgccatcccagaccctactcccagttcattccttcctgaggtccggggtttgaggcatggggagggatgggttggaaacagcgcccaggaactcgtcctagcaaggattggcgggtgggagtggcggcagatcctccaccacccacagcttacgcgaattcacctccctcctctg

SEQ ID NO: 36370 - DNA, 908 bp, Artificial sequence
  DNA replication origin
cctgctggggaccttaaataaaagcagggcggggctggccctgatgactcaccccaccccttcccacccaccacccacacctggcacggaccctggccctggggcaagcctggcgaagtgggagtggcgcctcttcttgggggccctgatccccccatcacccagagcccgggtgcactgcccctctcctaggagctgataataagagccaccgcccctccacccctgtcttcccactgcctggcacacaggagagtctctcatgctcattttatccacagacatgttgggtcctgagaagccaagcccagcgggaactctagacccttctctccagctgagaacctcctgcctagactggaaatgtctgcgctgaaatccctgcttctaagtctccagtggaacagcagccacaacaacgacgatagtgccagacagggggacttcacagggtcggagggcggcctggttggctcagtgctgcacccctgggtcctggagtgtgccgggttcatgggaagtcctcagtcaggaggggtgaaaggaggggatccactaggactacgcttgtcatttcccaggcccttgggctgcccaggatatgcaggaaatcactgattgggaccccaccattccaacagagagaagcatgggtcacccccattgtacagagaaggaggctgaggctgggatgggaagtgattttccacaagccgggcaggacccattgccccaacctctgcctttcctcacctctgggcgtgcctctcctgtgggttctgtctctggggctggctgtctggctctgtttgtctctgtctataactgtctaccgcgtattcctgtcccacttctctccttcaagtctctcttgttcctccttccaggactgttaccatcttcccacc

SEQ ID NO: 36371 - DNA, 1118 bp, Artificial sequence
  DNA replication origin
cctgttaatttgggggtactctgggaatggggagtgccagcccataagaccttcactttggtctgggcggtttatgttttgtttgttctttcgtttttttgtaaggtggggtctcgctatgttgcccaggctggtctttaacttccgggcccaagcgatcctcccttctccacctcccagagtgctgggattacagggtgagccactgcacccagccaacatttcatttacttattcattcaaagtaaattgtagacatcggtattcctcaccctcaacatttcttggtctgggtggtttctgagccctgacggccaccatccccctcttccaggttccatgtaaacctgctgtgcggggaggagcagggctccgatgccgccctgcatttcaacccccggctggacacgtcggaggtggtcttcaacagcaaggagcaaggctcctggggccgcgaggagcgcgggccgggcgttcctttccagcgcgggcagcccttcgaggtgctcatcatcgcgtcagacgacggcttcaaggtgcgtctctgcgacaggggcgtggacgccaagacttaggtccctggagcagagggttgggcaaagccaggctattggtggaaggcagggaggttcggggcggggtgaggggggtagggaagtcgtggccaaggcggagaagggtgtccttcgaccctctctctcgcctaaacaactcccacttgggtccgagggacagagagacagcagggtcaggacgaggcgagcaccagccaagtgtccaaggggtgggcgtcctagcgggaaggcgtggcccagactcgccatcccagaccctactcccagttcattccttcctgaggtccggggtttgaggcatggggagggatgggttggaaacagcgcccaggaactcgtcctagcaaggattggcgggtgggagtggcggcagatcctccaccacccacagcttacgcgaattcacctccctcctctgcgctttaatagcgggtaatggtcgctgaaatgagaatatccattaccagcactaaaaaagccgctttttactgtgccacacagtcaactcgtttgatcctcacgcaagagttagaatgaacaata

SEQ ID NO: 36372 - DNA, 1075 bp, Artificial sequence
  DNA replication origin
gcccagactcgccatcccagaccctactcccagttcattccttcctgaggtccggggtttgaggcatggggagggatgggttggaaacagcgcccaggaactcgtcctagcaaggattggcgggtgggagtggcggcagatcctccaccacccacagcttacgcgaattcacctccctcctctgcgctttaatagcgggtaatggtcgctgaaatgagaatatccattaccagcactaaaaaagccgctttttactgtgccacacagtcaactcgtttgatcctcacgcaagagttagaatgaacaatagccccattttcccagtgaggaaactgaggcccagaggggatgagtgatttccccagggccacccagcacgggcctccggaatcctcaccaccgaccctcccctgcaggccgtggttggggacgcccagtaccaccacttccgccaccgcctgccgctggcgcgcgtgcgcctggtggaggtgggcggggacgtgcagctggactccgtgaggatcttctgagcagaagcccaggcgggcccggggccttggctggcaaataaagcgttagcccgcagcgcgactgtgtctgtgtcccattcactgagatgagcaaactgagacccagagaggccaagatactggctccgggccacacagcgaatccgaggcggaggcgggctctgagcctgcctgtgcttaggacactttctgtctgcgaaggcgtgagggtcgcgatctgggaaggagtgggtgtggggcgtgccctgacgcagcatttgtgcaaagcaagccagctgggaatgcggtcgggcggacctgctggcgtttggggcgcagaggcgctcaccgcaggtcctggtgcccccactgcagatctaaggggcgccaacatgggtccatctgcaaagggggcgaatgagtcccacctttctggtcatttgtgggccccaatcctacgggtggaaagcgtgttataagatcccgggtccctgggtcccgtatccccctgcagctcatctctcccaccctcttctctcctggcctcccgcccctagagacgtccc

SEQ ID NO: 36373 - DNA, 929 bp, Artificial sequence
  DNA replication origin
gcagagccacatcttggtgggcgcgccaggccttgggtctcgatccccgcccttgagcctccgaccccctggcgtccgccttccgcattgctgcctggaccaaggcggatgcaggaagctggggtggttcctggcctggcctgaatctgattctggagtcaggtggggacgccaggttcgctgcaggtcccaggcgcattcaggacccggggttttaggcccctgcgaccttcggtctgggcggtcccttcccgtgtccggccctggagtgggtgggcggtggccaggagcgagcccagctctggtgaggaggcctgtgagaggccggtttctcccagtcctccggggctcctgcttgaatgagttcgctcttatttcatttggctgtgtcgagtgtttttaaaatatcagttttttcataaagataatatatgcatctggtatacatttcaaaacatacagtgaaatgaacacacattattggcacaagtggtgaatgtggttgggtcttcggattagacagtagcgatccagccgtgttaatgtcctgaatttcaccgttgactgacagtgtacatgtgggaacttgtccctgtttgtggaaaatagagttaggtatttggtggtgcagcatgtttgcgacttattctcaaatggttctgaggcaggaaaatagggtctggaggcagggaacataaggctgattcacacttcagctatgacaggaaacatcctctccatttacatagggcgtacagcaagtaaccaatggaaacctctagaaggtatttaaatgccaaaaaattatgtaacccagcccttgagcccctatgctccgccgcacccacactgtggggtgtatttttattttcaataaatctctgcctttgttgcttcattatttccttgctttgtgcgttttgcccaat

SEQ ID NO: 36374 - DNA, 944 bp, Artificial sequence
  DNA replication origin
ctgagaagggaggagaccctccgcctggcaaccgccccatctgagaagtgaggagcccctccgcccggctgccaccctgtctgggaagtgaggagcgtctccgcccggcagccaccccgtccggaagggaggtgggggggtcagccccccgcccggccagccgccccggccagccaccccgtctgggaggtgaggggcgcctctgcccggccgcccctactgggaagtgaggagcccctctgcccggccagccgccccgtccgggagggaggtgggggagtcagccccctgcccagccagccgccccgtccgggagggaggtgggggggtcagccccccgccaggcgagacgccccgtccgggagggaggtggggggtcagccccctgcccggccagccgcccggtccgggaggtgaggggcgcctctgcccggccgcccctactgggaagtgaggagcccctctgcccggccaccaccccgtctgggaggtgtacccaacagctcattgagaacgggccatgatgacaatggcagttttgcggaatagaaaagggggaaaggtggggaaaagattgagaaatcggatggttgctgtgtctgtgtagaaagaagtagacatgggagacttttcattttgttctgtactaagaaaaattcttctgccttgggatcctgttgatctatgaccttacccccaaccctgtgctctctgaaacatgtgctgtgtccactcagggttaaatggattaagggcggtgcaagatgtgctttgttaaacagatgcttgaaggcagcatgctcgttaagagtcatcaccattccctaatctcaagtacccagggacacacacactctgcctaggaaaaccagagacctttgttcacttgtttatctgctgaccttccctccactattgtcctgtgaccctgccaaatcccccct

SEQ ID NO: 36375 - DNA, 1284 bp, Artificial sequence
  DNA replication origin
ttctcaatcttttccccacctttcccccttttctattccgcaaaactgccattgtcatcatggcccgttctcaatgagctgttgggtacacctcccagacggggtggtggccgggcagaggggctcctcacttcccagtaggggcggccgggcagaggcgcccctcacctcccggaccgggcggctggccgggcagggggctgaccccccacctccctcccggacggggcgtctcgcctggcggggggctgacccccccacctccctcccggacggggcggctggctgggcagggggctgactcccccacctccctcccggacggggcggctggccgggcagaggggctcctcacttcccagtaggggcggccgggcagaggcgcccctcacctcccagacggggtggctggccggggcggctggccgggcggggggctgacccccccacctcccttccggacggggtggctgccgggcggagacgctcctcacttcccagacagggtggcagccgggcggaggggctcctcacttctcagatggggcggttgccaggcggagggtctcctcccttctcagacggggcggccgggcagagacgctcctcacctcccagacggggcggcggggcagaggcgctccccacatctcagacgatgggcggccgggcagagacgctcctcacttcctagatgggatggtggccgggaagaggtgctcctcacttcctaggtgagatggcggccgggcagagacgctcctcactttccagactgggcagccaggcagagggactcctcacgtcccagatgatgggcggccaggcagagacgcacctcacttcccagacggggtagcggccgggcagaggctgcactcttggcactttgggaggccaaggcaggcggctgggaggtggaggttgtagctgagatcacgccactgcactccagcctgggcaccattgagcactgagttaacgagactccgtctgcaatcccggcacctcgggaggccgaggctggcggatcactcgcggttaggagctggagaccagcccggccaacacagcgaaaccccgtctccaccaaaaaaatacgaaaaccagtcaggcgtggcggcgcgcgcctgcaatcgcaggcactcggcaggctgaggcaggagaatcaggcagggaggttgcagtgagccgagatggcagcagcacagtccagagggagaccgtggaaagaggagagggagagggggagggggagggggagggagctattttgtatttttt

SEQ ID NO: 36376 - DNA, 971 bp, Artificial sequence
  DNA replication origin
gatcagctggtacctccgtgacatcatcactcgataccaggagaccttcaacgtcatcgagagggtgactctaggggtctggaggggatctttctccatacgcgcctcccctgggccagccctgaccccactcttcctgttccctctcagtgccccaagcccgtgattgctgccgtccatgggggctgcattggcggaggtgagtctgcggctatcctcctgctcgggtgctccccaggtggggctgctgctccgatgccgcggccactggcatccagcctcagctctgtcatgggccagactgtgtcccaagaggcagccccacctcccgggagccagggttggttctggtggtcattcagcatccctggcctctacctcctaggtgtggaccttgtcaccgcctgtgacatccggtactgtgcccaggatgctttcttccaggtgaaggtgagtcatcctcccgagctcctgcttagagctgggcagtggggtgaggttggggggcctggagtgagcctcgagggcttcatggaagagtcggagttgaacccgacaaagtaagacttgcccatagaggaagtcaagaggtgaagttgtgagtgggtaaggtatgaggtggggttgaggctggcaggtgtcagaggcagagattgctcctggggccatactggtgagggtgggaggcaggatggagccgggggatgcagtaaaggggtctcaggtagggtgaggagggttcctctctcacagatggagctgccctgagggaatgggagggtgcatgagtgggaaggtgggctctattctaggttgaaggaacttgcctgagtcaagaagctgcctgggcaatggaatgggactttggaggaagtcactggggtgaaggtggggcgggactctccagtagacatgaaatttcatggacgttgacattgcgaggggcacagtattgggcagaaaccaaacac

SEQ ID NO: 36377 - DNA, 1479 bp, Artificial sequence
  DNA replication origin
caggagcccacggcggcggggggaggctcgggcatggcaggctgcaggtcccaagccctgccccacagggaggcagctgaggcccggcaagtattcgagtgcagcaccagcgggccggcactgctgggggacccggtgtaccctccgcagctgctggcccaggtgctaagcccctcactgctcagggcaggtggcgccggcccaccactccgagtgcggggtcgccgagctcacacccacccggaacttgcgctggccggagagcactgcgtgcagcctgggttcccgcccgcgcctctccctccacacctccctgcaagcagagggagccggctccgatcttggccagcccagagaggggctcccatagtgcagcagcaggctgaagggctcctcaagcatggccagagtgggctctgaggccagcgagcaagggctgccagcatgctgtcacctctcacttccttctctctctctttctttcatttttgagacagggtctccctctgtcacccaggctggaatgcagtggagcaatctcagctcactgcagcctccacctcctgagctcaacccctcccacctcagcccctaccacctcccctcatcctcccacttcagcccctcaagtagctgggaccacaggtgtgcaccaccatgcacagcaagttttttcactttttgtagaggcagggcttgctatgttgcccaggctggtctcgaacccctgatctaaagcgatcctcctgcctcagcctcccaaagtgctgggatcacaggcatgagccaccgcacccagcctcctgctttctttctgcatctccctctgttcctcctcttgttcatttgttcattcatttgacaaacattcagtgacacagtccagtgccagagccccctcctgggtgctgcagatgtggaaacgggaagcagccccgattcctgaccccttgctctcatagagatcatgtctgagaacagaaaaatggggcttttttgtggctgtgccgggcccaggtccttcatctttcagctcccagctgaatgtggccgtcttatcttattttcagcagcaagaccccgaaggccagaaggaagaaacggcaggtcatgcagtgacccagtgatagagtagaactactaattagagaaagaaaaaggtggccacaattatgtagcactcatggtgtgtgacgcccctttctaagcacgttaaacatattaattctaatcacagtccacaagacaggttctgctataagccccatttaaaggtgaaacagatccagagagcaagaaacttacccaataatcacagcttgtaagtggcagagctgggattttggaactcatgctgcctggctatagagtccttgctcttagctgctaaatgtctgtcatctgagtagctggcatgctggttaaaagtaagggggattgccgggcgccgtggctcacacctgtaatcccagcactttg

SEQ ID NO: 36378 - DNA, 1506 bp, Artificial sequence
  DNA replication origin
gaggcggtcgggagcgatggtgaagatggcggcggcgggcggcggaggcggcggtggccgctactacggcggcggcagtgagggcggccgggcccctaagcggctcaagactgacaacgccggcgaccagcacggaggcggcggcggtggcggtggaggagccggggcggcgggcggcggcggcggtggggtgaggccagggccctaggcgctgggaaggccgggaactgggggacaatttcccagcttgagggcattttattttttgaggggggcctctgcgcacgcgcccaggccatcgcgtcgttgacggtgtgggggaggggcggccgttgggcaaacggcggggtttgcgcgaggacaggcgcctgcgcgtgcgcggggtccggagcggggtgtgggggagcgcagaggaagtagctcgtgaggcgaatggcccagtgcgcaggcgccgcgggctggcgtgtgggggccgggcacgcggcccggccggtttttttcccctttatcattttcttcgctggctccatgcgcaggcgcagtgttcccgcccggcctcgtgggcggttaggggagcgcctggtgagcgggaacgggtgggcggcggccttgttctctagagtggggaattccgtctgatggcagcttaatctctaaggcccagccttgtgtctatacagaaatggatgtgtttgagcctagatgctctcatttttgtaggcattgaaaatgggaagaggacttgtgaaatgcacttttagccttttaggagttgagcgaagccttgaaaccatcacaagtttgcttacagtttccggggattcactgggtaccgaggatttgataaaccaaactatttcctggccatgttggaagcatttcgaccccctgtaatcagtccctccgaaaacaccagtcgttgcttttggagtggggcccagtccccactctttccaaaatcttgaagtcttacagggccgcctatttgcagggttttccagggtttaggggttacgagttgctagcgttttaatcttggccttgtcccacacattttaaagacatcttaattgaaaatccttaacgcttcctgaggttgggggagatactgggattcccgatttacaaaggaggaaatgggccaggagagagatgagatgaggtgaattactgtaggtggcacagctagtgaggggcagggctggagttagaactcccatttgtgggagctgctaacctggcgggagtgcctcaccctgtggttcgcgtggatcgctcctgaaatagaatccaattctacccaccttccacgcacttctgcccagtgattctcagacagggggccggccccagagcccaggagaggcggaagagagttaatctttctcctgatgaccagaggcttttgtcggtgggtgtaagatacttctcttaggaaggagcagtcggttcttaatggtatgggttggagtctctggtctttctaaaagactttccatccgggag

SEQ ID NO: 36379 - DNA, 919 bp, Artificial sequence
  DNA replication origin
cagggacctgttaatttagatcgcacggacaagatgacttggcccttagctcctgcaggaggggtagtggactattgcaggtggaagggactgcatgggcacacatggagagtgcgcggaagagccttctcccaagggaaactgaaaggggttgcggctgaatttagaactggacagggtccgaagacagtcggcagcagcgagtggttttctactgaggaaaaggctcagatttgggattttaacaattcctcctagaggtagaaatgaacacggtatagtgatggcgacagagataccctgggagttcctgtcaatcttggtctagccttccggcgcacacacagcggtcgctccataagggggccccgcctctgggcggtgcctgaaagcgtatttgcgcatgcgttctcgccttcgctcgtttcgtatactgcaccaaagagcgcctaccctggggcggggctccccatttcatccaatcagagcgtatcaacagtcctaccatctggtgagagggtgcgctccactctccattgaccaatcagtggagacgcagaagaatgggcatctgtaaccaccactggagagagaccaaaaaagggcggggcttccttgtctccttgcgaagtggcgcgggaaggtcgtcattgtgactggtgctgacggattagcgaggagaccaatgaaagtgggagggaggcggagattcttgggaggtttagagcgccgttcctatcaggtgcttttagggaggccagcagcgccagaaatccgacctatcaaattggattttattttaaggcggcggggtcgacggaaagactggcagaaagcgaccacctataaggagtgtctcagacaaacaagggcgggccctcctgcagaacggcgtgggcaatgtccaataagcgcgcaa

SEQ ID NO: 36380 - DNA, 1844 bp, Artificial sequence
  DNA replication origin
cgcgtctgaagcacgtggcccgcgtgacgggaggaggccgggccggtcgcgacgaagggcggggtcgctccgtcccaacgtcagaggaatgcggtggggggagggggagagagagggcccctcccctccccgcccccgcggccggcccggacgcccctcgcgccggcgcgcacggccggagcacggcggaacggtctccccggcgccgcacgttccaggccgccggcccggcctggtgacccgcaccccccgcgctcccggccaccgccccgcccccaccccgctgctcggaccctggcccccggccgcgcgcggcgccgcccgccagtgccccggtcaccttcccgcacccctcgcccccagcccctaccagctcggcggcgagcctgaccggccgtcccggatcgaaaagagcagacactgggaagttttgggagagggaggggcgggccttaaagggaccacgaccttttttcagccccgtggggggaagaaaaattgggggcagggggcgcgggagcggggacacggcaggagaccgagggtcgccccgcgggggaatggaggaaaccaggcgagaaaggagcgggaagaccttggagccgcggtgttcgggctccgcgtcccttttccccaaaaatccacccccgccccccgcagacggaaagtcacgcagttgtttgagactcgcgcatctttcctcctggtcaggcaagtgtcttggctgaggcaagtgtttggggtgtacattgctcacataaggaaatgggctggagggacgcaagtgactaacccaggatgccacagcttgcaagtggcatggcggggctggtctgacgccggagcagacgcatcaccactgcacttgcagggcttattagggtgatggggtaggctgtagagatggggggttcagagcaggggactggagccaccctaccggggttccaacgtggaagctgcatttactgtctctggccttaggaaagtaacttagccttcctcatccgttagggggatggcagtaggagcttcgtctgggtcgtcatgaggaatgcagagaatggaaacgggaccttagaggactacccccatttcacagttgaagtaaaactggcccagagagtggaagaaccgcgaaaaattaccacagctgggcagcctctgaaagagcaggtcgctcccgttcttaatccacacaaaacttaatcggacccttgcagatccttgtaaacccatgccagccgggcacggtggcttcccctgtaatcccagcactttgggaggccgaggtgggcagattgtttaagtccaggagctcgtgaccagcctgggcaacatggtgaaaccttctctctacataaaatacaaaaaaattagctgggcgtggtggcgtgcaactgtagtcccagctactggggaggctgaggcggaaggatcacttgagcccaagaggtggaggctgacaaagcgagaccctgtctcaaaaacaaacaacaccccagaaaaatatggctgggcgccgtggctcacgcctgtaatcgtagcactttgggaggccgaggcaggagaatcgcttgaggtcaggggttcgagaccagcctggctaacatggcgaaacccggtctctacttaaaatacaaaaattaggctggcgtggtggcaggcgcctgtaatcccagctactcagaatgctaaggcaggagaattgcttgaacccgggaggtgaagtttgcagtgagccgagattgtgccactgcactctaacctgggcaacagagtgagactctgtctcaaaaaactaaaataaataaaataggccgggcacggtggctcacacctgt

SEQ ID NO: 36381 - DNA, 964 bp, Artificial sequence
  DNA replication origin
gaggtgaggagcgtctctgcccggccgccccgtctcagaagtgaggagaccctccgcccggcagccgccccgtatgagaagtgaggagcctctccacccggcagccgccccgtctgggaagtgaggagcatctccgcccggcagccaccccgtccgggagggaggtggggggtcagccccccgcccggccagccgccccgtccgggaggtgaggggcgcctctgcccggccgcccctactgggaagtgaggagcccctctgcccggccagccgccccgtccgggagggaggtgggggggtcaggccccgcccggccagccgccccgtccgggagggaggtgggggggtcagccccccgtctggccagccgcccggtccgggagggaggtgggggggtcagccccccgcccggccagccgccccgtccgggaggtgaggggcgcctctgcccggccgccccatctgggaggtgaggagcccctctgcccggccaccaccccgtctgggaggtgtacccaacagctcattgagagcgggccaggatgacaatggcggctttgtggaatggaggggggggaaaggtggggaaaagattgaggaatgggatggttgccgtgtctgtgtagagggaggtagacatgggagacttttcattttgttctgtactaagaaaaattcttctgccttgggatcctgttgatctgtgaccttacccccaaccctgtgctctgaaacatgtgctgtgtccactcagagttaaatggattaagggcggtgcaagatgtgctttgttaaacagatgcttgaaggcagcatgctccttaagagtcatcaccactccctaatctcaagtacccagggacacaaacggtgcagaaggccgcagggtcctctgcctaggaaaaccagagacctttgttcacttgtttatctgctgaccttccctccactattgtcctatgac

SEQ ID NO: 36382 - DNA, 1184 bp, Artificial sequence
  DNA replication origin
gtcatcctggcccgctctcaatgagctgttgggtacacctcccagacggggtggtggccgggcagaggggctcctcacctcccagatggggcggccgggcagaggcgcccctcacctcccggacggggcggctggccgggcggggggctgacccccccacctccctcccggaccgggcggctggccagacggggggctgacccccccacctccctcccggacggggcggctggccgggcggggcctgacccccccacctccctcccggacggggcggctggccgggcagaggggctcctcacttcccagtaggggcggccgggcagaggcgcccctcacctcccggacggggcggctggccgggcggggggctgaccccccacctccctcccggacggggtggctgccgggcggagatgctcctcacttcccagacggggcggctgccgggtggagaggctcctcacttctcatacggggcggctgccgggcggagggtctcctcacttctgagacggggcggccgggcagagacgctcctcacctcccagacggggtggcggccgggcagaggcgctcctcacatcccagacggggcggcggggcagaggcactccccacatcccagacgatgggcggccgggcagagacgctcctcacttcctagatgtgatggcggccgggaagaggcgctcctcacttccgagatgggatggcggctgggcagagacgctcctcactttccagactgggcagccaggcagagggactcctcacgtcccagacgatgggcggccaggcagagacgctcctcacttcccagacggggtggcggcctggcagaggctgcaatctcggcactttgggaggccaaggcaggcggctgggaggtggaggttgtagcgagccgagatcacgccactgcgctccagcctgggcgccattgagcactgagagaaccagactccgtctgcaatcccggcacctcgggagtccgaggctggcggaccactcgcggttaggagctggagaccagcctggccatcacagcgaaaccccgtctccaccaaaaaaatacgaaaaccagtcaggcgtggcggcgcgcacctgcaattgcaggcactccgcaggctgaggcaggagaatcaggcagggaggttgcagtgagccgagatggcagcagt

SEQ ID NO: 36383 - DNA, 2174 bp, Artificial sequence
  DNA replication origin
cgcacacgtttccttctgcacccacacgcccttcctacacatcccacgcgttctatcgcccacgtatgcgcgcaagttcacacccaggctaactcttccacacatgttcacaaccatgtctacactcacgggggaccagagctaggcaggggtggctgtgggccagggtgggttgttggagcgcgtgggtgggcgtgggacaacttggcggtcctgtgctcacccgtcccccacaccccgcaggccccgcgctggagacggcggtgtgccaggcggtgctggcgcccctgaagccggccctgtggacacgactccgcacactccgagcaccggagctgcggcggctgcggcggcgacagacagccctgcgggcgggggcggggcctccgggggcacaggggccgggaccggaagggcagagccccgcccccgccttgcggagccgcatccacgagcgccttgcgcacctccacgctgcctgcgccccgcgccgcaaggtggcgctcctcttggaggtgtgcagagatgtctatgcgggcctggctcgaggcgagaaccaaggtaagggaggggtcaacgtctagcgtggtggggagagccttgagagttggagccaggcgggagagggtagcactggtgggaggaatctatgcggtcctgaagattctggtaggaggcgctgtcatgcccgacaaggtggaggggcagccagccctcgtggtcctggggatcggatggaaggtgtctacgcgccttgagatggggatccatctcaagacctttcctctggttttcccagatcccctgggggccgacgccttcctgccggcgctgaccgaggaactcatctggagcccggacattggggacacgcagctggacgtagagtttcttatggagctcttagatccagatgagctgcggggagagggtgagcccccaactccagaatgctggagcccagcgatccagtacctccgggatcccaaacagcctccccccgcagcaggagggacggcaggcaaactgcagggggatttggggcgaccagggaagccgagagggcggagctgacttccctttctgtccccagctgggtactacctgaccacgtggtttggggcgctgcaccacattgcccactaccagcccgaaacagaccgcgctccccgggggctcagctccgaggcccgcgcctccctgcaccagtggcaccgcaggcggacgctgcacagaaaggatcatcccagagcccaggtgactgcccatctggctgcaagtagaagggagggtgagacctggtgcccttctgacccagctcccacctctccccacaggccaacctgccctttaaggagccatgggcagaagagactgtgacagggaccagtgacaactaggggtttcacacccctccgttcatgcctgtaatcccaacattttgggaggccaaggtgggaggattgcttgagcccaggagtttgagaccagcctgggcaaaacagtgggacccccatctaccaaaaaaaaaaaaaaacaaaaattagccgggcgtggtggcgtactcctgtggtaccagctactcaggaggctttgcagttttagacaggcgtatcagagaaagcctcactgaggtgacatctgcagaaaggcctgaaggaggggaggggaagggaggagcagagtgggtattaggaagagcattccgagaagcaggatgagccagtgcaaaggcccagaggtaggctgttcccttttcctgggacccctccctcctccttgctgctcctaaaccacataggtcaggagtctggactgacccaggtacgtctggcatcttgcttgaggaacagggggttttgttttgttttgaaagaacgtctctgtctgttgcccaggctggagtgtagtggcatgatctcggctcactgcagccttaacctcctggctcaaacaagccccctgcctctgcctaccaagtagctgagactacaggcacctaccaccgtgcctgtctaatttttaaaattttttataaagatgaggtctctctttgttgcccaggctggtctcaaactcctaacctcaagcaatctgcccacgtcggcctcccaaagtgctgagattataggcgtgagccaccgtgcccaattgtgatcgtttttcccaaagaa

SEQ ID NO: 36384 - DNA, 2506 bp, Artificial sequence
  DNA replication origin
cgcgtagacaccttccatccgatccccaggaccacgagggctggctgcccctccaccttgtcgggcatgacagcgcctcctaccagaatcttcaggaccgcatagattcctcccaccagtgctaccctctcccgcctggctccaactctcaaggctctccccaccacgctagacgttgacccctcccttaccttggttctcgcctcgagccaggcccgcatagacatctctgcacacctccaagaggagcgccaccttgcggcgcggggcgcaggcagcgtggaggtgcgcaaggcgctcgtggatgcggctccgcaaggcgggggcggggctctgcccttccggtcccggcccctgtgcccccggaggccccgcccccgcccgcagggctgtctgtcgccgccgcagccgccgcagctccggtgctcggagtgtgcggagtcgtgtccacagggccggcttcaggggcgccagcaccgcctggcacaccgccgtctccagcgcggggcctgcggggtgtgggggacgggtgagcacaggaccgccaagttgtcccacgcccacccacgcgctccaacaacccaccctggcccacagccacccctgcctagctctggtcccccgtgagtgtagacatggttgtgaacatgtgtggaagagttagcctgggtgtgaacttgcgcgcatacgtgggcgatagaacgcgtgggatgtgtaggaagggcgtgtgggtgcagaaggaaacgtgtgcgcaccgatggagaggacgaagttgcacacttgaacccgtgggggctcccttccagtcctcccattacctggatcctcgtccttcttggggagcccaggacccctgcttccaaagacagccctgatgtaggagtcctttgccaggtgatcctggaggtcagtaaggaggtgccgcacatcctgaagcagctccgtggccgggtccccagacccgtggggacccccagaatctgaggcgatgcgcacccgaaggcttcggtactgcctggccacgtagctgctccgggccctgaccagagactggacgtgaatggtgagcacgtcctcagggccttcctcttcagggtcgtcctcccttccttcctcctttccttcaaggtcttcctcctcctcttccagtaggctggcgagagccggcccaggatggtccacttccgggctgagcgggcctttcacccaggagaccccgtgaggcgcagggttcctgggggctggaagtgaggagggcattcggtcgcctagaacaggggcagcagctccctccccttcagaggcccagggccccgcccagctaacctggatcatgtctctgagcagcctctggctctgtttcttgaggggtctgctccctcccccagcctctgtgggtctccaggtagagctggttcacaatggaaagcaccttccctggggtgtcctgttggaccctgccgatctgcacaggatctggagccagcagaagtgagaaggtgtcctaggtatccaagggaccaaccctggtcccctcaaggcgccaggagacttacttcccagcttcattgctggaggtgctgaggcttagctcctggcccctcctcagtcagacccaggagtccaggcccctagtccccttctcacttaggcccaggcgtccgggacccccagttccttcctcctccaatcctctcctctgttaggacctaggaatacaggcccccatcccctcctccctctgggactacaaagtccaggcccccagctctctctagtctccagttctatattctcctcaaacccagtagtctgggccccaaagccccattcattcccttggagcaaggaaattggcaggttggctgtgccctctttagagaaccgtgcctcacctgtgtgttcatctctgggccctagagtgggagggggcaagagcagggttctgggcagaacatccctgagaataaagaggtgggagccacagtgtcagtggggtgtcttagggaagggtcccccttagtgcctcagatgggtgacctgtacctgctggctgatagaaaggccaggagatggggcaggtctggcatgcagaggttggaggattccagggacacacctgtggtggggggaggaagaaggagaaagtaaacttgagtggtggcagttttctgtcccctgggatgctcttgctcctccattccttcagaatccccccagggaccttcagaacagggaagttcccactctttggagtctccatctttactcttgtgtaccacttatgccaccaacaaggattcattcattagacaaacatttactgagcccttagtcctttctaggcactggagatacagttatcaaaaggcagacaagttcactgccttcctgtagcttaccttttagcggggggcggagggggaaaaggcagaatataaatgaataaacagtcagggtacggtggctcacgcctgtaattctagcactttgggaagccgaggtg

SEQ ID NO: 36385 - DNA, 890 bp, Artificial sequence
  DNA replication origin
cttgctttatcacacatctgttcctctctctcttcatccacccatcaggccccagctcctaaccaggtacagagtcctacgtaggttatcacttagggtggcacttatcccagcagcagtcccaggagcaggagacctggatcgggggaggatccatcctccctccctccctccctcccttccttccttccttccatccatccagtatttactgaatacaggctggaattaggtgcctctgccctggagagagggtgatgaacaggacaggctcctcccctcagggccttccattcttgtttggggcaggtgtagcatatggataataggcagctaaacaaatacattaggccattgaccagaaggccagggtgttattaggaaggagggaggtgggcagggaggcgcaggtgccctgcccaggcaagagcaggaaggaagggaggggaggggaggggagagggaagcagatgcctgcttgtgtaccgtggcaggagaggaggctgtgggcagtgcgtggcaggggtgggtcagggcagctgcctcataccaaagggaggcagcaggggctgaagatgccagatgctcggttcctgggggccctacctgttctcggaggagaggcctgcagtagcaggaagtggagagaggaagctgagcaggcagggggaagaggcggggctggggtatctgaagtcaactttcctccctctttctggggcctcaggcctttagtgacggggcttagaggaagggacactggcaggctgggagtccaggggtcagagccacgagggcccccgtgaggaccctcttgttacccctcactctggatcccggagactttctggttccttagtggcccaagatctaaccccctcccttcagag

SEQ ID NO: 36386 - DNA, 1067 bp, Artificial sequence
  DNA replication origin
tcccaaagtggtgggattacaggcatgagccaccacgcccagccggagttgcacagtcttaaaaagcaattttttaaattgtcgtatgttcggaagggagggtcttattcaaaaagacttggacgcagagcagtgagtatccggggaagggagttgtctgaggtggtggcttggtcagaactgcattttggtgaaatccattgcagggcccagccgtggtccagcctgaagcaggcattcattccaaggtagaggagctcctggagctcctgccaggagccagaccctgttctcagtgctgggcacccagacaaagtccctgcccttgtggacatcctggcaattccatagatgtctgggaagactgcagaagccagagagaagggcctttgaagtggagaggggcgagctgacccagacagcctcacatgcagggcagcagggtggatgggaggtggagactgaggctgggaggctgggggaggaggctggggcaggacccccggaggagaggacaggctggaccaggtggagcgccggggagggaaagggggttggtggacagacccttaggaggctcagcgtacatgctctggagctgaagggctgtggcaggagggcgaggagggaggcgggggcaggaaacatctggctgatgggggggacagtacgatcgcattgagatgaggcctgggaggaggatgggcttggaggagatgccagggtccatttgggacatagtaggagtgagaggctggggggcacctagggcaaggtgtccaggaagccagggaaccccggatctgagggcagagagatggtatcatgagtgacgaggcagaggtcattggcatggatgagacaggtaaccccaggaaagtggaaagagaaagcagagaggccctggacagagtcccagagacctgccagtctggagctgggctgaggggaggcttcgaggaaggagacagaggttgctggagaggtgggcagagtgtctgaggcctcgagcagggggcacataggtccttgaagtgagggccaaggctttgcattggaatcattcc

SEQ ID NO: 36387 - DNA, 1062 bp, Artificial sequence
  DNA replication origin
atgcaggcatgcaccactacacatggctaatttttaaatattttgtagaggtgggggcctccctatgttgccaagactggtctggaactcctgggctcaagcgatcctcctacctcagcctcccaaagtactgggattacaagcatgagccactgtgtctggccctgagttactttctttcttttttactttttagagaaagggtcttgctctttcaccccggctggagtgcagtgatgcaatcatagctcactgcagcctcaaactcctgggctcaagcgatcctcgcgcctcagtctcctgagttattggaattacaggcataagccactgcatctggccccctgagttactttcgtcatcacgctgtgagatcattttttcccatcacttgtccacgagatctgtgcgttccaagaccaaatgggatacctgtctcttccagtcccaggacaaatgtggttcagaagggatggcaggcagtggcaaggaagaaggaaagtttgggaggacaggcctggacttgaggctggaaactcttctctgacaatccccagaatctgcctttccccagaaagctgcactgggtggtgtgagggattggggcaatgagccgagggccctggggtgactgtttcccctttgccacctccccccagtgtgggatgtggaacaagtccgtctctctcctcccctccaccctttcccccatctcacctgagcctcctgcaccttccctgcctgggtctccagagggtgagaggctgggggaggggagcagaggtggttacagtggggagaacgattaaggggggaataaaggggttcaaatggtcagtgagggggcaagaacacccaccaacctagttacactgggatgggatggtggtaaaaatggagcagagggagggaggggacggagaaaagatcttatctacatgcaaagtgatgccgggagaggtgattagtgaggggcagagaggctggagaggaagatttagggggacagggagaaagtaggggcttttgcccaggctggtcttgaactcctgggctcaagcg

SEQ ID NO: 36388 - DNA, 944 bp, Artificial sequence
  DNA replication origin
acgattaaggggggaataaaggggttcaaatggtcagtgagggggcaagaacacccaccaacctagttacactgggatgggatggtggtaaaaatggagcagagggagggaggggacggagaaaagatcttatctacatgcaaagtgatgccgggagaggtgattagtgaggggcagagaggctggagaggaagatttagggggacagggagaaagtaggggcttttgcccaggctggtcttgaactcctgggctcaagcgatccaaccaccttggcctcccaaagtactgggattacaagcatgagccattgtttctggccctgacttactttctttcttttttactttttagagaaagggtctcgctcatgtcacccaggttggagtgcaatagtgcgatcatagctcactgcagcctcaaattcctgggctcaagcgatcctcctcctcctacctaggggattcagggcatgaaggaacactcaggaggagttaggaaggacacgacagtgtgtgagtgtgtgtgcggggagggttagatttacaaggcagagggaagtttagaaaggaaaagagaagggaagagacgctttggctgggaggcaggtttaggagggaggtgcagtggtgcagtggaggcggtaggtttaggagaggcgcggaacaaggggaagccataggaggggtcagcaggggtccctcagcatcctctggttgcctctaacaatcaggtacccatagcaagcgggaccggggcaacttatgttctttgcagcgagggaccttagcaaccaaggtgcgagaaacacgcgatcattggcaacttggcaagtggatgtggtaaacgaaccctgaacacactgcgacccagaaacccaccagcctagcgatacagatcgctaagcaacagccctcagaatcccactccccgaagcgctccct

SEQ ID NO: 36389 - DNA, 1215 bp, Artificial sequence
  DNA replication origin
cctgtagtcccagctactcgggaggctgaggcaggagaatggtgtgaacccaggaggcggagcttgcagtgagctgagatggcgccactgcactccagcctgggcaacagagtgagactccatgtcaaaaaaaaaaaaaaaaaaaaaccttaaattaaggttcctgcccaggcacggtggctcacacctgtaatcccagcactttgggaggccatggcgggcagatcacctaaggccaggccaggagttcaagaccagcctggtcaacatggtaaaaccccgtctctactaaaaatacaaaaataagctgggcatggtagcatgtgcctgtaatccctgtaatcccagctactcgggaggctgaggcaggagaatcacctgaacctgggaggtggaggttgcagtgagccaagatcacgccactgaactccaacctggcaacagagtgagactgtctcaaaaaaaaaaaaaaaaaaaaaaaaggtaccaagtagctgaaaagcctgtgacctgggggcgagaggcaggccctgaacactgggtcctgaatgacgtcagtccatctgaggaggggtctggtctcaggtggctgggcttataggcaggggagcagaaacttggatgtcagggctgtgggcagatgagcccttcttcccatgaggctgaggagggctgtctctgaaccctgctgcccattgctgggagcctggggtgccagagtttcacagagggcctgagctctgcattccccggtcctgggtagggtaggggtctgcaatacactctgcaggtggggagcccgggggcccgacaactggatcctggcagctctgggtctgtgggtgacaggtctgcatcccaagtgacctggggcctccaggtgggggtcctgggtcctacatatccaattctcaatcatctgggccctgagtggaggtccctggtcccgatgtgtgggctcctgaagcctaggcatgatttcccaaggagctcagtctcaaatcagggaagctgagcccagggccaggtgctctcgcctagcccaggagctgagtccttccctggtgacgaccctcaccctcgtagttttcagcctccagctgcagcttccagtcctcctcactctcctcttcttccttctccaagtcggaatcggggtacaaggcgacaggggtatggttggtgtcgggagtacggtcagggccctgagcgagg

SEQ ID NO: 36390 - DNA, 1050 bp, Artificial sequence
  DNA replication origin
tttgccactgccttagtttttcagccacttctgcccaagctcttcccaccacccctgtccaggtctctcctgactagtgccccgtgtcactggcgctgctgcctgagttctctaacagcagcccaaggtcggtgcctaattatcttcttgggcttcttgcctgccggtctatcctgaccccccagctgggctgccctgtctctcctcctgactcacgccctcgtctccgctgtcgctgtcgctactgctgctgcaggggccggatttctcgtcctcgccctcgggctcaggggctccgtgtgcacggaggaggcgggcgaggatggggttgggccggagcatggcactgccgagtggggtgcggccaccgtacatgcgggcagcagggttcgcgcctgccctcaggagaagctccagcacatcggctgcctgggcctccactgccaaatgaagggggctccggccgcacgtgggctcctgtgggggtgcaacagaaaggtcagagggcccgaagaggggacaagccccctcccgccgacggcatcttccccgaggttggggctcaccggtttgtcaaggtcagctccagcatctcggagcagccggaccatctccacatctttgtggataacggccacgtggagtggggtgtggcctggggacagagtgattggcgtcagatgatgaggtgagggccccccccaccccaccgtgctttgatcctgggggagggtcatgtggcgtgagggtgattaggtttgggggctggttcctgaattcttgggtatggcaaagaggtacctgggtaccaaatgcctatctcagatggcctgagcttgctggcaagtgctagtgcctgagttgtttgaagcctggggcccgcgggtaaacagcctggggtctgtggacagggagcctggattttggggccaggaggagacccaagtctctgctcttatcactcaaaggacctgagctggcacgctatttcacacctgtaatcccagcactttgggaggccaaagcaagaggatcacttgagctcaggag

SEQ ID NO: 36391 - DNA, 1166 bp, Artificial sequence
  DNA replication origin
tcaccctcacgccacatgaccctcccccaggatcaaagcacggtggggtggggggggccctcacctcatcatctgacgccaatcactctgtccccaggccacaccccactccacgtggccgttatccacaaagatgtggagatggtccggctgctccgagatgctggagctgaccttgacaaaccggtgagccccaacctcggggaagatgccgtcggcgggagggggcttgtcccctcttcgggccctctgacctttctgttgcacccccacaggagcccacgtgcggccggagcccccttcatttggcagtggaggcccaggcagccgatgtgctggagcttctcctgagggcaggcgcgaaccctgctgcccgcatgtacggtggccgcaccccactcggcagtgccatgctccggcccaaccccatcctcgcccgcctcctccgtgcacacggagcccctgagcccgagggcgaggacgagaaatccggcccctgcagcagcagtagcgacagcgacagcggagacgagggcgtgagtcaggaggagagacagggcagcccagctggggggtcaggatagaccggcaggcaagaagcccaagaagataattaggcaccgaccttgggctgctgttagagaactcaggcagcagcgccagtgacacggggcactagtcaggagagacctggacaggggtggtgggaagagcttgggcagaagtggctgaaaaactaaggcagtggcaaaggtagaactcaggcaggggtggagaaaaggcgttggtcgcagtgattggtgaacacagcgggggtgggtggtagcgctgggggtgattttaggcagcaagaattggagaactcacactgcgaaaagaaaaccttgggtggcagtgatttgaacaccggcagtgctggggcaggacccgagccagcggtggggagagatatagtcagagaacccagcaatacagatccgtccttgggcaaggcgcggtgctggatgatgggtgcggaggaatttgggtaaaggcagagggaaggggtggaggagggccagctcagttgccgaaactctggagtggcggctggctagaaattggtctgtagaaatgaccttgaaaatggagttctggccaggtgcggtggctcacgcctgtaatcc

SEQ ID NO: 36392 - DNA, 2169 bp, Artificial sequence
  DNA replication origin
tttttttaagatggttttgctctgtggcccaggcgggactgctgtggcacaatcatgactcaatgcagcctcaaactcccgggttcaagcaatcccaccacctcagcctcctgagagctgggaccacaggcgtgcgccaccattgctggctaattttttaaattatttgtagagtcacggtttcactatgttgcccacgctggtctcaaactcctggcctcaagggattctcccaccttggcctctgaaaggattaaccctccctaggattacaggtgtgagccaccatgcccaccctgttacggcacttttggtgccaccaatcatggtgacatcttgttttccatgacccagcaatggtgtctgtctgtcacctagtgaagtaggcacagcagccacttttcacagtggccaacttgctagtgatggtggcttgcttctgtgcaatggtgccatcttggttgctgtagtccatacagtagtgtggaagtataaggtaaaggccttgcacggaagttgttagccagtcgtggtgtcagtcttggccactgtgatccactagtgatggatctggtggtgcagggccaacaccggtggctgtgagttgtgactccactgaccatcatcaaccctgcctccaaactgtgttggtgttcctccttcatccccctactcacctccctctccgaagcctcctccttctcctgcctgggctcagcctctggctggtggtggtggtggtggtggtggggcaagtcctcgcgcctctctcctccgcctctctcggccccctgccacaggctgcggtccccgcccagcacccgcacccccttctcctctgcctggaactgggccgtctctttgtcactggccttctctgccacccgcttctggaggtcccctccattctctagatgccgctgccacaggtcctcaaaggtctccatgggccccctcttcctctcctccttctcctcctcctcgtcctcctcctggtggagctggcgatgcccttgcatgcggatggcttgttcctggacctcagacttgtgggtcctctctgctacctcctcctcttcctcatccctcacctcctggctggacctcatcttcccagcctcctgcttcttgaaatccccaagcagcaggcctttctcctcggtggacgcacagccgtggggctctgtcccgcacaactctggcagaaagggaaaggacactctctaagcatccaattgggaaactgaggccgagtatggaggctcacgcctgtaatctcagcactttgggaggccgtggcggccgatcacctgaggtcaggagtttgaattgggaaactgaggccttgaggagttctgggccctgccgaaggtctcacaggggggctgcccagactacagggggagggtcctatttcatcccacctgggaggggatgttccctgccccatctggcccctctgcagggaaccacaagggtgttgctggtggccaggctctgtcaggtgtgaatgctgggcagtgccccgctggtccaggcaacagggctctgggaatgaggacctcttcctccaggtagcctgggtgggagagcatgtgggcacctgggcaggaccctgggtggggtagggtagggtcccatggggttgtggagggcaagtggggcccggggcctccttacccttgtggagaagagcagtgcagggtcctctctggacctggcccacggtcagcacctctgtgaccacctctgccagacagcgggtcagctggggggcaggggtgccgggtcagaggggaggttgagggcaggggagatggggaggagagcagctggtttgagggcaatgaggatcatggggcaggctgtgcagggagggcagggccccagctaggtgaggcagggcaaggcctccacactcctcacctcctccttggagggtctcggtgccaagggagcagcggtggctgtggagaaaggagatggcactgggctttgccgccctggctgctgtccccggtaccgaccccagctccatgggcgtcccggtccccacacatcccctccccatcccacccggcgggtgtactgtcccccgctggaggctcggcccctgaagcctctccactgggtgcactgcctgccccctcccactggagtccccgctcc

SEQ ID NO: 36393 - DNA, 936 bp, Artificial sequence
  DNA replication origin
ccgaggtaggactggagggcagggggcacgagcactgagccgtcctggggacagagcagacctcaggacactgcagatgccccagccctccccggcgctgagctgcctctctgggtgggcccctcagcccctcaccttctgctggttactctccaggagcgcgatgagaaggcgggggacagcacaggcggtggcgttcacctgtgagacagccatgctcggaactggcgcccaccccaagctgagcccggggaggagccaaggtgggtgggtctagggcggcagaggctgcgggcgagggcacgcgggcaggaggctgtgcgggcctcaccgtgtgggcaaactgcagctccccagcctcggtctggaacatgatgtggaggcggcggctctggaagtctgtgcagttggaagcactggtgacctggggtggaggagcggcaggctgagcggatcagggatggggggcaggcctgtcctcctgcccaccccgtccccagcggcacagggctcacctctccaaagcggcctcggcctggcatccaggcctcaatgtcaaacttgcggtaggcggggaggcccagttcttgggtgggcatatccaggaccctgcggtcaaggacgaaggtgtggggaaggtcagcgggtgagaggaggagcaagaggaacaaatggaaacgatggaagagaaggcagccaaaaagcaggaaaaagcccaggagtttgagaccagcctgggcaacataaggagacctcatctactccaaaaaaacaaacaaaaaaaaggagacgatagtgccaaaggagagagttgtgaggccaggggtggttatggagaaggtggtacatggagggggaagcacaaaagaggttgatgggaggggaaaaaggcacgtggcagggtccaccggctcttcacagtggccattcacacat

SEQ ID NO: 36394 - DNA, 1709 bp, Artificial sequence
  DNA replication origin
cgcaagcaggcagtgaggtgcaatgattacaagcacaggctctaggcccagctccagactggctgtgagaccttgggctataggtacctcccctctctgggcctcaagccctctctgtaaagtggggatgatgacagcacccacttcataaagttgtcgtaaggactaaatgtgtcaatgatacacatgaagctctgagagcagtgactagggcagagcagagatcactcccatccccgttgggccctctgagctcagcttcgatgccaccccctccaggcagccctcctatcttggcccatacccggcggagaagcttgttgaatgtgaagttgaccaggccgtgctgcaggagggctccagccccgcgcaggtaataggaccggtggccagacacgtgggacaggcgcctgggagacagacagacaggcgggtgcacatgggccaggctggcagggaatgtggggatgaaaacacccgggggaagaggcccggctgctgggtggggctggggcatcaaagattcatggcatttccacatctcacgctgaggccaatgaggcaggagccagctgtcggggtgcaggcagctgggagaggggcgtggggagccaggggaggggctcacttctgacggatgatgtcgagtttctcgccaatttccaggtggccccgaggttggaaggagaaaactggatgtgggtgaaaagcaccggtgtaaggcagcggggagagagggatggggcccagatagaagcttccagagacagcagagaggagggacggtgagagaaaataaaggaggggcaggaggagagaagggagaagaagacacggaaagggagggaaagggaagaaaagacagacaggaagggagggagataaaaacagagacagggagaggaaatgagaggaggcagagagggaaataagagggcgcggggtggggaaggcagagttagaaacagaggagagaggccagaggagaaggaaacaccacgaggaagggaggaggagaatcagagaggaggcacagagttggggagaaaaagccccggagacagggaccaaagcaggggggtcagagagagagacagagacacacacacactcacacacatacatacacacacagagatacacacagaggtacgaagacacacacacatatacagacacacagagacagacacatacacagacacgcagagacagacacacagatacacggatacagacacacaaagacagacacgcacacacagatacacacaaagacacagatacacagacacagatacagacatacacacagagatacacggagatatgcagatacacacacagacacacagagacagacacatacacacagacacagagaaagacacacagatacatacacacagatacatagacacacacagacacacacacacacaaacacagatatacacacacagagatagacacacacatagacacacacacacagacacagacacagatacagacacacacaaacacagacacacacacacagatacagacacacacagatacacagatacagacacacacagatacacagatacagacacacacatacagatacagacacacagatacagacacacatgacacacagtcacacaacacatacatacacgacacacactcacacacatacgatacaatcacacaacaca

SEQ ID NO: 36395 - DNA, 1839 bp, Artificial sequence
  DNA replication origin
agacgagaggctgggcgtgtgtgcctttagcgggtcggggggagctggaagctagtctggacccacctgtcggcagcccctctcagtccactgaaggaccgggtcaggtgaggctgagaacttgaccacttccttttcatacacatccagaaggcggacccggagctggtagacgcagccgcagttctctcgagcgccccacctgccaggcagcagtcagcctctatgcccccgtcacccagccagctctctgggtttcggggcgggaggctgagggctggctccatcttgatgaaggtcctgcacatctggaccacatttggagacgtcctggcctgggaacctctaggggaggagccttggtggttctggggtggaaccagagcctggcggaggagcctgggtggtcctggggaggagccagagcctgggggaggagcctgggtggtcctggggtggagccagagcctgggggaggagcctgggtgaccctggggtggagccagagcctgggggagggtcctgggtggtcctgggggaggagtctgggtggtcctggagtggagccagagcctgggggaggggcctgggtggtcctgggggaggaatctgggtggtcctggggtggagccagagcctcggggaggggcctgggtggtcctgggggaggagtctgggtggtcctggggtggagccagagcaggggaggagcctgggtggtcctgggggaggagcctgggtggtcctggggtggaaccagagcctgggggaggggcctgggtggtcctgggggaggagcctgggtggtcctggggtggaaccagaacctggaggagaagcctgggtgaccctggggtggagccagagcctgggggaggagtctgggtggtcctggggtggagccagagcaggggaggagcctgggtggtcctgggggaggagcctgggtggtcctgcggttgattctggaggcttttgggtaggtagttgggggacgggaaaggatgctctggggaagaaccacaatgcagggcaggtgcctgatgacttcagggaagagccagagccccagggaagagaccagattttctatggaagagccacagcctgaaggaggagctggaatgctttggggcagaacctgggtgttttgggaagaaggcattcatcctaagcctgtaggctctgaagccagtcctgtcccaactatgctccctgagcctcagctcacagggcaccatgctcccaccccttcagagaccctgggcatccacaaggtggtcaggggaggtgtctcgtttcagaggggtatcaagccagtcagtggccccctgtggaccaccccagcctgctgggatgagggtgggcaggagtgcagagtgggggctctggcttctccaaagctctaccttccccggctctgcatcacttcccctctcagcctcatcacaaagggtgcacagtgacagccgctacccgtggggttgatggggcgggaaatgagcccctgttgcagagccgctgccaagcctgctgctgctctggggcagggtgccgctcctcactcaccagtcagccacacagatctcaatctgggcgctgtccagcagctcctgccacaccccttccatcaccaggtccacaagctgcctcttggagcaccatctgggaaggagagatggcagggggcagggcaaacagtcctggcattcaagtcacagtcagaagccacctcctccaagaagtctcccttgataaccctctctaaagcagccctcagggtttgctctagcagacctgaagatgcatgatgggctatacatctctccttggcctctt

SEQ ID NO: 36396 - DNA, 1512 bp, Artificial sequence
  DNA replication origin
aggcaggaagaccctggctgggccgggggagaaagcaagtagtttggtatgcagaggggatgcagaacaggacaggggccaggcgcggtgggaatggcaacgctttgggaggccaaggcaggaggatcgcttaagcccaaggagttcaaggctgcagtgagctatgatcgtgccattgcactacagcctgcgtgacagagaccttgtctcaaaaaaaaaaaaaaatggtggggtgcagtagctcacgcctgtaatcccagcattttgggagtctatggtgggaggatcgcttgaggccaggagtttgagaccagcctgaacaacaaagtgagactctgtctctaaaaaatttaaaaattagtccaggcgcagtggctcacgcctgtaatcccagcactttgggaggcccgagggggcagatcacttgaggtcaggagttcaagaccagcctgaccaacatggtgaaaccccatctctactaaaatacaaaattagccaggtgtggtggtgcacgcctgtaatcccagctacttgggaggctgaggcaggaaaattgcttgaacctgggaggcggaggttacagtgggctgagatcatgccattgcactccagcctgggcagcaagattgaaactccatctcaaaaaaaaattaaaaaattaaattagccaggcgtggtggcatgcacctgtggtcctagctactctggaggctgatgtgggaggatcgcttgagcccaggagtttgaggctgcagtgagctatgatggagccactgcactccagcctgggcgacagagtgagaccctgtctctcacacacacaatgaagagcaggactgaaggagaaagagcaagtaagggtggctgaagagaagctgagtggatgggcaccgctgagagtcacagttgtggggtaggaccaggaatacagaataatgggaggaggagtcggtaggagaaaccagggaggattggagcacaagagggagaggctggtggacagcacaagctggctggttgcggggtctcttctgggcaggctggcaggtgaaccatatgttcaactcttgttttcccacagagggcttcagaggctgggaggtggagcatggcgggaacggctgggccatagaaaagaacctaacaccggtgcctggggctccttcgcagacctgcttcgtgacctctttcgagtgagtggcccaagtgagaggccccgatccctggggcaaaggccccaaagaaagggaccctaccccccacactgtcctcatcgtcaccttcaccctctccttcccccatttatttattcattgattcattccatcaatcaacaaatacttgttgagggtactgtttcatatgccagggatacaaggaaagatcaggaaggttagcaaccacaggcagcaatgctctgtgcatcatcgcctgcagtttgtgagacaacagcaagacagctttgatctaaagacagggttttgggccgggcacggtggctctcgcctgtaa

SEQ ID NO: 36397 - DNA, 1046 bp, Artificial sequence
  DNA replication origin
gggtggcctggctgcgctgacccgcctaccgacccctctcgacctgcaggactctggctactggagatgggcgcccggctatcgcggcgacggctgccggcggacccatccctggccctggacgcgctgcccccggagctgctggtgcaggtgctgagccacgtgccgccacgctccttggtcacgcgatgccgcccagtgtgccgcgcctggcgcgacatagtggacgggcccactgtgtggctgctgcagctggcccgcgaccgcagcgccgagggccgcgcactctacgcagtggctcaacgctgcctgcccagcaacgaagacaaggaggagttcccgctgtgcgccctggcgcgctactgtctgcgcgcgcccttcggccgcaatctcatcttcaactcctgcggagagcgtgggtgacgggggcggggcccaggaggctgaggggggccgcgcgagcgaggcgggggcggggccgggacagagtctgagagatgtagccaatgggcgagaccgctggaggagccagggggcggggctgagggacgcagtgcctgggcggtaggcccggtgggcggggctggagaaggtgaagccgggaatccgaacgagtgggcggggcaaggcaggaagaccctggctgggccgggggagaaagcaagtagtttggtatgcagaggggatgcagaacaggacaggggccaggcgcggtgggaatggcaacgctttgggaggccaaggcaggaggatcgcttaagcccaaggagttcaaggctgcagtgagctatgatcgtgccattgcactacagcctgcgtgacagagaccttgtctcaaaaaaaaaaaaaaatggtggggtgcagtagctcacgcctgtaatcccagcattttgggagtctatggtgggaggatcgcttgaggccaggagtttgagaccagcctgaacaacaaagtgagactctgtctctaaaaaatttaaaaattagtccaggcgcagtggctcacgcctgtaatcccagcactttgggaggcccgagggggcaga

SEQ ID NO: 36398 - DNA, 1004 bp, Artificial sequence
  DNA replication origin
cttgccctcccaaagtgctggaattacaggcatgagccagcgtgccaggtcaagaatgtttttaatgattaaccatggaatttaagctggctaaggaagaaatgagggcatgggagggtgagggggagtaaaatatgaaagggacaacggatgggagatcacagtgggttggaaggatcatgcgagtggggcactggagggaatgaggtggaaagaaaaagtgatgggtggagagtgagtgtgagattgaggttctgaagaggctgctgttattcaaacaaggtctgggtttgaccacgagagggagatgttggggaaggaaaaagtcactagagagaggtcagggaacagagaggttggggctgcggaagaactatctggttatagaaatcactgagaatgatgctaagagcagcgggagcggccgtgagcccagagctaaaattagggagaagagaggagtcatgatctgggtcagcagatgacgcatgaagcaaggtagtgatgagattcatcgctgggggttttggggagggtggagggagaatggtcaggaagtagctcccaggagcacggagacctccccacttggaaggcccacaggagagctgggttccagttagagcaagaaggtggtaggaatgttcagagaagtaactgaggcaagaagagattttgttgaagatgggtcatgggttccaaaggtcacagtagctggcacacattggggtatggggtagaaatggtttcttccgcagtgggtttccttgtgggtctgtaacccgactgaggtttggccgctcaacactcaaaagccaaactcaggccaggcgtggtggctcacgcctgaaatcccagcattttgggaagctgagacaggtggatcacttgaggtcaggagtttgagaccagccggctaacatggtgaaaccccatctctactacagaaattactggctcggtgtggtggcacacatctgtaattccagctacttgggaggctg

SEQ ID NO: 36399 - DNA, 1312 bp, Artificial sequence
  DNA replication origin
aggccaagacaggcagatcacctgaggtcaagagttcgagaccagcctggccaacatggccaaaccccctctctactaaaaatacaaaaattagccaggcgtggtggcgcgttcctgtaatcccagctactcgggaggctgaggcacaagaattgcttgagcccgggaggtggagcttgcagtgagccaagatctagccactgcactccagcctgggcaacagagcgagactccgtctcaaaaaactaaaataaaataaataaaccccccaaaatccggaatgcaaaacaaacctaggcctacgcctttcacataaggaactgcgtgtggatctgtgctaaaaactctaccaataatacagtaattttacaacccacagcagaaaatgctttcaaaggcggttgttacaaataatgtaatagtagtcaaattagcgttggctctgagtccagcactgtgctccgcgctgcacacgcagtctcacgccgtcctcacgatggcgctgtggggcctggctgaggtttctaggggaaggggctttagggaatccaggctctctggctgtgtgacccctccaagctagcgacttggactacgtgcaacagaccaggtatctctggacttcagtttctcgggagaggcgtccatgaggaggtcatgcatacaaagcatttagcacagtggcagatatgagccagtgggcctggagaatgatttaccagcgtgggggaggcctggcttccagaaaactagctctggggtgtctgagatcagtcaccttgaggtccctggtgcaatctagggccatcagaagggactgcaaagacccaagggcagaggtaaagggagaaaatgggtcgcggccccagcctgaccgaaactgaacctccggattaattcagttgtctatagctggggggatggggaggacaggggagtcctaaggtggaagggtacaggtttgtcattgccacagagagtgcgtgtggtgaagggatttaatttaagatcagccccgggcttctgagaatctggccctgggaagcaacgtaaatacaagaaaatccctgtggccagggactttgatccaagtgtttcgaatcaggccctgggtcgggctcacagctaagcggtttaccaaccgtggacctgtgcaggatcccatggatgtgaggggtggagacggccgcaagcaggaggccaggaccagaaggaaacggaatttgggtgggggtggggagctaggaccagtccccccgcgggggcgtcttggggatgtggaactcgcacacccagaggaggtggctctccc

SEQ ID NO: 36400 - DNA, 1615 bp, Artificial sequence
  DNA replication origin
gcccagggatggtgaagacgggggtgcggctggcagaatcagggcaggcagaggctgcgcgccgcggaggctgctggtccctgacgccttgacccttcctctcccgcagccacagccgggcctggcggggggaccatgggcgcctcggtctccaggggccgggccgcccgggtccccgcgccggagccggaacccgaagaggcgctggacctgagccaactacccccagagctgcttctggtggtgctgagccacgtccccccgcgcacgctgctcgggcgctgccgccaagtgtgccggggctggcgagccctggtggacggccaggccctgtggctgctgatcctggcccgcgaccacggcgccaccggccgcgcgctgctgcacctcgcccgcagctgccagtctcccgcccgtaacgccaggccttgccccctgggccgcttctgcgcgcgcagacccatcggacgcaaccttattcgcaacccctgcggccaaggtgggatctcggaagaggaagtccaggatgctgggccacagtgggagcggtagcggggccggaggggcggggccgcactgggaccggtactaggggccgcaggggcagggccgcagtgggaccggtgggaggagtcggagaggcggggcagcattgggagccggtgtgaggtgccggaggggcggggcagcattgggagccggtgggaggtgtcggagggacgaggcagcattggcacgcagggtgcagggctgactgggcagggcttcaccgtttgcctgtgggaggggtgggagtggggcagttctgggagcccgagagaggggttggaggggcagggctttgctgcaaatcagtgagaagggccagaggagcggggctttgccctgagctggtgggaggggaagggggcggggcctcggtgggaagggtcaggtgagtgagctgcactgtgagcacgtgggaggggctaggggcggggtctcactaggaaccaacaggcgggcgactggaacttgggcacaagccttttttatttcacagaaggcctccgaaagtggatggtgcaacacggtggggacggctgggtggtggaggaaaacaggacaaccgtgcctggggccccttctcagacgtgcttcgtgacttcattcaggtgaatgcccctgctatccaaaggtccggccccttgttgagaaaggcctgcctgttctcattaccctgtctcctgcattcccagctggtgttgcaagaagcaggtcttggacctagaggaggagggtctgtggccagaactgctggatagtggcaggattgagatttgtgtctctgactggtgagtgtgacgattaaaatagccccttgctaagcactgactgcatgtgacatggcctttttatgggtgacttaatttaggcctcctaacccctccttacagataaaaaatctgaagttcaggccagccatggtggctcacacctataatcccagcactttggggggtcgaggcaggcagatcacttgaggtcaggagttcgagaccagcccaaccagcatggcaaaacctcgtctctactaaaaatacaaaaaaaaaattagccgggcctggtagtgcac

SEQ ID NO: 36401 - DNA, 1390 bp, Artificial sequence
  DNA replication origin
gcacacctgggtacctggggatcgggcagggccaggataggggccggtgtccgtgccctggggctccccagctgatgagtgggcgcctgagggacgagcgcagggttacctgcctgggctctcacctggtggccggctcagaggtggcgcgccggagacgtatcataaccttcctgggtcccccttcccgcgccacgccctggtggggtgggcgggtgggtgtggggcgcccaggcaggaccggccggacctgtgggacccggggccctggctgtctagggaggctgtcaccccgaggcgaccggctcttccggggctgggacggctgtaggcggcaagaggcctcggcacccgcgaactcataaataccggggcggcgctggtggcgggagaggcgcgtgcgggcagccggcgcccccgagggtgagccggggtccgggagggcgtcccctttcccggatggtcccgacccggctccatcctggcagctggagacggagctggagcaggcgggaaagcgctggagagaaggggggtgggtacagatgggggaagggcagggacgctggggatggggagagaggatgcggccgctctggccatgatgggctctaaaggatctgggggtggtgtgggaggattggggtcactaggagcaaaatagaaggctaaggatggagtagggaggcgaggtcccgggggcaggcgggaatgcttggaatctcgggagtaggtaggagaactggggtttctaacagcaggatggaaagctggggatggggctgcggaatgcaacctcctacacagcctccaccccgctcccagacccccagcactgagagtgagctctggttaggagcaaggctctggaatcaggccctcctgggttcaaatcctggctccatcccatcctagctgtgcagctgaatcactcagctgctcggtttcctcatctgtgatatggggatgacaatgctcacagccaccacttcatagcaatgtcgtgaggcttccgtgaattaatctatgtcaagcggttggcacactgtgagtgaggctcagagagctctgctgctgttccttagcgattcttatttttggtttctctctccagcacctggataaccacccatcttgaaggagacctccctgccctgcctctgttgtcccccagagcactgcctgatcatcctctgttccccatcctcccagcccttcctgctgtacctgtggggagctgatctcctcagtccccctgcttttccccggtctgccatcaccaccccaccaccatgcacccccttcctggctactggtcctgttactgtctactcctgctattctccttgggagtccaggggtccctgggggctcccagcgctgccccaga

SEQ ID NO: 36402 - DNA, 952 bp, Artificial sequence
  DNA replication origin
ctgcctatctgcaagcctgttgtatgagaccccaggatgaaaacggaaggtgccggggaaggcagaccgaaggggcatgggccagcccccaccagtccccccatctcctcccctccaccagtcggggaaggatggggttggagggagggtcccggggcgccccagctgactgcgaccttttcctctcccattcagtttatcgctgtggcagtgcgcagggctggagccgtcggttccgcttcagggccctcaagaatggggcccactggagtccccgtctggctgtgtttggagacctgggggctgacaacccgaaggccgtcccccggctgcgcagggacacccagcagggcatgtatgacgccgttctccatgtgggtgaggcatccgcaggggcgcgcgcagggacggtggggggcgcgcgcagggatggtggggggcgcgcgggtcgggggcgcgcgggtcgggggcggtgctaggaccgtggaggggacagggctggggccagtgtgtctctgaagggacaggggatgagactggctacggagacggtgtctgtggccaaccagcctgcctaggttaaaatcccaactctggcgctcttgccaggagcaggggttttcccccgtatattttgattagagagaaagctggttccgagttcgcaggactgttgtgatgactacgttagttcgctttgcctcgcagggtgcaggtgcacttcggtgtccttgtgctggttattattattattgctgctgttgttatttaagagggggaagggaattagatgggtaatggggattggggattgtgtgcttcaaagtgcagactctggaatcaggctccctaggttttatttctacatcttcactagccagctgtgtgacctggggcctcagtttccccatctgaaatgggaataataataataatactcatcttgggccag

SEQ ID NO: 36403 - DNA, 2320 bp, Artificial sequence
  DNA replication origin
gttatttaagagggggaagggaattagatgggtaatggggattggggattgtgtgcttcaaagtgcagactctggaatcaggctccctaggttttatttctacatcttcactagccagctgtgtgacctggggcctcagtttccccatctgaaatgggaataataataataatactcatcttgggccaggcgcagtggctcatgcctgtaattccagcactttgtgaggccaaggtgggtggatcacttgaggtcaggagttcgagaccagcccagccaacatggtgaaactccatctctactaaaactacaaaaattagccaggtgtggtggcaagtgtctgtaatcccagctgcttgggaggctgaggcaggagaaccgcttgaacccaggaggcagaggttgcagtgagccaagatggcaccactgcagtccagcctgggcagcagagggagactctgtctcaaaaaaaaaaaaaaaaaaaaaaagtgcccatcttggcccggcacagtggctcacacctgtaattccagcactttgggaagctggttttgaattcctgggctcaagtgatactcttgccttggcctcccgaagcgctgggattaacaggtgtgagtcaccatacctggctctctcaattccagtgaaagcagagctgggcctgggtcctcaccctccttccgccccctcccccaggagactttgcctacaacctggatcaggacaacgcccgtgttggggataggttcatgcggctcattgaacccgtggctgccagcctgccgtacatgacatgccctgggaatcatgaagaacgctagtgaggactgagggtggtggcggtgggcgagggctggatcaatggaaatggtctcgttcttcttagtgtctcccttgagtctctcatgctgcaacatttcaattgtggtagcaagaggagatgggggtgggctggaagctggactcagggcctgacagtggcggggtataggagtagggctatgaaattcagtccttcacctccatcccttgtacttcctttattccagcaacttctctaactacaaggctcgcttcagcatgccgggggataatgagggcctgtggtacaggtaatgtgggggtgctgggggactggccctctcccctgaaggatgggagatgcaggggagccctggtccctgacccctgccctttgactcctccagctgggatctgggtcccgcccacatcatctccttctccaccgaggtctatttctttctccattatggccgccacttggtacagaggcagtttcgctggctggagagcgacctccaggtaacctgggtggaggcccctatagtcccctggccagccccacctccccctccacccctgactcctagcccctcaccctgggcccttctccctagaaagccaataagaaccgggcagcccggccgtggatcatcactatggggcaccggcccatgtactgctccaacgcagatctggacgactgcacacgacatgaaagcaaggtgaggtccctccctgggagacagtggggacatgctgaaagccaggtgggcgtcagtctgcgtcaccctcacccgctcattcaccctgcccaggtccgcaaaggcctccaaggcaagctgtacgggttggaggatcttttctacaaatatggtgagcgaccctcaggacccatgccccacaccccacctctccccaattcagaggtctgatccccgcttgctctatctcaggagtggatctgcagctgtgggctcatgagcactcgtatgaacgactgtggccaatttacaactaccaggtgaggcacgtgaagggctgagcgcccacacagctggggtcagggtggtcagaaggcccaggcatggcctcgagtgactgcctgccacccaacgttgttcccttccccaggtatttaacggcagccgagagatgccctacaccaacccgcgagggcctgtccacatcatcacaggatctgctgtgagcagggggaagggtggctttgccttctctctctattcctatctatggagggctaactttgttccagactgagtgctgggtgctttatatagtggatatcacttaaccctcagccctaaggtcgggaactcctagcggtatgttcattggacggatgtaggaacagaggcacagacaggaaaatacttgctcaaagtcgcaggtcaaataagtggcagaggttgggagctcccccaccataaagttactctagttccctttttaattaataactaccatggaggtccaggcacaatgactcatgcct

SEQ ID NO: 36404 - DNA, 971 bp, Artificial sequence
  DNA replication origin
gctaaaaatataaaaattagtcaggtgtggtggcgggtgcctgtaatcccagatactcaggaggctgaggcaggagaattgcttgaacccaggaggcagagtttgcagtgagccggtatctcacccttacattccagcatgggcgaaaaagcaagactccgtctcaaaaaacaaaaacaaaaacaaaaaaagcccatcccctgcagcctcccagcacccttcccagcctctggtcaccatccttctaactcgccgtgtccatgacatcgttttgatttttagctcccacaaatgagtgagaccatgcgaggtttgtctttctgtgcctggcttatttcaccgaacctgatgacctccggttaggtggagctgttttaaacaagagggtcagggagggtggcactgagcaaaggcctgagggggggataaagggagtcatacagatccctgggggaacagtgtccccggcagagggaactgccagtgcaaaagtgggtggggagtccaatgcagaggccagtgtggctgcagcagagtgggcgaggggggtgattggagggggtgaggacacaggggtgacaggggcagatcgtctggggcctcgtggacctgagacggagccacaggagggctctgagcaggggcggatgtgatctgatgcaggtgttcacaggtgcctttggttgtgtgtggggaacagactcccgggaaaaggagggagcaggaagtccaaggagtctgtaggaaatgagtgtagacaggaccagggtgggggctttgggggtgccaaaagcgtagagagtctagatcgagctgggcgcagtggctcacacctgtaattctagcactttgagagaccaaggcaggtggatcacctgaagtcatgagtttgagaccagcctggccaacactgtgaaaccccatgtttactaaaaatacaaaaattagccaggtgtggtggcaggctcctg

SEQ ID NO: 36405 - DNA, 922 bp, Artificial sequence
  DNA replication origin
ccctaactccttctgggggggaagttagaaaatcggtatcacacgaaaacagtcatttcccctttaaggacctcagtgggccgggagccagccttcccgcaccttttccaaaatttccaatccccgcttggcattttctgcccgaaggtctccgattggacgctctgtaccaatcggaggctggagcgggccctgagaggcgcccgactccgcccccgcactggccctgcccactgcccggtcagcctcgttgctatggggactggtgggcggtgaggggggaaagccccggatgttcgttggggattcaacatggcggcgggagtgtccgcggtggtggcggtgcaagagagctgagggaggcgcgagggcgcggagttccaggtcgagcagttaggccgcgagcgactgcggcgccgagccggtaggataaggggtccggccaggggcttgcggtgggccgggcgctggcggcgggacggcgtttccgcgaggaggggggcggggccgccggggtcaaaggtcactggtggagggaagggtcgcgtccgaggggtcgggggttaacgcagactggagggagttgtagtggaggtcggagatcaaaccagcgaagggggcgtggcgaaggggagtgcaaagtttgaaattcgaagtgggggcgcgttcgaggggttctgggcgagtctcaaaaaaggcagggtcaaagttaataatttgagggaaggctgcccccacgagggtcagaggtcacagccccaggggcgccaggttggaggtttaaagctgcccctagcggagcagatgaatgagttttaggttcgggggcgtcttttaggggttcaaagctggggcgtgcctagaaggtacaaaggtgagaatctgacagcggggcagctgtttcccagagtcaaaaattaaa

SEQ ID NO: 36406 - DNA, 914 bp, Artificial sequence
  DNA replication origin
ccaactgtgcacccgagtcctgacctccagtcatgccagggcctctgcacacactgctcctcctgcctggtaagcccattcccagccctcctccccatccttcagagccttcccaggggaaagggactcaggcttcagcccagggtaggggcactctcccggctctctgaagatgccctcgcaagccacatcaccgtttgcagagacgcagtcttgtgtcactggcttgggggctggttccactctgctcccaccagggaactgagtgccctctgaggctaggggctctgtggatctcgtcccctgccacactcccagcacccggcacagtgcccaacagtcaacccccagcaatgtcacatcctctgcaggccaggcagggcttcagtggggaccgaggcaaggaaccccacagagcaattccaccatgcaccctaataattaaggtaaggagggaggtaagggctggtcagatgagagaaaaagagcctgcagcaaggcgagccagggtggtcccgggccagctgagagtgagcgacccgtcagtgagagagggcagggtggggaaaggattcccagcagaaggaacaggaaggtcaaagaccgggcgggaggcatgggcctggagttggagaacagtaaaggggctggggagaaatgggcagagccataagaagtgaggtgggagtgactaaggaccacagtgagagcttagggttttaagaacagtgaacaccccgctctgcccagggtaccacccagggacactctccccagtcagaagcccgtcggactcccttgctcggactccagaccacctacaaacaccctactcccataggctcacaggaatcttccctgccagatcacacccttccaaggaaaccaagcagacaatccgatccgcccaggga

SEQ ID NO: 36407 - DNA, 1732 bp, Artificial sequence
  DNA replication origin
gtttggaaacagatggggagatggttcacacaactggcttagctgggacctcgtccccactgactccctacaaccacaggagaagaaaggatggaagggctttcacctttacccccttgggcatccaggacggtgactgcagctttgccccaactgcccttgggggcaggtgccaggggtgacagctgggaaagagaactatactgattcgaacctctcaggagggaggcagggaggacggaggtgaaagttggaggatgggtgaggccttgtaacattctttctgtgtatctgactgttggtcccagtggtaaccaacacagcccagctctacccttgtagattatagtacagtgaaggagacagacctgctgtccccagacggtgacagcccagagaggccagggctgtgaaggagaggcctaggcgagggtcagggcgggatgtgggggggacccaggcagaagggtcagggcgggatgtgggggggacccaggcagaggggtcagggtggggtggtgggacccaggcagatgggtcatggcgggatgggagcggggacccaggcagagggatcagggtgggactgggggggacccaggcagagtggtcagagaaggatggggaaacccaggcagaggggtcagggcgggatggggaaacccaggcagaggggttggggctggatggtggggaggggcacagagagggattgggactgggatggaggcgcagggaccgtaggaagcccgaggaggcatgtggcccagcgtggggagttgaggagggctttctggataagatgacatctgactgatgagaacatatgagcgaggctggaaggaggtggaaagaatgtaacaggtcatgggtacggaagtgccaaggccctgagggtcggaatgacctcggaatggtcgaggatcatcagataggccggtgtaggctatgctgtgcaccctgactgtgtggtagccttgctctgcaaagagcagttaaagaaatacataaaatataaaataaataaataaataaaaaagcaaaaaaaagaagccagtgtggctgagcagggggtggggtcagaggcttggaggcggtgttggatacagcagggcctagcagagccaggtggggtgtgtggattccattctgtgcataatgggaagtcatcagaggctttagtgacatctggttttccccttataaagattgctcaggctgctgtgtgggggacggatcgcggggggtggcgacagggaggctgtggggaggctgctgtgacagtccaagcagaagagggtggagaagacgaggggacagtgatggaggagcgtcctcgtgccagctgaggtcatcagcgctttacccctgttacctcacttcatcttcacagcaacctgtgaagtaggtgctagtatcatcctcactctagagatgagaaaggaggcccagagaggtacgggacttgcttaaggtcacacagcaggcagtggcagaggtaggattgaaccccaggccttggggcttcagtgtcactgattactggggctgccctcccgtggtttggaactggctcggacaagacaggcctgattcctgttcagctggttcttacccaggctcctttgttgacagaagttccgtggagacctgttccccctgggtagtttctgggcgctgggtccctacctccctcagggcctccctttcctttctcatctactcctcgtcc

SEQ ID NO: 36408 - DNA, 1292 bp, Artificial sequence
  DNA replication origin
tgccctgaggctacgttatgccgggagacaaaataaaccaacagacccacatgtcataatggaagtaaccatcatgagggttaccgggggaaggtgctagagggagggtgacaggggctgctcctggggacccatggtcgggaagaaacatctccccaagggggccactgtcagcagaggctgactgaacagaaggaaggagggtgctgcctgcccagggggcagcaagaacaaaggccccggggtaggacctgcctggaatgttccaggaatggtggcaggagaagagggaagcagggcaggcaggaaagtggccaggttgcctgggaccttgcaagcttctctgctgggagaggtggagccaggggagggttcctgccctgaccaggtgtgcacggctacctctggctgtgtgcggacaactgtggggacagtgggggagaagggagcagggagcacgcctcaatggtccaggagggagatgagggtggcttgaactagggggccacgaggaagaagggtaacaaggaaggggggtaacgaggaagggggatgatgaggaaggggggtgacgaggaagaggggtgacaaggaagaagggtgacgaggaagaggtgtgaccaggaagggggtggcgaggaaggggggtgacgaagaagggggatgacgaggaaggggagtgacaaggaagaggagcccgcagcaccaggttacattgtcatgtagagtgacaggctttccagacactttggatgtggcgggggggcaagagaggagtcaaggtgatagggtgccagatttggagaagcctaatcccgaaacaagacgagggatgggggttcctgttcccaaaatggggtcactgtgggaagatgggggccgggagcctccagcccggcttatctttctgttgctctgcagtcgaggtctgtgttcccactggactgagctcggggagggctgcctgttgtttgggttcacccttcagtcgctgggccccagcgcaaagctggtcaaagaatacacgcttgggcagggcgcagtggctcacgtctgtaatcccagcaccttgggaggctgaggcaggtggatcccttgaagtcaggagtttgagacctgcctggccaacatggtaaaaccctgtctctactaaaaatacaaaattagccgtgcgtggtggcacatgcctgtaatcccagctacttgagggggtgagggaggagaatggcttggatctgggaagcggaggttgcagtgagctgagatcgcgctgctgcactccagccctggtg

SEQ ID NO: 36409 - DNA, 895 bp, Artificial sequence
  DNA replication origin
ctctggggcacgctctgctggtgccccatattctagagacatgaacggaggctcttggtaaatgtccttttcccctgccccacggcaagcaaggcactgacccctggccaccagcctcctgagcccatggtcctgtacgggccgccgcgaggtgctcaggatgttgtagggttgagggtggattgctgctgttgccggctagccgggaagttttctttttttggcctaagataaatattggagaagaatggcccgggagctttccatgtgaccagttcatgtgcctggaggcctgtggtttgtgtggctgggtatgtatctgcatgtctgtgtgatggtcttaggactcggctctatgtggtgtcagctgcggacatcttgcatgctctggcatgtcctcacatgcatctgtgtctagggatcatgcatgtgtgtatgcatgtgtgtgagtgtgcatgtatgtgagcatgtatttgtgagcgtgtgtgtgagcatgcatgtgtgtgtgtgcatgtgtgtgcatgcatgtgagcattgtgtgagtgcgtgcgtgcatgtgtgagcgtgcgtgtgtgcacatgtgtgcatgtttgtgagtgtgcatgtgtgtgagcgtgcatgtatgtgcatgtgtgggtgtgcgtgtgtgtgcatgtgtgtgcgcgcatgtgtgagcatgcatgtgttgcgggatggcttcgctcgctgctgtgtgttgggtctgtgaggagaggccgtggttgctgcctggtgtatgtcctggcgtctgtgcacggccttgtgtgttgcatggcaggggaggtagacagtgagagggcttgggtgctggagcctgagaggggcagggcctctttcctgccacatcacccccttccccctgcccagcctcaggcga

SEQ ID NO: 36410 - DNA, 848 bp, Artificial sequence
  DNA replication origin
ggcctgggagcccagcccccacccttccctccctgcacctgggcaagcccagcctttctgcctagctcttctccctcttcccaggcctggcacggcctctgtggcccccatgaggtcaggagcatctgttgggaagggagcgcctgctggggaagccggcagggcttggagctgcacaggacggcccagggtggggtccctgcctggtcattataaacatgttcagttcctctgtttgtcctgccctctgtgcagtgcccagagggaaggggtggccccaggcaaatatccggaggcgtgccccttgcccccttcccttgggggtttatgggtgggagggcaggaggccaggcgtcggaggacatcccccagaccccatgctgccagctgggccagccgcccgccctccaggctgctcttgccccgtccccaggtgtcccccacctcagggtctgccccgctgtccgccctccgggcttagtgaggggtcacatggctgatcctcttcccgtggctctgggaactgcctagtgccccgcagtggggagggagcgggatggggcggggcgacaggttcacgatgaagaggcctgggctgggcatggggccaaagggggtggagggacatctgggaggacggagaggccggaggacatgggacgcagatctggaatgacagcaggcagagtgggcaaatggggactgttggggtatgtggatgaccctgggagctgggcctagaaagccatgagagagtaggtcagggccaccaggggtgggctgggctggaaggccacgagggaggggtgggcagcactcagggcgccagcattgggctcagagaaggg

SEQ ID NO: 36411 - DNA, 1110 bp, Artificial sequence
  DNA replication origin
caggagctctggaaaggctcaaggttgggtgagacaggagtgtggtccggggtacagcagcatggcccccgggacatgagtctgcgggagacagcagagcttggaggctggtgtgggggctgtcagatgggccgtgggggaggctcaggttggggtggcatgggttcttaggacttggagccagtgggtggagggtgaaaggccagcactggacccaggataggggtggaaggctggggtttgtctccatttccatgtcagtgaggaggtgtcggtcacagggtcgagtgtggggttgagggccagggccactcgggggttggggtgggctgggggaggtggtggtgggtgccacataccttgggggccccgggctggatggaggtgatgcaggcggggtcgacgaggggcttgggccggcgagccgactcctcgatcaggctctgccactggcggggcagccccgtgaacttctgctcgtgctggtcgaagcccgtgtgcacgcggtgctcgaagttggacggcgcggagatctccacccgcttcttcctcttcccaaacatggtgccggggactcggtgcggcctgcgggagggaatcacggtgggtgagtgagagcctgcccatgtctcttcctcctctgcccctgctctgtccctcccatcctcatcttacaccgggaccaacaggaggcagtagcctccttctgggtctccctgcccaccccctgcgcccatctgtgtggcacacacagccagagggtacccgtgagcacccgagcggtcacgtccctctgctcagaactttcctgccgctctgtctcctgcgggcccacaaggccccatcacctctctgttctcaccccccctggagacctcagagcctttgcacgggctggcccctctgccaggagctcacttcccagtgtctgcacagggctccccgtcccctccttcagttctcagagcagcagtgactcctttcctgaccaccccaaggcaaagagccccgtgtcccgccgtccccccgctctacatcacagtcacagcccggaactcatggaaatcctgtttgttgttccttcttaggttcatgagtgcagcatccaca

SEQ ID NO: 36412 - DNA, 1815 bp, Artificial sequence
  DNA replication origin
ccagcactgtcctggggccccataggcacttgtgtttgctgcccttgaccgggcctcaggcctcccaggaccttctcgactccctgttggtttttttttttttttttttgagagacattcctgctctgtctccctggctggagtgcagtggcgccacctcggctcatgcaaccttcgcctcctgggttcaagcgattttcctgcctcagcctcccgcgtagctgggattacaggcgcccaccactatgcccatctaatttttgtatttttagtagagacgggttttcgccattttggccaggctggtctcaaactcctgacctcaggtgatcctcagcctcccgaggtgctgggattataggcgtgagccactgcttcttgcctcaacgccctgttctaacagcaaagtctggccttgtgtccaccttgacttcctggggcccctgggcaaggcccggcttcaggcagacagccacggccaggagagacagggcagcggcagaccacggattttgtgggatcagtgttttctacacgttacaggcaggcctctggctggaggatgcctggcagccccaggcagggtccgggtttcgtgggatcagtgttttccacacattagaggcaggcctccggctggaggacatctggcagccccgggcagggtccttgtcagcagggcccacgttctcagctcactgtggcctttgcacagacacctcactcactacgtggtttagcaaaagttcactgagcccctgctgtgcgccagatgctggtctaggtgctgagatggagcaggacccgaagcagacaggaaaaaacaatccctgcccagagcatgcactaggcagagccgggagcagacagatgcctgtgtgctctgtatcagctgctgttaggtgctctaggtagaatgcaggcagggcaggggccggggagggcaggggctggcattttagatgatgggaggccagcagaagcctcactgagaagctgagttttgagcaaagacctgaaggagtggagggagggagccacagggaccctgagagctgatgttccaggcagagggagccgccagcggagaggccctgggcgcaggggggcgggggtgggggagacacccgtgtgtctggaaatggaacgggggcagagggggcctgcaggacacgactcagaccacagagggtggggaccgggtgactcgggatgcactggatgctctgcctggtccccatctgcatttgcatttgccacccggctcctgggacccccttgccctctactttgggaccaggcctttctgactctccctgtcccccactccttgttgttcatgggagcagagagtgtggttttggggctaaggaacactggcgcccacatgggaggaagtgccaggccaggccctggccccagcgccctgtcatttgcagccctcggggctgattatggggtgggtcaatttctgcccttcctcccccaaacccctcagggcaggactattccaccagtgtgaggaacaggagaaaaacaaggggggcctctccagggtcccaccgagcccagggggcagcagcctggccatggcgatcactcctctggcccctgcagctgtgtccccagggaggggaggggctgcactgcccatgccattgtcactccatggcatctcttcattgcgtctctgtcttgtctctgtgtgtgtcgtgctgtcctgtccctgcgtgtcggatgcacgtcctgtgtgccccactccttgctgggcccccacccaccattgcctgggaccccagaccatcgtgcggggca

SEQ ID NO: 36413 - DNA, 1037 bp, Artificial sequence
  DNA replication origin
aggcagggacccagctggggcggacgagacggcctggggagggagaagagtgaggggaggaggggagcctggcccagcacggaggagtgcagggagaggagggaggaggggagggagggtgggagggaggggtgggaggaccagcagggcggcagggcagcagcgcccgcacctcgttgaagagcagctcgcgcctctgctgcttgcgcaggtccatcttcttgacggccaccagcttgcccgagctgcgcacggtggcgatgcacacgatgcccgtggagccctcgccaatcttgatgaagttgtccaggtaggagcgggggtcgcctgggtccaccaccagctgcagggcagcccggaactgctcatgggatactcgctgtggctcccgctgtggtgagcgggggccagggggcccaggaacagcaggggcggcgggggtgcaggctggaggggccagctggggctctgaggcgtggggtcccagcactccagggctgggggcacctcgggctcgggtgggaggccgggaggaggaggaggaggactgggggatggccaggccccccgctgatggcccgttaggggccacgtcatgaggctccccctgaaacagaagagaggtagctgtcagtgatgggtgccagggagcagctctgctccctaagcaggagagagacccagcgatgggacagacacatgggtggtcaggatgagatgcacggtggtggggcggggctggaaggtggggacagaggagcaacgggcaggggacagtgggggccctggggcgggggatgggttacctgggcaccccgggatgggtggtccgtgtcagccctcgggtaggtgttaaagggccggccagctgccagtttcgccccactggccagaccagcaggctggggggtgccgacatcaggcccggagagggggcgtttgtcccgggaggactcctggggaccccctgagccctccctggaagacttgggcctcttctctggccccgcccgtcgcctgtcaccactgccgccacc

SEQ ID NO: 36414 - DNA, 1111 bp, Artificial sequence
  DNA replication origin
cagccctgccttgcagtgggaggaatctgagaccactcgaccccactctggagtgggaggaatggaagacacgaccccatcccaggggcccggagcacagctggtttggagatgtggccccacccctagtggtctggaggggacttggtcgtgtcacaggaggggtctgaggccccagaaatacctggtgtgggtgacgatgtcggtgagggcgcctccttccaggaactccatgaccacccagagctcgtcccccaccaggtagctgttgtacatctccaccacattctcgtgctggtagtccctcatgattaccacctgtgcaggggctgggtcagtggtggagggaggcgggagggctgccagtgccagacccagccaccgccacccccctggctccccctgcagttccacattaagcttgtgctcactggggccacctggactgccctcccctactgccacagccacgtgggcctcagagccagcttgaagcccacgcctcccttctgggggcgcgcccccctgggcacacgcccatctcaggtcagtcctgggctagtgctggggggcaggtgggaagagagcgttcaatcacagggctgagacccggacaagggcaaggatgagagaagaggcgtgtgtcggcgggaggatgaggaacccaggcgaggagctccatggtgcagcccggcactgtgatgggcaacggggtcgagaggggcctcacacacccggcaaagggacctgggcttcctatcgtcagggtgctacggggcactgccagggtctctaaggagggacggggagggggtgggcctgaacgtcagaaacatactcttggtggttgtgtgggctgtgccgagggacacccaggagtggaggccagggcggggcacagggaacccaggaggggcaggtctggaggacactgtaccctggagcccaggcgggcctcagtgggtgcgaggggcctggaagacactgggtcgggggtcagtggcccgaggaaccctgggtctggggctcagggacagagatgtgggtgagggtgctgtgaggacagaggcagggacccagctggggcggacgagacggcctggggagggag

SEQ ID NO: 36415 - DNA, 949 bp, Artificial sequence
  DNA replication origin
gctgggcagggagcagcttttcagtggaggaagaagcctgtggcgggggctgcgctgtctgcccagatccctgcccctgggcccagtgtcctgtgctgatggcagagcccccgccagcctgtgccctcccactgcacagagtccccactgagctggaacctgactctgggctgctccaccagggagggacgaagttcccagctcctcaagacacagacctgggggtcagagctcacctaccctcacaggggatgggaagaggcagggaagccccgcagccggaaacctgccgcccccgtaccccgccgcccgtcccctcaccctgccatcatgggtcagcaggatcgagtcgctcttgatgtcccggtggatgacgccctgggcgtggagcaccgacagggcctgcagcactgcaaggcacacggccgcgatctgctcctcgttcatcctgcggggtggggtggggggtgagcagccagctggacagcaccccggggtgccgagggggacgcagccctgccttgcagtgggaggaatctgagaccactcgaccccactctggagtgggaggaatggaagacacgaccccatcccaggggcccggagcacagctggtttggagatgtggccccacccctagtggtctggaggggacttggtcgtgtcacaggaggggtctgaggccccagaaatacctggtgtgggtgacgatgtcggtgagggcgcctccttccaggaactccatgaccacccagagctcgtcccccaccaggtagctgttgtacatctccaccacattctcgtgctggtagtccctcatgattaccacctgtgcaggggctgggtcagtggtggagggaggcgggagggctgccagtgccagacccagccaccgccacccccctggctccccctgcagttccacattaagcttgtgctcactggggcc

SEQ ID NO: 36416 - DNA, 983 bp, Artificial sequence
  DNA replication origin
aaaacaaaacaagtcaccttgtcatacggcacacacccttcttgcttttttctgcctaacaagatggtttggtgattgttctctactggtacaaagaaagagagctgggccatccccaggccagataaattccccttccctgctattctctatcacaccccattcgtcctttcttgcattcagcatgctttgtaaatacctctgtgcgtgtggctgtcactggatcacagtctctcaccctgcccgaatgtcatcctcaccagggcagggccttgggcaggtctgtttattgtctgtccccagcccagggctgacctgacgttgctctgcttgctgggcagggagggcaggaaggcccggctgggcggcaggaggaagaggctctgacccagccgaggcaccgcttccaacttgcccaagcctagctcccactgcacctgctgcaaaacctgtcacccccaggagtcagcacgtcctggggcccaagcctgctggtagagggggaagggcaggggtcctggagggtgggcacctggggctgggggagcagatcctgggctctctatcagggctgtggagggtgggaaagtgcagccaggtcgggagggggcaggggtagtagaaaggtgggctggggtgggtgctgtctgccccagatacaaaccacagaggtttgtgaggttggaggggcagtgagcccacttcaccctgcagggggcgacagagaggcaggactgaggttggatagaaggagggaagagtgtggacagggagaggcagagacagcaacaagatacacaaagagccagaaaacaggaagagagggcccctgtaatcccaacactttgggaggccaagacgggaggatcgcttgagctcaagagttccagaacagcctgggcaacatggtgaaaccccatctctacaaaaaagaaaaaaattggccgggcacggtggctcacgcctgtaatcccaggacttcg

SEQ ID NO: 36417 - DNA, 964 bp, Artificial sequence
  DNA replication origin
agaggtgtgagagaggtaggtaagagacatgacagagagacaggtggtaaaatggagaggcacaatgacagaaaaagagacagagggatgcagagaaatgcatagacagagagagacaaagaggtagagagataaggaaacagggaaagaggaagagacagacggtcagggtggtgcctcctggctgctctgggcccttgcgcaccttcggggttgggcgagcgcagcaggttgcggtagagcggccgccgcaacaggagcagcttccaggtgaggcgctggggcagctccaggcccccgctcagcggcccccactcctccagcagcagctgccgggcgtgagcctcggacggctgcgccggctcggggagctcgggggcctccggggctgcgggcgatggcagcgacggcggcgagggcagtggtggcggcgacggcggcggtgaaggcgaccgtggcgagggaggcagctcctggaggctcgcgggcccatcggcttccatcccgccaccgagcgcgtgtccctcacgcacctcctccatccctcgaggctgcgcgactgtcccggtttcacagggctggggttaactgggagcgggaaggggcagggcaccctggctgacatttaagagaggggcgtgtcgggggaggatcttgtccctcggaccctcctccctcagacccaggagtccaggcccctagcccctcctccctcagacccaggaattcaagaccccagcccctcctccctcagacccaggagtccaggcccctagcccctcctccctcagacccaggaattcaagaccccagcccctcctccctcagacccaggagtccaggcaccagcccctcttcccgcagacccaggaatccaggcccccagtccgtcctccctcagatccaggagtccaggcaccagcccctccttcttcagacccagaagtccaggcaccagccccct

SEQ ID NO: 36418 - DNA, 1718 bp, Artificial sequence
  DNA replication origin
cagttcccacgggcccctctgagggcaatgcatcctgaaccccatgctacagacaaggaacctgaggctgaggatggagacgtgtccaaggtcaagcagcaaacatgtggcagagccaggatcccaaccctggcctgtgtgaccctgagcctccaagtcacaccagctcatctactgtgcaggagcaaggctctgtttcatggaggacaggggcctggggtgactcttcccctcccagggaaagagccttagaataattacaacaataacaagaatagccaggcgcggtggctcatgcctgtaatctgagcactttgggaggctgaggcaggcagatcacttgaggtgaggagttcgagaccagcctggccaacatggtgaaactccgtctctactaaaaatacaaaatgagctgggcatgatggcgcacacctataatcctagctactcaggaggctgaggcaggagaattgcatgaacctgggaggcagaggttgcagtgagctgagattgcgtcactgcactccagtctgggcaacagagtgagacttcatcttaaaaacaaaaaccaaaaaccaataatagctgctattgactggtgctagccagacctggccgggccctatgctgtgtgttttacaagcattctctcttatgctaaccctgtttacagagcaggaaatggaggtccagagaggccaagtcagtttctccaggtctcacagtgaggaagggtggagcagggaatggagtgtaagccacactggccctggcgactcacctttggttctgctggagcttttcagttctaatgtaccagccacggaaattgcctgcaggttggggagcaaagggttaggacaccccaacgctggaggaccctccccaccctcagcaacctggccctccaagcacttacccagagtttccaggggtcgctgggtgggaccagtagggggtgctggctcataaatgttgatgcctgaaatggacaggtgagtggagcctctgggcagcccctccatcttccaccgcctcacccctccctacccgcagggctatacactggaagggcaggaatctgtgccaggtcagggaagcccggcagggatgagtgagtcagggctctgggctggggagagggcaatgccaggggtaagtggggtgtggtgagacagacagagacagagggacagagagaagaacccagagaaagagacaggccaagagtttgaaaccagcccagcctggccaacatgacgaaaccctgtgtctactaaaaatacaaaaattagccaggcatggtggtgcatgcctgtaatcccagctactcgggagactgaggcaggagaattgcctgagcctgggaggcggaggttgcagtgagctgagattgcaccactgcattccagcctgggcgacagcaagactccgtctcaagagacagaaacataggcagagggggagagagagaggaggagagagaaagagagatggagaggtgtgagggagaggtgtgagagaggtaggtaagagacatgacagagagacaggtggtaaaatggagaggcacaatgacagaaaaagagacagagggatgcagagaaatgcatagacagagagagacaaagaggtagagagataaggaaacagggaaagaggaagagacagacggtcagggtggtgcctcctggctgctctgggcccttgcgcacctt

SEQ ID NO: 36419 - DNA, 1044 bp, Artificial sequence
  DNA replication origin
tggtcttgagaatagagggtgacaggcttttaagaaataaggaataggctgggcacagtggctcacacctgtaatcccagcactttgggaggccaaggcaggcagatcacttgatgtcaggagttcgagaccagcctgggcaacatggtgaaaccccatcgctactaaaaatacagaaattagccaggtatggtggcgcgcgcctgtagtcccagttacttgggaagctgaggcaggagaatcgcttgaacctgcgaggcagaggtagcagtgagctgagatggcaccactgcagtccagcatgggcgacagagtcagctgtctcaaaaaaaaaaaaaaaaaaaaaaaagaaagaaaaaagaaaaaaaaaagaaaagaaaaagaaataaagatcagcctcagtaaccccctggcacatttcaaaatctgaaaggctcaaacagaaggggccagggaggtgggcagggcaggaccctgtagcaccaggagggtcttggtgaagggctgaaagcaaggggagctcagagtaaggctcatgctctgggcagccctgcgcgatcacggggtcaggctggcaggggaggggcacgcaccagtccatgaccgtaatggctggttgttcgtcatccagcagctcctcccacaggccctcggccagaaggtccacacactgctgcttcactgtccagctgtgaaagaagggccgggagaggcggggtctgcgatctgccaggatccagggagcaggaagccctgtcttagtgctttcttagggatagcttgggtccccacacgtggggtgctccctcagcaccttccactctcagttcccacgggcccctctgagggcaatgcatcctgaaccccatgctacagacaaggaacctgaggctgaggatggagacgtgtccaaggtcaagcagcaaacatgtggcagagccaggatcccaaccctggcctgtgtgaccctgagcctccaagtcacaccagctcatctactgtgcaggagcaaggctctgtttcatggaggacaggggcctgggg

SEQ ID NO: 36420 - DNA, 991 bp, Artificial sequence
  DNA replication origin
gcccaccaggctccatgcggttcttggccttgtgcaggaagtggataaagcgcacaccgggaccataatggcggaatacgtgggacacctgtggtgacagcacctggggttagggaggagccctttttgaggacccgcggacctgttctcctccctctgtgaggtcttgggacaagaacacacgtctggggttgagggccccggcgcggagagtctcacctggacccagcggccagggggtcctctcccagaagttcggggggccacgtggtgctgagcaatgaccgtgcggcggtcggccgccagcagccagacatgcagctcatagacgcacgcatccagccggctgtcctcgaacctgcaggcggagtcaaggccttcagctgtcactgcagtctcagctacccagccccagcccctggccccattccccattcaacacacatgctgctacccatgctgtacacagccctgagctgggtggtgctggcaacatagcagtgaccaagacagccccacaccctgccacatgggattcacagtccagtgagggaggcaggcatgccaccaaacatgacagccaggaacggccaggtttgggatggggagcacgggcagaggggtcagggccaggatggggggacccaggcagaggagttggggacagaactggggacacaggcagaggggttggggtcggaattggggacccaggcagaggggttggggctggaattggaggcacagggcactggagaaaatgcacgtgacccagctgaggggtgatcagggagggcttcctggtgcagccatgtggaagtgactcctaaggaataagaaggaattggtcttgagaatagagggtgacaggcttttaagaaataaggaataggctgggcacagtggctcacacctgtaatcccagcactttgggaggccaaggcaggcagatcacttgatgtcaggagttcgagaccagcctgggcaacat

SEQ ID NO: 36421 - DNA, 1467 bp, Artificial sequence
  DNA replication origin
cacctaaaaccatgtccgagtcgatggcgtgtccttatccatggcattgtcctgggtatgggctgacccaggcccaaccaccctgctgtctcctccatcccacccggtccttgcatcccagggacaagcagatgacagacggggacaactgcacaaaggctgtattgcaggggaggtgggagggggcaggcagaacgctcctcctcctgggtcttggggccccggagcagagcccagggatgggctgagtgaggggcttggcactctgtggaagctgcagatgagagaccagcaatgcatcagctgcacctgaaatgtaatcaagaattccttccaggggctctcagagacccagagtctggtgagttctagaagcctgagactgggtgggggctggggagtctgggtctgaggctccaagttcaggaaccagggatcctagcctgggagtttggagctgggggctccttggagctcttgggggacaggagtggctggggagggtttgggagggtgtcaccgctggatctaggtcccaggtctgtgagtgcaaggtggcctcagggacctccagggttgggtcttgggggtgggctgtgggactgattttagggctgaggctggtctggagggtctaggggagtggagagcatgaaggctacactgggtgttcctataatcgagtctggagtcttgaggtctgggttagttttggagtctgggagctttgagatgtgatgatctggggagtgggggctggctttggttctggggactccagggtgagggggtctaggagctctcagtccccagaattagccagccctctctgggaagtacagctgtgggcgggtgggtaggcggaagattccagaaggtggagggttggctctgaatctcagagctggggcggaaatctccgtcccaggggcctgggctgcaggtggagtggggaccgggtgctgggggtgaggagaaggaggacctggtttgggtgaggactctgagatgggggcctccaggactggttctagggaggcctggtgctccctgttacagtcgggagctcaggggtgtggagcagcctcggggcttgggtggtgggtgtgggggcttatgcggagctggggcctgggcctggggtgggctcggagctttgggcggccgggcacctgcagtagagcgcggagatagcgttggaccagtctcctaagatgccccggcggtactcctccaggcgcgggtaggtgccggcagagaacttgtgcgtcttgcccgccttgccttgccgggaccacacggtgagctcgcagcgcggggccaccacaagtgaggaggcggtgttggcccagttggagggcaggtagggcaggtctgcgcccgactccagcgacagctcggcgcccccgcagcagttctcatagtaggggtcgctcttgtcatagagcttggcgcaagtgcgcgtcc

SEQ ID NO: 36422 - DNA, 964 bp, Artificial sequence
  DNA replication origin
gcggagctggggcctgggcctggggtgggctcggagctttgggcggccgggcacctgcagtagagcgcggagatagcgttggaccagtctcctaagatgccccggcggtactcctccaggcgcgggtaggtgccggcagagaacttgtgcgtcttgcccgccttgccttgccgggaccacacggtgagctcgcagcgcggggccaccacaagtgaggaggcggtgttggcccagttggagggcaggtagggcaggtctgcgcccgactccagcgacagctcggcgcccccgcagcagttctcatagtaggggtcgctcttgtcatagagcttggcgcaagtgcgcgtcccgtccgagtgcttgaggtcggcggaggcggggcaggcgccctgggcgcaaggcacggaggcaagggccagggccagcagcagcgggcgcagcggggacatggtggcagtgccctgccgcagccccgcgcgcttttatgcgcccgacccgtgggaagggacaagctgcgagataaggactcatcgagggaaggggagggcgcccctccctcaggagccgggagacctgcctaacctaggtcggaagcccacaaccctgagtacaaggtggacgctgtgtatacaacttagcaccttaagatgttaggtgaccaacaacattataaagagagacaatagacagaacttgaggaggagtcatttgcaacacagagggtggcataggttaatagacagaaatgggaagagctcttaaaaattgacaaggggcttgctggttgctcacgcctgtaatcccagcactttgggaggcctagacgggtggatcgcttgggcccaggagtttgagaccagtctgggcaacatagcaagatcccatccctactgaaaaataaaattagctcagcgtggtggcatggcctgtagtcccatctactcacaaagcagaggcggaagga

SEQ ID NO: 36423 - DNA, 1505 bp, Artificial sequence
  DNA replication origin
acacttcaggtcccaaatagagaggcagaaaaggccaggtgtggtggctcatgcctataattccagtgatgtgggagggctagcagggaagatcgtttgaacccagaagttagaggctgcagtgagctaggacctcaccacggcactccagcctgggtgatagtgtatgtctctcttaaaaaaaaaaaaaaaaaaggagaagggaaggggaaggttcaagacagtggaggcacgaggagccccagaactctgttggggagacactaattcgtgcacctgccatcctcccccaggacccaaaggacccgggtctgtcatcttcctcggggcctcctggagctggtgcagccagtggtggaggcggccccggggcctgggccttgctgaggctggatctgtgagcagaggagggcggtgtgtgaggcggggcctgggccaccacaggggaaggatgctgctcagagcccacagacctgggtgcccgggccccgaggactcacactggccccaagctgggagaggatgttgtggagggtgtgaaggagctggtccaggacatcccccagggccggatcagcatcagcggtgacctccaggaccttcagtgtcagggccagctcagcctccaaagccacagggcgctccctcacctgaagagaggtgagaaagagcaggtgagggggcgggtgaggggaacagatggggggaggaggatagagaggaacaagtgaaggtgacaagcacaggggagagggcacagccagtgtggtcaggtgggagtagagggaagggggagcaggtgtggggagaggagagagggacaagggagaaggagaagatgaaggggccactacagagccaggtgagtggggctgggagagcaggggtgggcctgactccccctctcacctgcagctgcctcaggtcccaggtcctggggaagaggcgggagcggcacctgcagtccttcagcagaagcgacacttcctagacagcaaaggcacaggttagccccagcaggaggggtggaggttagaccactctgatgggattggaggatggctgacaacaggatagggaagttaactggtgggaggatagtagaggaccctcttctacagaagaacatgcgtcagtccctgcagtaggagcatgagatagcctactgcagggagggtggaggctagcccagtgaaggaagctggaggtcttcgctcaacaaagtcagcatggtgacccatagagggtgatggaggctagcccacggcaggaggggcagggggagactcacacaggcctcgttctgtctattaaagcctgagctgcatggacttcctgtctggttcctgcgcctttttcaccagggggatgcagtgtcctgggctccacggctttgggtctctattcagtcttattcaaagtctctggcttcggtctcttcttctggatctccacctgctgctctgggtttggctgtttctgatttccagctcggtctggggtat

SEQ ID NO: 36424 - DNA, 1337 bp, Artificial sequence
  DNA replication origin
tggaggctagcccagtgaaggaagctggaggtcttcgctcaacaaagtcagcatggtgacccatagagggtgatggaggctagcccacggcaggaggggcagggggagactcacacaggcctcgttctgtctattaaagcctgagctgcatggacttcctgtctggttcctgcgcctttttcaccagggggatgcagtgtcctgggctccacggctttgggtctctattcagtcttattcaaagtctctggcttcggtctcttcttctggatctccacctgctgctctgggtttggctgtttctgatttccagctcggtctggggtatcattcctgcctgagctccagggcacactgtttagctgggacagaggccagtcccacgggtgcagagcggcctgaggcaccggagggggtggggtgggggaggcccaggctggagaagtccagagcagggcggggccaggtgccgcagctgcccctggggaaagagaaagtgacacgtgcccgggccaggctctgtgttcgcctacaggaaggtgacttcctgaaccacacatgcctggggctgtagcagcttcagctcaggaggaggagccacgggtgcccccagggcaggactagggtttgagggggcgggtgaggggcttgtgtatctgcagattgctcagatgtggaggggggtggctgagggaaacccgggaagtatttccctgaggggtggaaggggggactctagaaggagactgcttagggtaggggagaccacccagggaaagggatactgtggggatgggaggacggagtcagtgaggccaagaccacagagtataaagaaaaggacaggccactttggtacgccaaggcaggaggatcacttgaagtcaggaatttgagaccagcctgggcaacatagcaagacccccgtcactacaaaaaaaaatttttttcgactagccaggcatggtggtgtgcccctgtagtcccagctactccggaggctgaggcaggaggatcacttgagccctggagttcaaggttgcagtgagccatgattgcaccactgcactgcagtctgggtgacagagctagacctcgtctcaagggaaaaaaggagagccctccctgcactcccaactctccccaacctgccatcagttggggggtgggggaggcaggaacaggggagtgacagtgtctactcaggaattcaggtacagctgagggcttcaaaggaagcaggttgattgtaacagacccattcctttattcattcattgaatctgtcattggttcaaaaagtatttattgagcaggaactatgggccaacactgtc

SEQ ID NO: 36425 - DNA, 1273 bp, Artificial sequence
  DNA replication origin
tcagacacacaggtccccgctggcaacacaattcaggtctcgcgtgaggaggcggaagaggttgaaggtgacagaggcctcgaggcagccaggggactcctgtagggaggaggggatgggtcaggggctgtctgggttctgggctcccagtggctccccagacctcagtccctctcttcccgggtcactcaccttttttggggcctcctggagccggtgcagccaatggtggaggcggccccgggtcctgggccctgccgtgggctgaggctggatctgtgggcagaggagggcggtgtgtgagccggggccttggccaggggaaggacgctgctcagagctcacagacctgggtgcccgggccctgacgactcacacaggcccggagctgggagaggatatggtgcagggtgtgaaggggctggtccaagacatcccccagggctgggtcagtgtcagcggtggcctccagaaccttcagcgtcagggccagctcagcctccaaagccacggggcgctccctcacctgaggagaggtgagaaagagcaggtgaggggggaggtgaggggaacaggttgggggaggaggatagagaggaacaagtgaaggtgacaggcacaggggagagggcacagccagtgtggtcaggtaggagcagagggaaggggtagcaggtgtggggagaggagagagggacaatggagaaggagaaggtgaaggggccactacagagccaggtgagcagggctgggagggcaggggtgggcctgactccccctctcacctgcagctgcctcaggtcccaggtcctggggaagaggcgggagcggcacttgcagtccttcagcagaagcgactcttcctagacagcaaaggcacaggttagccccagcaggaggggtggaggttagaccactctgatgggattggaggatggctgacaacaggataggggaggttaactgctgggaggatggtagaggaccctcttcttcaggaaaacatgagtcagtccctgcagtaggagcatgagatagcccactgcagggagggtggaggctagcccagtgaaggaagctgggagtgggaaagcatggtgacccttggagtgcgggtggaggctagtccatggcaggagggcagggggagactcactaaggcatctttggccctcttaaaggcctgcagctcctgtggagacagggacttgaactgggctatgtggcagccccttgcatccgggagagccccgcggagcctggcgacaggaac

SEQ ID NO: 36426 - DNA, 1654 bp, Artificial sequence
  DNA replication origin
gcgcggagtgcaattcaaccctggttcgcgccttcggggagctccctggttcagtacacgacaggcacgaccgtgcgctgccagtacccatccacgtccaggaatcccagactgtgcagaggttaggggccctggcgagggggcctagccgtatgcgataagcgccgcttgtcccgcaggaggaagaggcgctgagctgggggcagcgcaactgctccttccgccccaggagggatcctccgcggccatcggtgaggcccgggagtgggcgggagaggcatggcccgggcgcggcccgctctaacgccctctcgtccccgcagtcctgcgctcggctccgccacgtggcccggggcatcgcggacgcccaggcagtgctcagcggcctgcaccgctcggagctgctccccggcgccggcccgatcctggagctgctggcggccgcggggagggatgtggcggcctgcgtgagtgacggccgcgccccgccgcccctctcccccgccagcttctctgcatcctcaggcccacggcgagccccagcgctttgccaatctgtcctgcttagcggaaaaacccatccagaccggagtcgggtcctctgggtgtcctgaaatccgggctcgagtctgcggctgggagggccacgggcagatgcagagaggggcttcgtccttcgccttttccatttgcctcatgtcccacctccagcttgagctggcacggccaggctcctccaggaaggtccccggggcccagaagaggcgtcacaaaccccggagagcggtgagtgcaacaggcaatacagggttagcccgcagggaggaccaggcgaggctgacaaggacgggactgaggctgcgagcagcgggactggagggggattccgggggcggggggaagagcctggcttagccccgctgccctccctccctggctccaggactcgcctcggtgccgcaaagccagcgtggtcttcaacctcctgcgcctgctcacgtgggagctccggctggctgcacactctgggccttgcctctgaccccgccccctctggcagcacggaaacctccacgccattggctgccgaaagcagctcctgtcgtccattgggctggccgggcgaggctctcagtcaatgggtgctgaggcacgaaaacttcttcgcagccttgggcctgacttggatccactgtctcagatataagaggagcgggtccttctacagggaagagaccacagttctccaggaagccacgatatttcctcggggtgcattgtacgaccctccaacggttgctgtggcaggaaaaaacttgagctctggaaaccgtggctgaccccaggcaacagggaccagttcctccttgtgtggttaccaggacacccccaacaccaggtcctaaccccggatttgtagccccacagccagctttgagattctgtgaatccgtgactcttggatccggcatctaagggacaccaatccatgagggatttggtagtgaaaggcccaagggtccttaaccgactgtggttctttggattcccttacgtgtgtttgtatttgtgaagttcctgtgcatttgctattctgtctcccggtttaaatttattgccagttatcaaagagtgttttgatcgcattggttgt

SEQ ID NO: 36427 - DNA, 1200 bp, Artificial sequence
  DNA replication origin
agcggcgcttatcgcatacggctaggccccctcgccagggcccctaacctctgcacagtctgggattcctggacgtggatgggtactggcagcgcacggtcgtgcctgtcgtgtactgaaccagggagctccccgaaggcgcgaaccagggttgaattgcactccgcgctcccccagcaaagcccctcgccccgacctggagccgagtcctcccggcagggctcccttctgtgattgaccctgagcctgcgttcgcgctgacgacggggactgcgggggtctcgtggtgggaattgtgggcgctgacataggagaggcgcctgctgggcgctaggacgcaggaccccttgggacaggaacgggtgtatgggaacccggtggggccagggtcccagggggcacaggggctgggcggtgacttacgtagcggtccctcagcgccttggcagccgccagcgtccggggctccagcgagcggtagtgcgagagcaggcagcgccggggggccttctgcgatcaccgtgcacaggacccacagccccgcggccactgcggcccagacactcggccgcatctctgcttctgcagcaggcgagagacgtcagggaagccaaagagagggtccagcgcgtccagccccccgccttgggttaggatcccagggaaggcaatgctcggagcgtgaaggcacagcacacacagtgggagagagagtgggagccggccccctcctcgccttggcctctgccctcactcctgtctgcagtgcaccctctgtgcctcgtgctgcagcaggtgctgccgtccactgtcccctgggaggcgtccagagccgtctccacctgggcaacagtgcctcgacggtccatgctggcttttatgcgcagggctgagaatggggtttgcagccgggctttcccgtccagggcaagctttcccaacatcagagctggccccaggcctctgggatcccagtcgggtgtgaggacttcaacccgaggttggcctgtgcccgggatggctgccctccaacactcggtttccaaattgtctctgtccctgtttctactgtctgtttcctctttctttgcttcaccctggttgtctttatcttcgttctgcaatcacaaccagcccttgtgtagtgttgactgtgcatcaggctctcttctatgtaattgacacagacatatcatctca

SEQ ID NO: 36428 - DNA, 1256 bp, Artificial sequence
  DNA replication origin
acggtcgtgcctgtcgtgtactgaaccagggagctccccgaaggcgtgaaccagggttgaattgcatcccgctctcccccggcatagccctgcgcccgcgacctggagccgagtccgccctgcagggctccttttgtgactgaccctgagcctgcgttcgcgctgacgacggggactgcggggatctcgtggtgggaactgtgggctctgacgtacaagaggcgcctgctgggcgctaggacgcaggacccctcgggtcagcgacgggtgtgtgggaacccggcggggccagtgtaccggggggcgcaagggctgggcggtcactcacttagcggttcctcagcgccttgaccgccgccagcgtccggggctccagcgagcggtagtgcgagagcaggcagcgctggcggatcgccgcgcccaccgtgcacacgacccacagtcccgcggccaccgcggcccacacactcggtcgcatctctgctcctgagggacgtcagggaggccaaagagagggtcccacgcgtccagtcccctgccttgggttaggctcacaggggaggcgcagcacacacagagggagagagagcgggagccggccccctcctcgccttggcctctgccctcacttctccctgcagtgcaccctctgtgcctcgtgctgcagcaggtgctgccggccactgtcccctggggggcgtccggagcagtctccacctgggcaacagtgcctcgacggaccatgctggcttttatgtgcagggctgagagggtttgcagccggtccccgtcctggacaagatttcggaacgtcactgctggccccagccctctgggatcccagtcggggtgtgaggactttaacccacggtgggcctatgccagggacggctggcctccaactctctatcctgagccaactgcctgtgtctgttttctggacatctgtttgtctctctttgcctctgtctgatctgtcttctgtactctaggaatgaaccgagacactttttccttttctttgaagctacaggcttggcagagctaccaaatcatttaaatgcctgccatcgggtgttcacaactggctttcccatgctgtctccttcatctttctctgctttctcattacatttctgtttgtctgtccctgtctttgtatctttctttcccttgtcaatgaatgagaagagtcacactctaaaaaacacttgaagagatttatcctgagccaaatatgagtgaccaatggcctg

SEQ ID NO: 36429 - DNA, 963 bp, Artificial sequence
  DNA replication origin
gctggaggtgggacgcgaggcaaatggaaaaggcgaaggacggagcccctctctgcatctgcccgaggccctcccagccgcagacccgagcccggatttgaggacacccagaggacccgacctgggtctggatcggtttttccgctaagcaggacagattggcaaagcgctggggctcgccatgggcctgaggatgcagagaagctggcgggggcgaggggcggcggggcgcggccgtcactcacgcaggccgccacgtccctccccgcggctgccaggggctccaggatccggctggcgccgggaagcagctccaggcggtgcaggccgctgagcactgcctgggcgtccgcgatgctcctggccacgtggcggagccgagcgcaggactgcggggactagagggcgttagagggggcagcgcccaggccatgcctctcccgtccgcttctgggcctcaccgatggccgcggaggatccctcctggggcggacggagcagttgcgcgacctccaactcagcgcctcttccgcctgcgggacaagcggcgcttatcgcatacgactgggccccctcgccagggcccctaacctctgcacagtctgggattcctggacgtggatgggtactggcagcgtacggtcgtgcctgtcgtgtactgaaccagggagctccccgaaggcgtgaaccagggttgaattgcatcccgctctcccccggcatagccctgcgcccgcgacctggagccgagtccgccctgcagggctccttttgtgactgaccctgagcctgcgttcgcgctgacgacggggactgcggggatctcgtggtgggaactgtgggctctgacgtacaagaggcgcctgctgggcgctaggacgcaggacccctcgggtcagcgacgggtgtgtgggaacccggcggggccagtgtaccggggggcgcaagggctgggcggtcact

SEQ ID NO: 36430 - DNA, 1679 bp, Artificial sequence
  DNA replication origin
ttcaaccctggttcacgccttcggggagctccctggttcagtacacgacaggcacgaccgtacgctgccagtacccatccacgtccaggaatcccagactgtgcagaggttaggggccctggcgagggggcccagtcgtatgcgataagcgccgcttgtcccgcaggcggaagaggcgctgagttggaggtcgcgcaactgctccgtccgccccaggagggatcctccgcggccatcggtgaggcccagaagcggacgggagaggcatggcctgggcgctgccccctctaacgccctctagtccccgcagtcctgcgctcggctccgccacgtggccaggagcatcgcggacgcccaggcagtgctcagcggcctgcaccgcctggagctgcttcccggcgccagccggatcctggagcccctggcagccgcggggagggacgtggcggcctgcgtgagtgacggccgcgccccgccgcccctcgcccccgccagcttctctgcatcctcaggcccatggcgagccccagcgctttgccaatctgtcctgcttagcggaaaaaccgatccagacccaggtcgggtcctctgggtgtcctcaaatccgggctcgggtctgcggctgggagggcctcgggcagatgcagagaggggctccgtccttcgccttttccatttgcctcgcgtcccacctccagctggcacggccaggctcctccaggaaggtccccggggcccagaggaggcgtcacaaaccgcggagagctgtgagtgcagcaggcagtacagggttagcctgcacggaggaccgagtgaggttgacacggacagcactgaggctgggagcggcgggattggagaggtcttctcgggagggaagagcctggcttagccccgctgccctccctccctggctccaggactcccctcggtgtcgcgaagccagcgtgatcttcaacctcctgcgcctgctcacgtgggagctccggctggctgcacactcagggccttgcctctgaccccgccccctccggcagcacggaaacctccacgccattggctgccgaaagaggtccctgtcgcccattgggccggccaggcgaggatctcagccagtgggtgctgaggcacgagaacttcttcgcagccttgggcctgacttggatccactgtctcagatataagaggagcgggtccttctacagggaagagaccacagttctccaggaagccacgatatttcctcggggtgcattgtacgaccctccaacggttgctatggcaggaaaaaacttgagctctggaaaccgtggctgaccccaggcaacagggaccagttcctccttgtgtggttaccaggacacccccaacaccaggtcctaaccccggatttgtagccccacagccagctttgagattctgtgaatccgtgactcttggatccggcatctaagggacaccaatccatgagggatttggtagtgaaaggcccaagggtccttaaccgactgtggttctttggattcccttacgtgtgtttgtatttgtgaagttcctgtgcatttgctattctgtctcccggtttaaatttattgccagttatcaaagagtgttttgatcgcattggttgttttccgtatgatgattgtgaggtgcaccttacagcaaaaaaagaggcc

SEQ ID NO: 36431 - DNA, 2259 bp, Artificial sequence
  DNA replication origin
ctcaaggattcacctatcacagaaggttccaattccttgttgtttatttgtgcataatgtataaaagtaaaacaataaactcagccctatgtctcagtcagggctgcagcttcataaataaagggtgagaggaaataaattaaggaaggagtagggctcagcgcataaataaggtgtggggtgtcaggtggactcagggtgggttgacgttctcagacacaggttcccatcggccacatatttgaggtctcgcgtgaggaggcggaagaggttgaaggtgacagatgcctccaggcagccagcggactcctgtaggggaggaggggatgggtcaggggctgtccagggtctgggctcctattggctccccagaccctggtccttctcttcctgggtcactcacctttttgggggcctcctggagccggtgcagccagtggtggaggcggccccggggcctgggccctgctgtgggctgaggctggatctgtgggcagaagagggcggtgtgtgaggcggagcctgggccaccacaggggaaggatgctgctcagagcccacagacctgggtgcccgggccccaaggactcacacaggcctggagctgggagaggatgtggtgcagggtgtgaaggggctggtctaggacgtcctccagggctgggccagcagcggcctccaggaccttcagcgtcagggccagctcagcctccaaggccacagggcgctccctcacctgaggagaggtgagaaagagcaggtgagggagaacaggcaagaagacccagttagtggggacaggtaggcagtcctggggaaggtcggtgacacagtgcatgtggtggggacaggtgaggggtctggggagaaggagacaggagggggaagacatgaggaaggatacaggtgaggcaggatggtcaaggaggcaggtgaggggataagtgaaatggagacaaatgaaaggggacttacgggggtcacagaagttctctggggcggggtggggacgggtgaggagaaagcaggttgggggcacagtaagagagggacagttgcatgcacagagaagaagggtagggctgggtgtggtggctcacgcctgtaatcccagcactttgggaggccgaggcgggtggatcacctgaggtcaggatttcgagaccaagcctggccaacatagtgaaaccccgtctctgctaaaaatacaaaaattagctgggcatcatggcacatgcctgtaatcccagctactcgggaggctgaggcaggataattgcttgaacccgggaggcagaggttgcagtgaaccgagatcatgccactgcactccagcctgggccatagagcaagactctgtctcaaaaaaaaaaaaaaaaaaaaaaaaaagagaagggtggatgaggggggagcatgagctggatgaatgtcagtgagagataatgagggacaggtgacagaggcaggtgagagggagagggggtcagtgttgggaacagacagggagaagtggagcaggacgaaaggcacaggtgggcgacagactggagacatttgggagagaaatgaagagtgagagtggaagtgacagggacaggtgagcgagctagggaagtggggccgatgggagatgataaaagggacccaggggaaggacagagtcaagagagcagttttgaagtggcaggggcacaggacaggtgaggagaggtccaagagagtgaaggacaagggaaacaaagaaggctaaggggccacttaagaagaggggggagagggtcaagggaagggtgaagggggcctgactttcagctcacctggagaagcctcaggtcccaattcccggggaagacaggagagctgcaactccagtttttcagcttgagtgactcttcctagagagcaagggcaggggttagcccacagcaggatggctggaagctagctcatagcagcaaggatgaagttggcctgacagcatgggtttaacccagtgcagaaaggatagaggtttgccatagttggaaggctagaggctagcccacagtagaagggcagtaattgggacacccgtagaagtggttcatccacagcaacaggaactcaccaaggcgtccctggccttcttgaagctcgctagctcctgtggtgacagagatttgaacctgccaatgtggcagcccttcccagttgtggtgggcttggaagtggggacagggcctgccacggccaagcctagcaccaaagtcaccagcacca

SEQ ID NO: 36432 - DNA, 1449 bp, Artificial sequence
  DNA replication origin
tgcctcacctgtatccttcctcatgtcttccccctcctgtctccttctccccagacccctcacctgtccccaccacatgcactgtgtcaccgaccttccccaggactgcctacctgtccccactaactgggtcttcttgcctgttctccctcacctgctctttctcacctctcctcaggtgagggagcgccctgtggccttggaggctgagctggccctgacgctgaaggtcctggaggccgctgctggcccagccctggaggacgtcctagaccagccccttcacaccctgcaccacatcctctcccagctccaggcctgtgtgagtccttggggcccgggcacccaggtctgtgggctctgagcagcatccttcccctgtggtggcccaggctccgcctcacacaccgccctcttctgcccacagatccagcctcagcccacagcagggcccaggccccggggccgcctccaccactggctgcaccggctccaggaggcccccaaaaaggtgagtgacccaggaagagaaggaccagggtctggggagccaataggagcccagaccctggacagcccctgacccatcccctcctcccctacaggagtccgctggctgcctggaggcatctgtcaccttcaacctcttccgcctcctcacgcgagacctcaaatatgtggccgatgggaacctgtgtctgagaacgtcaacccaccctgagtccacctgacaccccacaccttatttatgcgctgagccctactccttccttaatttatttcctctcaccctttatttatgaagctgcagccctgactgagacatagggctgagtttattgttttacttttatacattatgcacaaataaacaacaaggaattggaaccttctgtgataggtgaatccttgagtgtgtgtgtgattgtgggtctgtgactgggtgtggatgtctgggtgatgcaggcaaaatttgtgactcgttgtgtatatttgtgtgtgcctgacttctgtgactatgtatgtatttgtatggaaatgagtgtctgcctgaacttgagtctaaccaaaggtgcgtaactgtgcatgttcatgcccacacgtgtgcaagtatgtgtgtgtactgccaggcatggtggctcacacctgtaatcccagtgctttgggaggctgaggcaggcagatcacttgaggtcaggaatttgagaccagcttagccaacatggtgaaaccctgtctctactaaaagtacaaaaattagccgggagttgtggcatgaccccgtaatcccagctactcgggaggctgaggcaagagaaatgcttgaacccgggaggtggaggttgtggtgagccgagatcacatcactgcactccagcctggccaccaagagagaaactccatcttaaaaaaaaaaaaaaaaaaaaaaaaaaaaaaaaaaaaaaggcc

SEQ ID NO: 36433 - DNA, 1278 bp, Artificial sequence
  DNA replication origin
gcgccgcgcccggcggacaaagcgccaccggtccacgccgcacctggacggggctggagggggcgcggccggggaggatggagacctggggctgggctccgccagggcgtgcctggctttcaccagcaccgagtggatgctggagagtaccgtgtgagcggcgggcgggcgccgggacgcctgggtgccgcagaccaaacgcccagccgcacggacgctggggcgggactgggagaaagcgcagcgccaagacattggaccagagtggagacgcgcccttgtccccgggagggggcggggcagcctcgggctgcggctcgaggccacgcccccgtgcccagggcggggttcggggaccggctgccggcctcccttcccctatggactcctcgacccccctcctacccctcccctcgcgcgctcgcggacctcgctggagccggtgccttacacagcgaagcgcggggaggggcagggccccctgacactgcagcactgagacacgagccccctcccccagcccgtcacccggggccggggcgaggggcccatttcttgtatctggctggactagatcctattctgtcccgcggcggcctccaaagcctcccaccccaccccacgcacattcctggtccggtcgggtctggcttggggtccccctttctctgtttccctcgtttgtctctatcccgccctcttgtcgtctctctgtagtgcctgtctttccctatttgcctctcctttctctctgtcctgtcgtctcttgtccctcggccctccctggttttgtctagtctccctgtctctcctgatttcttctctttactcattctcccgggcaggtcccactggaaggaccagactctcccaaataaatccccacacgaacaaaatccaaaaccaaatccccctccctaccggagccgggaccctccgccgcagcagaattaaacttttttctgtgtctgaggccctgctgacctgtgtgtgtgtctgtatgtgtgtccgcgtgtagtgtgtgtgtgtgtgtgtgtgtgtgtgtgtgtgtgtgtgtgttgggggagggtgacctagattgcagcataaggactctaagtgagactgaaggaagatgggaagatgactaactggggccggaggagactggcagacaggcttttatcctctgagagacttagaggtggggaataatcacaaaaataaaatgatcataatagctaacgcttagtgaatacttacttactatgtgccaagcacttaagtcatttaattctc

SEQ ID NO: 36434 - DNA, 1294 bp, Artificial sequence
  DNA replication origin
gacccctttacggaagaaacttacctggtagcgtgatttggtgacttctggtggcacatgaacatatgaggtggttgcctttaatatctggacaaggagcagggcctgtagtctggatgtggcctatacacagtaggggaaccatccttagtgggccattgtggggtgtgcctggaagccacatttcatttggttggggaatggcctgtagcaatgtcagggaacatgtagttaagggacttggaaactgttccaggacatagacaaagctagatggtttttttttttttttttttttttttttttggtttgtttgttttttgagacagagtctcggtcttgcggtcttgtagcccaagctagagtgcaatgatgtggtctcggctcactgcaacctccacctcccgggttcaagcgattttcctgcctcagcctcccgagtagctaggattacaggtgcctgccaccacgcctggctaatttttgtatttttaatagagacagggttaccatgttggccaggccagtcttgaactcctaacctcaggtgatccacccttcttagccttccaaagtgttgggattacaggcgtgagccactgcagccggccaaagctagatgttttacccaaaggtgctgcatgcagataagggggagcgacctgcatcatggttttccctgaaaggcaggaatatgtataaaagaggaactagaagagcatccattgttccagtaggaatatgacaggcgctgtgagctgaccttagtgtccacctgagtgggggatggggcatgcagaaaaggggaggtggccagtagcgttggcccagttttggggtagaaatgcctagatgaaggaccttgaatggcagttgtcctagcaagagtgagacatagctagggagcatgtcccttgagggcagggcttaaaagccatagcacttctcccctgcaggggccgggatatgcagaggaggtaatacgaatgatagatatattgtcccagtgggtgatgggacacagccaggaggtgggtctgagggcggggcatacagatgaggggtgtgaaagggtgggaatatgttgatggaggcggggcttgaattgctgctgttgtctcagtagcggctgagacttcgatagcagggtttagtccccactgttcaccatgggcggggcataaagcgaaggggcgtggttcggggggactaaccccgccctgaacccgccccctcctacaggatgatcccgtccaccagtcagaccttcctggtgaatgacctggcggcgggc

SEQ ID NO: 36435 - DNA, 1128 bp, Artificial sequence
  DNA replication origin
ggagcttgttctgcatggtcccacgaagaggaaggggcagtccttgtctcccgggacccaccaagagtctttgctggagaagagagcttgtgaggttgcatcctggccatgccaatcaatgtggaacgggcagtccaggtttagctgaggctggacatggcccacagtgtggaaacgatgtgctcaacagaagagggccaaggcctagcaggaatggccctccagaggggtagatcttatagatgggaggaatgcaatgggctggatagtgtgagccacagcaagggttactggccaacacgaggtgtgatgcaagctaatgatgatatcattaagtgccaggtcctggctgtgttaactcattcattcctcacaccatctctatgatgtaggaattattatcatccccatttggggaaaatgagacacagggaggttaagaaacttggcgaagttcgccgggcgtggtggttcatgactgtaatcccagcactttgggagatcgaggcggatggatcacctgaggtcagaagtttgagaccagcttggccaacgtggcgaaaccccatctctactaaaaatacaaaaattagccaggtgtggtggtgggtgcctgtaatctcagctgtccgggaggctgaggcaggagaatcacttgaacccggaaggcagagattgcagtgagccgagatcgcgtcattgtactccagcctgggtgacacagcgagagtctgtctcaaacaaaacaaaatgaaacaaaagagaaacttgcctgaggtcacagagcaagcaagtggcagaggagagactcaaacccgggcaatctggcccccagcctttgtcatcttaaccacttctctacactagtcttcattcgaggggaggggcctacagcaagaaaggaatatggtgtgtgcttggctacgtttgacccctttacggaagaaacttacctggtagcgtgatttggtgacttctggtggcacatgaacatatgaggtggttgcctttaatatctggacaaggagcagggcctgtagtctggatgtggcctatacacagtaggggaaccatccttagtgggccattgtggggtgtgcctggaagccacatttcatttggttgggg

SEQ ID NO: 36436 - DNA, 1090 bp, Artificial sequence
  DNA replication origin
catttgttgggcacccactgcttggaagggagatggataatatatttctgtaaataattctgagcttctgtgactctccacttctctgtccctctctttcctttgctctgagccatggccaccacatggtggggtgggggaggttcacaagcccccagaccctgcatggatgcagatgttgatggccccctgtccccagctgggcaacagaccctgggactcttctcttccctgtagggccccagttccagttctccaacccccattgcagattcctatgctatggtgccgcaggggttaacttcctcacgctgtcatgggcggaggtggcagccaaccagaagcctgcttagctgcttgctttaattctgcagccaattagagacacttgggctgaagctttcttaaggagccagcctctgtccttgaaaaggggtgggggaagcccctagcaactggctatttaggggaaggagcaagtggaatccagggctctggagaggagagatgaagagaggaggaggaaggcttaaagccagggcagccgagggtggctggggtgggtggcagtggtctttgaaatggcagtcaggggtgggtagagtggagttggagaagtgggtggacctttatgaaggggcggggccctgattggaagtcttttggtgggagggtggctcttggtagtgggagaacctcctggaggtgggatgacagaggtggagcttcagggccagaaggtggctctgctggaggggaagcggaagcatcggagagataagcaggccttcggaggtggggatgtggcctgtcagagggggtggagcttgttctgcatggtcccacgaagaggaaggggcagtccttgtctcccgggacccaccaagagtctttgctggagaagagagcttgtgaggttgcatcctggccatgccaatcaatgtggaacgggcagtccaggtttagctgaggctggacatggcccacagtgtggaaacgatgtgctcaacagaagagggccaaggcctagcaggaatggccctccagaggggtagatcttatagatgggaggaatgcaatgggctggata

SEQ ID NO: 36437 - DNA, 940 bp, Artificial sequence
  DNA replication origin
gcgggagtttatgcaggcggttggaggtcatgtccagacggaccagcttgtgaagctgcacgaaggtcccctccgcgatgtggtcgatgaggttgtggtccagcgtgagggtgtttaggttcaccatctggcccaccgcctcccacggcagggcctccaggttgttgtaggacagatccaggtcctccacggtggacaggaaggcgtcaaaggccgccgactccacccggcggatctggttgtttccaaggatcaggtggcggaggttgcccaggccgcggagctggtcgccgcgcacctccgccaggcggttgctgtccaggtgcagggcccggagggcacgcaggtcggcgaaggcgccagctgccacctggccgatggtgttccgggagagagtgaggtgcaccaggctggtcatgttggcgaagtctcggcggcgcacggcggcgatgaagttgtcggtgagccgcagctccaccacgcgccggtcgatggcgggcggcacaaagagcaagccggtcttggcgcacagcattgtcagtgtgggcgccacgttctggcagatgcagcggccggggcagggctggccacgagatgcccccgcccagagcagcagcagaaagggcagggcagcgggcggcggcgagaggagggccgaggagaagggtcctggagccatggtgcagtgggaaggcaggaggggtgggaggtgagacctgccggggaaggagccggttacccaggcgtgggacttggccgccatgggatgtcctgctacgagtcaggcctggatccctcccctaccgcctacagctgggttccataggatggtgagaggaagccactatcagctattaacaacagattacaacacttccatgctgggcacagtggctcacgcctgtaatcccagcactttgggaggccgaggcaggcggat

SEQ ID NO: 36438 - DNA, 891 bp, Artificial sequence
  DNA replication origin
tgttttcctcagtccctcccactttgacactctccctgccaatgccagaggcgggaggggggaaacccttaacatttattgagtacttactgtatgccaggcatggtcggtggtacatgaatgaagatggtacaattatcatcccaatttacagattaagaaattacagcctagctaggggaaatcattggcttgggggtcacagagctagcaaaaggggaatcaggatttgaacctgagtctgtttgatttcaaagtacttactctcaataatagggcactgttctatgcctggtacatattaagcacttgatgatcatgatgatgattgctaacatgtaataagcacattttatatgcctggcactattctaagtatgctatgttcatcaatacatttaatcctcacagaagtaaggcctgtttctatctcccttttacagatgaagaaaccgagaatcagagaggttcagatacttgctggaggtcacacagctagtaagtatcagagctgggatttggagctagggagtatggcttggatagccagggccttaaaccatagttaacagtgattttttagacaatttagtgggtactggagggcccaggttgggccaggtgtcacccctctggttgggagatcatgagaggtttgggagctactacaggaggggcagaggtgagggtgggacacgcaagtagggacaggggtattctatcaaccagtatagagatatttttatttttatttatgttttaagatggagtcttgctctgtcgcccagactggattgcaatggtgtgatctcggctcactgcaacctccacctccctggttcaagcgattctcgtgcttcagcctcccaagtagctgggattacaggcgcc

SEQ ID NO: 36439 - DNA, 1931 bp, Artificial sequence
  DNA replication origin
accagtcggcgccccctccccccttgcggcggcggtggcggcgggcggcgcggagggcggagctcggctgcggctcgggagggagggcgggaggcgggagggaggcggccccgcggcaccgcgccccctcccccggccctccccccaccatggcgcggagcgaggcagcggcggcggggccgggcccggggcccccccgggctgggtgagcgcggcctgcagcggcccgggagcggcgggcgggggcgcgggtgtgtgcgcgggtgtgagcgtgcgagcgtgcgagtgtgtgtccgtggcgctgcggcgggcccggcgtgcgcccgcgcggccctatgtgtgcccggtgccggcgtgtgcggcgccctgcccgtgtggccatcgggtgtgcgcggggtgtcgagcccggccggcgtgtccggctgtgcacgcgtgtccccccgagcggccgcccctccggctgtgtgtctgggcgctgtcgcgcgcccatcggaggggctgtgtgcaggtgtgtgtgtgcgtgggttgtgtgcccaggtgtgggtcccccccaagcccatgtgcgtgcgcgactagctgctctgggtgtttgtgtccgggttggatgtccatccccgggtctgtggagccgggtgtgcccgctcgggtgtccatttgtgtgtgtgtgtgtgtgtgtgtgtgtgtgtgtgtgtctgcgggttgtatgtctccgagggtgtgtatctgtgagtccacggcaggttgctggcttgggggctgaggctcggcgcccaggcctcggtgtggatttgggggaggggagttcgccgctccctcggtccatgtcaactggggggtccttagcggtcctgggggaagcggccatgtcttccccttcccggtggttgcgggggggggatgggcggccaggaggtggacagatggaggggggatgagaggccgagaaatggacagatgggccctgaggtgggggttggggggcgaagacccggcccttccccacccactccaccctaattcccccaccggccagacatctgcagacggagccagagttacctccatcctgatggccaggctggggaacctttggggctgctggtgggaggatctccttgaaacggtgatctaggactcaaacccccaaatcctcttgagtttccacctgctgaactctgacctctggcctggcttttgccctggttttttgggggtgtggagggcaggatgctgaatgtgctgcagggatgttaggatttcttgggcctgggaagtaagtaggtggggtggtgggggggtgcctcagggctgggaggaatgtgtgtccaagactgtgtgagtgtgaatctgggcctgtctactgactgtgctactgtggttcagtattttctatgcatttggaagtgtgtaaatcacaggactgttgtgtgagcatgtgtctgttatgagtgaacatcttggcgtgtctgcaaaggtggatctttttgtgcctgtgtgcgtgttccagtgtggatcagcctcgtatctgtatgcttgtggttttgtgtgtgtgtgtgtgtgtgtgaggtatgtatctgttagcgtggtgctgtatcaactttgcaacatggagatgtgtgaagtatgagtgtgtctaggcatttaagagtgtgcacttgtgtatgtttgcacaggtgtgtgtgtgtttgttagatgtgtgtgcccctgtgtgctggtgagtgtgcaaggtagatctgttgtaaatgcatgtacctggttgtctgttagggggcacatgagtttctctgttgtatctgtgcatttgtgtgtgtgaacttgcatggcagagtcagtgttgtacatgtattgttgcatgcaggtgtgtcaaccttgagggtatgtatccatctatgttgtgagtctgtttgtgttttggtgttggtctctggggg

SEQ ID NO: 36440 - DNA, 1453 bp, Artificial sequence
  DNA replication origin
ccaggcatggtgggacatgcctgtagtcccagctactcggaaggctgaggcaggagaattgcttgaacccgggaagcagaggttgcggtgagcggagaccatgccagtgcactccagcctgggcaacagagcaagactctgtctcaaaaaaaaaaaaaaaaagaaaagaaaaaagaaaaagaaaagaaaaattagccgggcgtggtggcgcacacctgtaatcccagctactagggaggctgaggcaggagaattgcttgaacctgggaggtggaggttgcagtgagccgagatcgtgccactctactccagcctgggtgacagagtgagactttgtctaaaaaaaaaaaaaaattaggaaaggggtttagaggaggacctctgtacagtgggatccaaaacgagaagggtttgagaccccaggaatctggggcactgcatgaaacaacacagatttttaggggagaagttgctgggtttagggaccctgtgaatatctcagaaagagaaggagagtggcctgagatactcagtggggtttgagggaaggggtggggttcagctatgggacaggggatgggcaaaggggtctgaactaggaaggagcaaggcattctgggctctatggaagtcacagggaggggggactttcagggtccaagagaaagaactggagcaagaaggaggcagggtcctcaagggggcaggactagtagggggtgggaaaaaattggggctaattggggagttttggaaaccaaaggatgtcttggaggagaaggagagagaaaggtgtaaggtcaaaggggtggaagatggtttggggtctaatggggttcatggggaaagtttaagggtcttccatagggataagagacattttagggccccctagaagttaggcatggtttggagttcatactgggggtaagggaatgggttagggtccttgagggtagaaggacatggctgggggtccccaagaaggagtggaatatgatttgtggttctggtggctgtagaatgtggtttgggtccccaaagggagtcaggcaccatctgggatttggctgacatatggtctgaagtctcccccgatgttagggtatgatttggggtccgtgagggaaggggtgtggtctgggggtctatctgaatgttgggatatgatttagggttgctggtggggtggtctggatccccttggatgctgggatatgatctgggattcttctgggtttgggggcatggtctggggttcctgacagtgtgtgggtcatagtctgaggtcaagcaggagagcagggcatgatttgtggtcctgggtggccctagaacatcgcctgggttctcaaaagaggtgaggcctgatccgaggtccccctgggtattaggacgtgatgggaggtctctgtagggagatccggggtccctaggccagttggggcgtggt

SEQ ID NO: 36441 - DNA, 1844 bp, Artificial sequence
  DNA replication origin
cgccgctcgggcctcctcaggccaccgccgccgccgtcgccccctctcgggcccgcaagctcccctccctcctcccgcaccgaccaccgccgccgccgccgccgccgccgtcgcgctgcgtcaccgcgccgtgcgtcaccgcccctggccccgccccgacgggggccgccgcgcgccggcattagctcacgcccgggtgacgaacggcgcgccagccaacgggcggcgagggcagcccgaagggcgggaggtgtgagccgagtaaggcggggtcgcggcgaggggggagcgacggtggtggaacggggcccaagaggcccgccccctcctcggcgggattggtcggacgtgggggtgacgggcagtcggccaggcctggggtttggggctggggggcggggaaggggcggggcgcgcggggcgttgcccagggcaacgggcccggcggagtctgaggttgggcctccaggcccgcagggggcaggctcgcgcgcgtccaccccagctgccccgagcgaagtcacagttcctgattcaggcgttccaggcctcctcttccccgccccttgggtggcccgcctcacccaaggctgtcctcagtgggcgtctgcactcgggcttctgggcgctcggctttctcatcgcgctgttctcagccttgccgcttgctctctccgatgggaatggcgaggcgagatctagcctttagggtgggaagagaatgcacagaaagcgctaaggatcaaggaggctgtcaataaacgggagttgttgctgtgactttggttgtgatctgtgcgttccacaaactgtattgggtccgggtgaactaatcagagggacctgtgttcagaaggctctcggtgacagagatctggcttgttacaggcacttagagaggcagtcgggatggagggtcgagttgaagacagggaggggtgaggaacgagcagaggccagttgtttggccacttgagggagtttggacttgtcccgagggcactagggagccgtgaagggcttcaagccggggaggatcatggtgagtctggggttttggagagatgtctctctggcttatacatggagggcggattggagggaatgaaacgggatcgggagtccagggaggcagctgggggagggggtggggaagaaagagggggtttgcacgagggagggactgtggggagggaaggaggtgcaggtgggagggacgccctggaggcagagcgaacgggccctgacactggctggctatggagtggaagggggagaaaagtttaggaccaggcccctctagccgggagactgggcgccagaagcaggttgggaagatactaagcccaatgtggatgcctagtagcgaggtccaggaggtgcacaaaccctgggtctggagcttaagggagaaattgaggctggagaccaagatttaaggatcgtcaaagatggtaattgaggctgtgggagttaggggtctagcccggggagggtatgaagggtcactggagacagggactgaacagaaccctgaaacagagaggcaggatttgagcaaaggaattgacgctgtcgatgaatattgcaaaaggcagccagagagaggaaaaccaggagagtgtggcattatagacgctttgaggaaaggctgtttcaccagggtggggccatgtcacaaaccccatccactacctcctgcatttaagcaacagccttcacactgcatagaattattgtgctcattaactgctggttcattaattcattcaataatatttcttgactatctaatatgtgccaggctctgcttaaggtgctagaaacacaacaataggatgagc

SEQ ID NO: 36442 - DNA, 1994 bp, Artificial sequence
  DNA replication origin
agggggcggggaaaggtgtctctcaagaatctttacaaggaaacatagaggctcttgggcaacgagtctggagaatgttggggacctctgaagggataatgggaaaagggggccccctgagaaaggtctctgagttgacttcagaggaaagagaatggggaaatgagagggtgtaaatagcaattctaaagttagtgggtaaatctgatagggtcctaaataatgtttcttggggatgtcagaagtggaatctgagggaaagttctgaggaagtctcaggaagcgctgggagtgggtggctgatggagggcaatttgggagaaaattctctaaaaagtgtctgaggaaggtgtggtcttctgagactggtcctggagtgggatgacagagggatgtttttaggaaaaactcttcagagatctcagttgaggagaaagctgagtaaagtctccaaaagagtatatggggaaggcggggtcttctgagagagtgtcagaggagagggtttttcagaaagaattataggactttctcagagcaagagctcgggttattttgggggaaaattaggtgtgtgtgagggtcttcttcaagggattctagaggatttaggggacctgtgtgagcaagttcagggagggatatctctagaaaagtcccttagtaaggcagaagtattgattcaaggggttctggtggtgtcaggaaggtcttggagggatttcaagaacatacgtcaggagggctccagggggtcgctggggtctctaagctgtgtgtgtgtgtggggggggggggtcctgaaaacctgcatatcagaggggtcaccaagagaatcttacggtcttacaggggttgtgaggaggatcttcagaaaattcctctaaaaccggtctgcaaggggggattctgaggtgttagtgaaggggagttctacgggatctgagagaaaaaccatgaggaaagttttcaggatccttaaacaatttttggagcgtgtgatgtgggggactggaaaagatgtggagtatgtaaaagggattttggaagaagcttttggaatatgatgctgagagtcctctggagatttcaggcaattgctggagatttttagaatgagtgggggtggggaaggggatcccggtgaagatcactgggctacatgagggtgatctctagggcattttagggtggtgagaccagggggagacaggaggcctctgggggagacttttgggatctgtggaaaggtccagagggatacgtgaagggggagtgtgtatgagagatggttgcaatacggtggggagggggatggagtcttctaggtgagtttttgggatctgggggcatttcacaaagtctgtgaggaagatttattttggggatatgggaaggagatcttcagggaagatgatcacggtccgtcgggggcattctgaaggacttctgggagggggaatcagaaatgcagggggtatgagcggaaaatctccaaggaggtttctggaatggggtaagtgggagggaaaattcttaggatccgggagggggaagtcgggtgagcctgttgggctgtgagaggcagggctccgggggagagttctggaatggacaggggtccggagggagccttggggaggtgtgcagggctcgtgagggaggctcctggagcagctatgagagccacgctgtggaatggacgaggagtggcctccgaggactatttctggagacaggaggaggacgggggcttcggggccaaagggcgggggtctgcgaggaaagctgctgggacccatgaagggctcgaggaggcgactccacgggaggggtgggttttgcggggacctttcagggcgcacacgggggatcggcaggctttccggggctctccgagggggatgtgcggggggtcctgaggagaggcccccggcccggcccctcggcaatcccgagggcatgagaaagatttcggagggaagcttcggcca

SEQ ID NO: 36443 - DNA, 970 bp, Artificial sequence
  DNA replication origin
ggagaactgttttgagtggacagtgaagaaacccttgtacatgtcccatctccttccagggggtacccttggggcagatgaggacagaatgtgtgatggaggtttatgttctctcctacaacttggggttgttggggaaggtgaggaaggggtggacagataggccccatctatgtaaattaacaccctgccttctgctctctcatagctgggcattcggctccaactcgctccccatagctggctctgtggggatgggagtggcccggcgtacccagcggcagttcccaatgcctccccgggccctcccacccggccggatgggcctcctgagcccctcgggcattgggggtgtctcccctcgacatgccctcaccagccccagccttggaggccagggccgacaggtaagctggctggaagcaggggcctggcctcctggggttggggtggcagtacctgggatgtctatttgcctgtatactctgtgtctggacccagcttagaggtggcgggggtgggagtgggagaaggcctgtaccacctccaccactcttgggtctgggcctcttctgcactcactactttctctcttcctgggacctgtgtagaacctgtggtttgccaaccctggaggcagcaacagcatgcccagtcagagccgcagctctgtgcagcgcacccactcgctcccggtccactcgtcaccccaggccattctcatgttccctccaggtgaggtgccccacccttgggactctgcctggccaacatcctcagctgacctttcttttttctcctgggtctcatgtccactgttcttctagactgcattggcacctctccccatacctcacaccactctgcacccatctcccccaattgtggggggttgttttcctcctctgcttcaattttatctctcaggtcttgcccccacccctctgagtcatcatctctcaccccttac

SEQ ID NO: 36444 - DNA, 877 bp, Artificial sequence
  DNA replication origin
ccaggccctcagccctcccctcagatctcgggcgtcccaggccagaaggaagttcatggcaggactcctccctgctccctacgtagccagcgggaaaatccgcggccccagcggcggccgggaatcccctctggaatgacggtggggaaggggatggccggggtccccccgcggggcgctggggccagtcctgggcgggcggggaaagaaggaaaggggcggaaaccagagaggctaaaaatacagccaacacttccggcctagggggaggggaggggagagcagagtttccagaaaaacaagcggggacgggaaacgcgggggtgtgagagctggccgagtgcgcgggcgagctggggatcgtgtacccgcggcacgtgtgctcgcgccgtgtgtgcgcctggcgcgattgcctgggcctgagcgggcgtggccaagggcggcgctggccgtgtgtaccctggcctgcgactgcgtgggcggcgggcctgggctagccgtcatgtgtacccggttgtgtgaacagtatgtgtgcttgcgggtgcaaaggtgtgcgccttggcatctggggctgcgagagcctgtgtgcctgggtatgcagtgggggaacgtgagggacacgagtgtgcccagtttcctgtgagaaggctgtgtgcatacaatcccgcatgacttggctgtgtgaatcaatgtgtgaaaccgcctgtgtgatcgactgtaccgtgtgtactttggccatctctgggtgtggggtggatgctctgttgtaactgtactgcaatttgtctctgaggcggcattcttaagaacatgagattttcatccccacctgcatatctgtgcgtagctctgagccactgtgggatctgcagtgact

SEQ ID NO: 36445 - DNA, 1187 bp, Artificial sequence
  DNA replication origin
cgcaggccagggtacacacggccagcgccgcccttggccacgcccgctcaggcccaggcaatcgcgccaggcgcacacacggcgcgagcacacgtgccgcgggtacacgatccccagctcgcccgcgcactcggccagctctcacacccccgcgtttcccgtccccgcttgtttttctggaaactctgctctcccctcccctccccctaggccggaagtgttggctgtatttttagcctctctggtttccgcccctttccttctttccccgcccgcccaggactggccccagcgccccgcggggggaccccggccatccccttccccaccgtcattccagaggggattcccggccgccgctggggccgcggattttcccgctggctacgtagggagcagggaggagtcctgccatgaacttccttctggcctgggacgcccgagatctgaggggagggctgagggcctggtctcctggatctgatcgaggacaggctgggggtctcccgggtctgagggaggaggagttaggggcctgaaccgctggatctgagggaggaggagatgggggcctggacccctgggtctgagggaggaggggctggggtctcgggggacctgaggatctgagggaggaggggctggaggcctggacccctgggtctgagggagggggggttgggagtctcccgggtctgaaggaggaggagttaggggcctggacccctggatctgagggaggaggagctgggggcctggacccctggttccgagggaggaggggctgggggcctggacccctggatccgagggaggggggtgctgggggcctggagtcctgggtctgagggaggaggggctggggacccagggccctgggttactgcgagggaggagggactgaggccttggctcctgggtcccccaggtctgtgggtttggggaggtggaggaccagtccttctgcgagcaaagcatccccctcctttgagagtggccctatcccaaaagtcctgactcttggggccgatgactcagcagatgggagagaggagggggacagcctgactcagggatgggaaatgctcccggtctccagggagtagaaactggaatccctcctccaggattgatcgcagcccgagctgagccgggctccgcgaacccaaggatgcccccaacccccc

SEQ ID NO: 36446 - DNA, 991 bp, Artificial sequence
  DNA replication origin
ctggtctgagcgggaggcaggggccccaggctggagggcgcggcgctagggagccccagttggagaagggaggcaagcgtcccgggctggagtttgcggcgctagagaggtggggactcggactcaggcatgcaggtaccggggatgccgtgcggcggggactcacctcgtagatggcagtcagatccatggtgtaacggttggccatgaggggtgtcggccgagagtgggagcgctgaagtcaggctgaggctggcaccgagagccggctacttataggaaactgcaagcacggggcggggccggggccggggccgggggcggggcaggaggggcgcttcccggacgcgcgcccccggcgcagcctggctggccctggactggttcccttccgcccggccctgggccaggacgcgcctgagcttggccggtggacagccgtgaccgagcggggaatgcgtggggaaggggtgggggtgcggatggggggacgcctgcccagttttcaaagctggagactgaggcttgtagaaggaaactggggcggaggtgggggcagggccccaggggcaattgacaagagcagaagcccgatgggggtgcgcgtgcgacacagacggatgggggcggggagagacgcagaggggtacagacaggcagacaggcagagagaaaaacatcgagagagacacacacaccaagagacatacagagagagatagacagggtgaggaagggagggaagacggggagacagagacagtcccagagacagattcagagggagaagagggttgggaggatcacaaaaagaaacagaaaggggctgagcgcagtggctcacacctgtgatcccagcactttttgtgtttttctttcctttttcttcttctttttttttttttttgaaagacggggtttccctatgttgcccaggctaatctccagctccggggctcaagcgatcctcccacctccgcctcccaaagag

SEQ ID NO: 36447 - DNA, 714 bp, Artificial sequence
  DNA replication origin
ctggaccaagagggggaccccgaagtcagggcgcaccactgtttcccaattttgggtctcttgtcctccccggatatgacccacgcgtcgggatctccagtttcacaactggagaaaccgggcaaagttgacctggaagtccggattgcttcggttttagggttctctgtctctacggtcagggactggagagacagaagtcggatccccccaccctgagacttcagccccagagacgcctccgcgcaaaaccacgccctcagcaacgactaggggtgagccaggtatgggggccacttccgcctccaggcagcctcggtctgagaaaagttctccgactttccacttgcatgggccgccccacccatgtttgagcgaagagccgggtgtcgcgggttccattttcacctccaaatcaccaagctggtctgagcgggaggcaggggccccaggctggagggcgcggcgctagggagccccagttggagaagggaggcaagcgtcccgggctggagtttgcggcgctagagaggtggggactcggactcaggcatgcaggtaccggggatgccgtgcggcggggactcacctcgtagatggcagtcagatccatggtgtaacggttggccatgaggggtgtcggccgagagtgggagcgctgaagtcaggctgaggctggcaccgagagccggctacttataggaaactgcaagc

SEQ ID NO: 36448 - DNA, 1146 bp, Artificial sequence
  DNA replication origin
ctgatgctctggcgaagcacaggagggtggcccggggccgccaggtcttcgctagggttgtggatgaagtggcagcgagagccgtaggggcagcggccctggaggtagaacttgtgacagagttccgtcttgtatttggggtggcgattggcctggcgcagctcgcccaggccatgggcaaactggcacttggccccgtagcggcagcgcccactctctgagaaggtccgacatagctcagtcttgtagcgcgagggggtggtggaggttgcagtgggcgaagtgggtgagggtgacagctcagggcccaggcggggagccagcggtgcgaagccagggggtgggggcacccagccacagctgcggccctccactaggctggtggagcggccaggcaggcgggaggtgaccccagacgggctggagtcggaggggctcaggctccagggtcccgaggagccccagcctgggctggactcagtccctccatggtcggatggcacgggcacgtcagggctcagcgacaggaggctctgcggaaatgggtcggttaaggcacctgaaaatgcagggcgacgccccaccccagctgcagggaactagagcttgccaggccggtttgtgggctccccgcctgagccccacccgcccgcagaaacccctgggttccggatgccaggaacccagagttggaggttctgagtttacccaccaccgaggccttatcccgagggacccaggaatcccggcttccccggctggaccaagagggggaccccgaagtcagggcgcaccactgtttcccaattttgggtctcttgtcctccccggatatgacccacgcgtcgggatctccagtttcacaactggagaaaccgggcaaagttgacctggaagtccggattgcttcggttttagggttctctgtctctacggtcagggactggagagacagaagtcggatccccccaccctgagacttcagccccagagacgcctccgcgcaaaaccacgccctcagcaacgactaggggtgagccaggtatgggggccacttccgcctccaggcagcctcggtctgagaaaagttctccgactttccacttgcatgggccgccccacccatgtttgagcgaagagccgggt

SEQ ID NO: 36449 - DNA, 995 bp, Artificial sequence
  DNA replication origin
gggagagggttcattgcctcccttaaatatgctacaattttttttcccccaagaacctcggaagacactccatcccccaccatcatgaatactgagcttgcacacttggggacctgccccagcgtgaggtcaggggagtgggttaatgcattctggaaaaggggattacttgattactgtcccccaagtccccacagccctggggtccatgcagagaccacagtgcaagagacgtggctccccgctgagatccagctgatctgaccgggcagtcactttgtcactcagaaacagagatgcgattgaagatggggagtcgccggggggctgccacgggctggggtggtgcaaaaactcccgcctcgaagacgggagagtcagagccccccaggctgctgccgctgctggcatattcatcagggtcggatcccagggactgtacagagggggtccgaaccaggccacccaagggcccccagacgctgataggagtggcccttcggcaggaggggcaacagactggggtggggtctcttcgagccaggggggtgccaggggcagcagagaaggcagagggtgacagtggaaggtccccaggtggtggtggggagctggagggcgagaaggagctggaggacagggaagggccggccaggcctggtggtggtggtgaggtccggcggccagagggcaggccggagaagctgatgctctggcgaagcacaggagggtggcccggggccgccaggtcttcgctagggttgtggatgaagtggcagcgagagccgtaggggcagcggccctggaggtagaacttgtgacagagttccgtcttgtatttggggtggcgattggcctggcgcagctcgcccaggccatgggcaaactggcacttggccccgtagcggcagcgcccactctctgagaaggtccgacatagctcagtcttgtagcgcgagggggtggtggaggttgcagtgggcgaagtgggtgag

SEQ ID NO: 36450 - DNA, 717 bp, Artificial sequence
  DNA replication origin
taattattataagtagactataatatatttagtaatatatattattaccttaaaagtctatttttgtgttttgggcatttttaaataaacaatctgagtgtaagctgggatcctggcttcttcgcggtctagagacaggaatggagagggagggggtgactttttggaagctgggtgcagttaactcttcctctccgagccccgcggcgcttacctggcaggaagtgacgtcaccgggcctggccgttcacctgaaagggtgggaccaggtgaggtcaccagatgggaaccgggggagccagttcccgggcgtcgggggcgccgcgctcccgtcctgctgggctccttgacccagcttcgggcgggtgcggtcggggacgggatgtttccgtccccacggggccgcgggaggcgggaggggccgggtggggaggacggaatgtgctggggcgcgcgcccagagcgagcgggggcgggcgcggggcggggcagcctggggtagcggaacccgtttcgggactagaggttccgggggggcttcgacaccttctggatgttggggaagcgggtttagggtctcaagaggctaggatctcaacatttgggagtcacaggttgcatcccctagcgctttagactctagacccctggtggctcggagttgcagatttctggccacccgggaccctggagcccgggaattaccgggtcttggca

SEQ ID NO: 36451 - DNA, 1923 bp, Artificial sequence
  DNA replication origin
cccatcagtttttataaacttacacatctaataaaccaaccaaaacatctacatcacttagatgaatgaacgtttctatcttttgaattattgggctcaaaagactcctagggctttggcgacggtcctttgggtgttctgtattgtagggaggtgccgtttccgtcccagccaccaggtgggggtatcgtctcttattagatgctctgggcatggaattgtgtgcaaacagtttgacttctgtagagatgtgggtcctcggcaaactgtatatgactctgcctcctctgtatttctctgtctttttaatgcctcctttacagatgaacatagctatctgtcttggagttttcgacctctgttgaaaaggaaaactatgtttttgagtcgacttgttttttcaataaatattgaacattcactatgcctggcttcctttagctgtgtgtaatacagcagtgaacaagtagtccctgcccctgaggacgcgacattctagtggggaggcagattgctgtcaacataagaattaagtacattttaatgttaggtggtgatgataaatgtcatggaaaaagtcgagcaaggtagggaggatggggtagttggaggtggggtgtggattgcaacagcagtggtcagggaggatctcacagagaaggcaacttttgagcagagacatgaaggaggggagtgagccatggggacaccaggggagtgttcaggcagagggaacagctagtgcaaagctcctatggatgaagcagaccagacttggtagagcagctaggaggccagtgtggctggagcagagtggccaagggggagggtaagcgatgggtgccagattgtgtgggctgtggggaggacttcggactttgacttttatgtgacctgactcaggtctcataacaggcttcctttggttgtctcgtgggggagtggagaaaggagagactgaaggcaggggctagagcagagactggggctggggctgctatgaagatgcaaatggcagacgatgttggctaggaccagggtgggggtcatggtgggggcaggtggatagtggatctattttgcaggtggatcagacaggattgctgttggactggggtgtggatttgagaacaaggtgtcaagggatactcctgggtgtctggcttaagccctggtagatggtgagaagtgccgttttcttatatgagggattttttggggaaggggcagagaatcagatctggctaaaggaaggaccagagatgttgttctttcagtctccaagactgtttctgcaaatgtctcttcactgcttgctcttggtctctgcccctctgctgcctttgcatctcaggggttctgactccctctcgcctgatcctcttctacttattagggcctgagccctttcccacaagggaagcagtttcctggaagaggagaccaaatgtcagtgagcaaggggagtgggccaaggaggcctgagagcaggagggaggcttgaggagggtagagagaagggagaggagggaaaggggcttcagagggagagagaagaggagaaggagtaaggctagggggaggaggggaagaggacaatggggagtgggagggcaaggaaagggtggagagggaaagaaggacggaaaaagggagagaagggagacgggaaggaggagaaagggggtaagagacggcaggatggggaggctggaagtgggagaggagtaatgagggaggggacaaattggagggggagagaagaacagaaggcaaagggtgtagggcggggcagaagggtgcagaggaggaagtgaaaaagaggaggaagggtgagggtagggaaaggagagaagagggaagtgagagggaggagggaggagtgcggggcaaggagaaaaaagaggggtcgcagggggcgaa

SEQ ID NO: 36452 - DNA, 766 bp, Artificial sequence
  DNA replication origin
ccgactgcgggaccccagtctccgagagaccccagattctattcctggagcctgagagcccgaagttcacgcccctgagtctgggctccgcacctccctggggaccgcgtcggggtcgcgcaggagccgggctgcctcgagccggggctggaggctccccgggaggtgaggggggaggcgaggggcccaggcggactgggggagggggcggcgccactgctgaacaatgagggggcgtgccggcggggggcgagccgaggcgccggcgggagttgggggctggaggggtgtgggaaggcgctggggaggctgtggctgtggggacggcgatcggggttcggagagaccggccggagggggtgcgagggctcggggccagcgccccagcgcgcagccctcggcgggggagggagccgtctgcaggaccctggcatccggtcccccagcctccgccctcccctgggaccccgcggcctcccgcccacggcttttcccagccctgcccctcgccctccgctccagctggagcccaaacgttcccaggatccctaagcctccggccccagacaaacgggactcgcagcttctgcgcctcctgctccgctcactcttctttgtctcagcctttccatctttttcgccaggttctctctccttgtccccttctttctgtcactttgtgcctcccccattagttactcccaggggcccctccctggatttacaccacgctcctaattcccagcccccatctgtgagtctgggc

SEQ ID NO: 36453 - DNA, 1457 bp, Artificial sequence
  DNA replication origin
agggagccgtctgcaggaccctggcatccggtcccccagcctccgccctcccctgggaccccgcggcctcccgcccacggcttttcccagccctgcccctcgccctccgctccagctggagcccaaacgttcccaggatccctaagcctccggccccagacaaacgggactcgcagcttctgcgcctcctgctccgctcactcttctttgtctcagcctttccatctttttcgccaggttctctctccttgtccccttctttctgtcactttgtgcctcccccattagttactcccaggggcccctccctggatttacaccacgctcctaattcccagcccccatctgtgagtctgggcggcggagaggcccatggggtcctgatatccaagaaggggctctttctgcaggactctgctgggccgctcagccatgcctgagggagcccaaggactgagcctctccaaacctagcccaagcctcgggtgtggccgaagaggtgaagtgtgtgactgtggcaccgtgtgtgagactcggacaggtgagcctagaggcaggggcggcggagcctgtggggcttttattccttggcaatgctgtcaaggcagggtgatggagacaaccccaggccaactcgcacaaagctccgagtctggtggggaaggcgggcccatccccaggcaatgacaggccagagggggcagcgctgggcagagtggtcagggctgtgatcgtggatcctctgagctcggaaggtcaggggaaggttcctggaggtgggaacatctcaactgggaagtggaagattagggggaaggagttgcgcaaagacaaggaagagtattctacatgcaaggaacagcatgtgcaaaggcccagcggtgagaaaaggctgcatgtaagtgactgaaagaagttgagtgtcactggcatccagagtgtaagaagaggggtggctgtgggaagagaactggctagagggatctgtgttggccacattgcccagtgccctgtggatctgaggagtttggactttatccccaggggcatgaaggggttacactcacgggagtaatacagtcagatagacaaattaataaatgtctacctagctgattcatggaggtggattagagaaatggaggccagaagtccagagaggaccctgatgggagaggatgggactggaccaagacagggcagtggggagaggaggaaggagcctgtgggaaagctgttggacaggtgtgggtgagggtgtgggctgaacgcatgaaaggctgtggaagtccgtgcatggggagatttctctgacctcctgttccacaccccagcagctcctgcagcccccaccatggcctccccccgaggttctgggagctccacatccctgagcacagtgggctctgagggggatccagcccctgggcccactccagcctgctcagcctccaggc

SEQ ID NO: 36454 - DNA, 1603 bp, Artificial sequence
  DNA replication origin
ctttatccccaggggcatgaaggggttacactcacgggagtaatacagtcagatagacaaattaataaatgtctacctagctgattcatggaggtggattagagaaatggaggccagaagtccagagaggaccctgatgggagaggatgggactggaccaagacagggcagtggggagaggaggaaggagcctgtgggaaagctgttggacaggtgtgggtgagggtgtgggctgaacgcatgaaaggctgtggaagtccgtgcatggggagatttctctgacctcctgttccacaccccagcagctcctgcagcccccaccatggcctccccccgaggttctgggagctccacatccctgagcacagtgggctctgagggggatccagcccctgggcccactccagcctgctcagcctccaggccagagccccttccagggcctcccatccgcctacatctctctccggtggggatcccaggttcagccagaccctcaaggctggagcgtgtggcccgggagatcgtggagacagaacgggcctatgtcagggacctccgcagcatcgtggaggtaaggcgggcagacaccagagggcagtgggtacccaggccagccccttggcccccataaccccagtcatcccaacaggactacctgggccctctgctggacggcggggtcctggggctgagcgtggagcaggtgggcacgctgtttgccaacattgaggacatctacgagttcagcaggtcaggggcaggggggacaggcagggggcattgattggttggagggtctatttcctaatccaaacctcggagcttcgtagtgtcctgtccaggctggtacgtggggttgtgacattgggcaaggatcagggatcacgactgggagggaggaccccgagtgagggaggggcataggggatgggaggaccccgagtgagggaggggcatagcggatgggaggaccccgagtgagggaggggcatagcggatgggaggaccccgagtgagggaggggcatagcggatgggagtcagaggacctggatgaagcccaaacactgggacagggtcccggcatcaggacgagtccttggggctgtgtcaggtctgggctcacgatgaatccaagaatcatatggggcctgaaggccgagacagcgtgagcatgcgagtgaccccctaagcctgatttgcctgggacttttccagttttagcactgaaagccctcgtcctaggaaactgctcagtcccggacaaaccaggatggttggtcactgtggtaaggaggactctggggtccaaggatcatgacatttccaagtaccttgacgaggtctcgggattacagcaggaacttaagatcatcctagctctttgggtcatgatataacacccctaggctcatgccagcactgacacaagttcaagctgaggaatgagaagctgtccagggacaaagtctaagcaggttaccatgccccgtgtagccctcagaggacccttcctccggacatgacatccccttaggagatgctggcagtcagcaagcccccagccccagcagaccattggggcctcagcctcctggagg

SEQ ID NO: 36455 - DNA, 902 bp, Artificial sequence
  DNA replication origin
aaaatacaaaaattagctgggcatggtggtgtgcgcctgtaatcctagctactcaggaggctgagcaaggagaatcacttgaacccaggaggtggaggttgcagtgagccaagatcgcaccactgtactccagcctcatcgacaagagtgaaactccacctcaaagggaaaaaaaaaagctagggctgtgcgcggtggctcacgcctgtaatcccagcactttgggaggccttgcccaactcgtggggggtccatcctccagatgaaccaacaggtggtcaagggacaggacctccccctccccagcctggctccaggggccccagctgacctgcagcagcagatggtacttgagaatgcgctggacaggtttcagcaggaagctctgcaggggcagcgagtggcgaagctgggcctggcgctcctgcagccacagggctgctggcggagacaacgacagctcccggagcagggccagggagctgggggcacagcacaggtcagtggggattgtcagttccagtgggcggggtcaagaggggttagggaggggccagggtttgggaagggtcagggtctgacagggggcggggcagtgagggagaggtcagttactgtcacagcctggcaggggtcggtgctggatgggtcgggggtagagggagggtgacgggtgactggcacatcagcttgtgggcacagcctgaggcccagcaggggctcctgcccctcacctcgggtagttcatgcagtacaatgtgtagatgtcaaaatcctcgctctgcgggtgacatgggagtcagggagaccccaggtcctggcttcccacgaccccccttccagcctagcccaagcctgctctcccccctctacaaaggccccatccaggaccgagagccccc

SEQ ID NO: 36456 - DNA, 1753 bp, Artificial sequence
  DNA replication origin
ggccattcgccgatgcagataccaggagttggaaggccgcagcagttttgaggcctgcgttcagtgtctggacttccaggtcaagttctgagggtctatggcatctggctgaaatccttgcttcagggaagcctcatgtcctggctcacatgtggaagggggcatcaggagccccctgggccctgtgaaggcccatagattcctgtgtggaggccaagagagcagggtggttcaaccggacctgggccttggctggccgcagccgcccacccccgcccacgtggatgttaaccgtcgtggcatagctgagccgcctggctgggggaggtggtggctggggctgggggggcggcgaagatgcccgtgacgtgggagcagaggaccaggagccccgggaggctgcgggggcccctcccccaggcccctgccgccgagccaggctctggctgatatatgaggctgccaggtatctggagagggcagctgcattggggcccaggagctgacggctggaaggtgggggactatgaggtggcgtcaagtctgaagactccaacctggcaacgtgagaggctaaggagcctcctggtttggacaaaaccatggtggtctgaactggggtgggtgagaggccctgaatgtctagagagcctcctctctcaggtaaaggtgtggcagctggaacatgggcatctatgaggctcttctgctccaacgaaggtgtgagtttttggacctgtgtatctgtaaggcttggctccggaagtggaggtgcagccgctggaccctggatgtctgggaggcttccctgcttgggtgaagttgggagggcttggacccagatgtctgtgaggacttgtggcaggggcaaaggtgtggtagctggaacctgagtgtctgggagctcctgggacaaagacagtggggcgttggctgggatccgatggtccaggtggcttccatgtgcaggcaaaggtgaggtacctggaatctgaaggtctgggaggtgacatggcaagggtggtagggtgtcgcctgggccctggggatccaggctgcttccatgccaagacaaaggctggatgggttgactgcagacagggtctgggccctgaacatccctggaacctccttgctttgtcagtgggatattggttgggctctcgctgtctaggtgaccttcttgcttgggcacaggggtggtgactgaaactgtgaaatcagaacaaatctccttgggcaaagctggagtggtgggaacgtggatgtccgcacagtgtccctgctcaggacaaaaggcggtggatggagctggtataaccatgtgacttctatgctcaggcaaaggagtggtggctggaacttggatttctgggtggccttgatcagagaaagttgtaagagccggcacctggaggtgcagggggccttcttgcttgggcaaaggtgtggcggctggagcctggacatgccgggaacctccttgctcaggcaaaagggtagcagctgaaacgtggatgcccggaaggtcttgcttaggcaaattggaaacatgtagaccctggccatccgggctgcctccctgctttgacaaaggtatggcagcttgaacccagacagcaggacccagggggacagactcctgggcacatgtcagtgggaaggccagctcacataccagcacgtgtccaaaggcaggcaggagccctgaatgcgaaaagaggatcgagtcaggaccactactccagcgggg

SEQ ID NO: 36457 - DNA, 1018 bp, Artificial sequence
  DNA replication origin
tgggagggtgggaactgatttaaagaaagggcgaagggagattattaaagagccagaatgcaaagaagagctgcggtagtcgactacagaggacgcgaagcacactcccgcagccttcccttcagtccgcacacgacactcccaggccccgccccttccgcccacagagcccgccacttccgcctcacagggcccgcccgctctgagcgcctaagggccttcccgccgctgaccagacgccccgcccgttagccgcaacagaagccgtaaagctctctcccgtcgcgacgcagtgctcaaggcgcctgcgcagaccctgaaaagcggccagggtggcccctagctttccttttccggttgcggcgccgcgcggtgaggttgtctagtccacgctcggagccatgccgtccaagggcccgctgcagtctgtgcaggtcttcggacgcaaggtgagccagacgccggatgggaaggggaggggaaggagaaggccagggtctgggagaggtcggtgggcaggaatctagggggtaacatgggagctggagccggagctcacggggcccctgtttctcttgtatcttacagaagacagcgacagctgtggcgcactgcaaacgcggcaatggtctcatcaaggtgaacgggcggcccctggagatgattgagccgcgcacgctacagtacaaggtgctgggatccggcaccggcgttgagtggatggaggactcttggagacagagatgttgtagctcttgaaagctgggggggctggcatcagcaacgggatgtttagaagttgtgttgggtgtagaacagtggggtatttggcaatagagctgggcttggggttcagaagatgtaaaagctgagatggggttgttgaagattaagggtttgctttgagaactgggatgttaggaagctcacctcactggggcggggggacccaaagggtgaagggacaccgactattttttattttatttatttgttttgagagggagtctcgctgtgt

SEQ ID NO: 36458 - DNA, 1343 bp, Artificial sequence
  DNA replication origin
agccgggcgtggtggtgcatgcctgtaatctcagctactcaagaggctgaggcaggagaatcgctttaaccggggaggcagaggttgcagtgagcagagatcatgccactgcactccagcctgggcgacagagcaggactctgtctcaaaaaaaagaaaaaaaaaaaacaaaaaacagagagattcggccgggcgtggtggctcacgcctgtaatcccaggactctgggaggctgaggcggatcacatcacctgaggtcaggagttcgagaccagcctggccaacgtggtgaaaccccatttctactaaaaatacaaaaaacgaccagggcgtggtggtagacgcctgtaattccagctactcgggagcctaaggcaggagaatctcttgaacccgggaggcggaggttgcagtgagacgagatcgcaccactgcactctagccagggcaacgagcgaaactccgtctcaaaaaaaagagagagattctagggtggggacggggaagaggttaattcttgggggagggtctcttaggagagggggattctaacggagggaaaactccagggaaggcagttgctgggaagaggagtctcggaagggaaataaactcaggagaaaggtagattttgagggacgggtctctgagagaaaagtttttgtggatttgcggggcggggtgttctgggaaagggggatttgccgggaaagggggatttgccgggaaagggagattctggaggagggagattccaggggtactgggtcctgacaagagaaagattctgggaagggtgactgaggggacgaggaccgaatggagggagattcagggaaaaggggggtctaagttgagcactcttaagagggacatttggggttggccatctgagagaaggatgggaaacattctgggaagaggaaactgaaaggaaggacattctggtgaaagggagattctgaggggaaggggctctgaggggaaaaggattctgggagaggatccccaaggagggggattctagggaggataggattctggaagtccttaatctgagaatccagccagatttcttgcagtagattccaaaggaagattctgatgcgggggattcggggaggagggagtccagaggggagaaagattacaggtgttgggagggtgggaactgatttaaagaaagggcgaagggagattattaaagagccagaatgcaaagaagagctgcggtagtcgactacagaggacgcgaagcacactcccgcagccttcccttcagtccgcacacgacactcccaggccccgccccttccgcccacagagcccgccacttccgcctc

SEQ ID NO: 36459 - DNA, 850 bp, Artificial sequence
  DNA replication origin
agcctcttgagtagctgagattacaggcatgcaccaccacgcccggctaatttttgtatttgtagtagagacggggtttcaccatattggccagactggtctcgaactcctgacatcaaatgatccactcatctcagcctcccaaagtgctgggattacaggcgtgagccaccgcgcccagcccctagaatctctttctccagaatctcccagtcatctttttcctctcccccaaatcaccctccacttaagcctcctccccacagaattctccatccccagccccccaaccccacctgaggaaccccaggattgggttgtcctctggttccccggcagatgtccctgcgtctcaccccatcaagagtctccccagcgaagaggttcctctctcagagctagagggagcccacagttgcctcagtttctctggcagtacagggtctgggatccagggttcaaaagggcgtcgtggtgcaccttgccaaagagggtggagacagggagacactggagggcaggtctggggccagagggaaaagccagcccggagtccagctctaaaagggtgaggggggagggggctgttgggagggaggaaggaagtacccagaggctgaccgggagggacacagacacagcccaaagaaatgtaggcacaagtggagaagaagagaaagatgaaaggccaagggagaagaggaggagaaaagggagagaccaggacagtcaagagatggacccccaaaacaagcccagtgacagatttagaggcagagaggccaaccctcagacaaaaaagagataaaggcaggcatgatgtttccaaaatacttgagacagaggccag

SEQ ID NO: 36460 - DNA, 863 bp, Artificial sequence
  DNA replication origin
gacgagagaagctggtagtgggcaagagtgggaggttccacagtggaccagggaggccaaggaacaaaactgggggacagggatatgtccctcaccaaagatatagacgacgctcacagtcccaccagctccaagcagcccagcaagccagagcgcaacttttttggcatagctgggaccctctgagcccggctgctgctgtggcccttgcgccttagtgctcccgcggctcccgatctctgcggcctgcggttgagaaaggggaggtcagccaagagagaagagaggtcaggatggtccccaccctccagtccaagaagaatcaagttcaggagccaagaggcagacacccacagagccctggacatctgtgtccctggagtagcagtcaggatgtggggctgctcagagggtcaaaaccagactgtcccgcaccaggatgccaggagttttaaaagctaacaggccaggtgcacaggatcctgaaggcaacaggactggagggtctgcagcccagaaaagcaaagcacggagaataagggatgggagggcctaaacactgggatgagagggaacggagggcacaagtggtgggggaaggggtacagacagaaccgggagttacgacgtccggctgcttggggctaaaagtagcagagttatagggtaagggataggagcggaggcggggaagggcaatcacttgtctggggcttggggaactaaggcacagaagtgatagacttggaggtcagaatggctgggtctctgtcaacatggaggcaagtcgaattggaaacccaaacgtctacctcgccaccaccaacgccacagagaaaataactcccacggccagactggga

SEQ ID NO: 36461 - DNA, 999 bp, Artificial sequence
  DNA replication origin
tcttttgggtctgtgggatttttttttttttttttgagacagagtctcgctctgttgcccaggctggagtgcagtggcacgatctcggctcactgcaagctccgcctcccgggttcacgccattctcctgcctcagcctcccgagtagctgagactacaggcgcccgccaccacaccgggctaatttttttttgtatttttagtagagatggggtttcaccgtgttagccaggatggtctccgtctcctgacctcgtgatccgcccgcctcggcctcccaaagtgctgggattacaggcgtgagccaccgtgcccggccgggtctgtgggatttaaagtaactagtgggaaggctggatttttggctgctgaggaaagacaaagtttaggaagctgatccaggcctatccttccccatcttcccctctttcctttatcctggtacaggaaccaactagaaagactagaaccttaaggagtggaagggagaagaaagaagacttccctggttttcaaggtaggtgtcttatttggctgccctattgaggaaggagccagggaatgaagacgagagaagctggtagtgggcaagagtgggaggttccacagtggaccagggaggccaaggaacaaaactgggggacagggatatgtccctcaccaaagatatagacgacgctcacagtcccaccagctccaagcagcccagcaagccagagcgcaacttttttggcatagctgggaccctctgagcccggctgctgctgtggcccttgcgccttagtgctcccgcggctcccgatctctgcggcctgcggttgagaaaggggaggtcagccaagagagaagagaggtcaggatggtccccaccctccagtccaagaagaatcaagttcaggagccaagaggcagacacccacagagccctggacatctgtgtccctggagtagcagtcaggatgtggggctgctcagagggtcaaaaccagactgtcccgc

SEQ ID NO: 36462 - DNA, 1147 bp, Artificial sequence
  DNA replication origin
gacccggcccgaaagagtggatctgcagctcgaagacgccagcgggccgtgtctgggacggagacgggcgcagggtgaggcggccgggaggacccaggcttcccgtccgccccacgctccttccccaggaccttcaggtcgcactcacccctcccctccgcattcatccctttccacgccacctcccacctggctctgacctgggggaggaaaatgagcgctaggatcacagtctgggagaggagcccggacatccgtggggagaccatggccttctggtgggggggtctcgggagtcgcagctgctggcttccaagccttatatctgagagaatggccccgccccttcaggcagctacccggccccaagggaccaagggcggggcggggggggcggtcacaggggagggggagcgtgcaggagcaacagcgagattccgtctgtggtcgtgggcacgagcgaggtcatgcgtgggtgatcccgcgactttttgtgtggctagggtggggtggggttagggggctaagcctgtgtgtgaggttgtacatgattttaagattttgtgtgtgtggtatgaaccagagctaccggagggtgcacatgactttgtcattgtgagtccacgtgggactgtgcggctcagcatacgcctggagttgtgtgtgattgacacatttatgaggttgtaaacaattctgattctgcacgcacacccgagtgggacactagaagtgtacacgacttcgtgattgtgtgacgctttgagattgtgtggctgtgtggctgcttctctgtgcgtgtgtgtttatgggagatcctgtataggcgtataaacctgtgactttgtgctctgtgcgggtgtggtagaggctgtgcaaggtggtgaatggctgagggcgcctgtgtgtgaatgagactgggtttgagaggtccacggatgcagccgcgtgtgaatacgatgaagatccggagttctttgtagacccctgtgtgcgctggtttgtgtgaatgagactgggtttgggagatccacgggtgtagctgtgtgtggatacgatgaagatccagggctctttgtggacccctgtgtgcaggcgtgtgtgtgttccccctccgcaagacaaagccaccctcccaaaccccgca

SEQ ID NO: 36463 - DNA, 895 bp, Artificial sequence
  DNA replication origin
aaggtggcagctggatggtgggcggggtttgggatacatccgcagcagtcagcgcgttccccagctccctgaagaggggtgcctggggtacatggtgggggactctagagtaccctgaagagggtgagtgggttgtgagaggggactgggggccgcgagtgacgctcaggaggggccggggtccccggctgggacggggtggggtcgaacgcaggactcacgcggcgcctcacattcgtcctcgagcggtgcgcaggggcgcagtcccggaccgcaccgcgagggggcgctgcgcggacggcagaggcgcgtgcacgcggtcccgacggcaggcggctcgcagcgcgcgcggtacgagaagcgcagctcccaggcgcctgcgcgctgaatgtcccgggcccacgggcctccggctgccaagcgccgcctgccagccacgcgcgccagcaggctccaggcgggccctgcgaggacaggcaaaggaggggtgctggggtgggcccggccgaacatggatgcatacggagcgccccggccgcattctccccgcccctcccagcgaggccaaaacaccctcatggagccctggggtccttggacctcgcgagtagaatggcagtcaccctctactttagcaaggctgcgaactccccaatgcaccctgggacctgcaatgtcgtggtcctttctagtactctaggtaacatttctctcagccaagcatggtggctcaagcctgaaatcccagcactttgggaggccgagacgggtggaccacctgaggtcaagaccagcctgatcaacatggtgaaaccgtctctactaaaaataaaaaattctttaaaaaaattagccaggcgtggtggcacgcacctgtaatcccatctactcggga

SEQ ID NO: 36464 - DNA, 1546 bp, Artificial sequence
  DNA replication origin
cctccaggaagccttctctgatgtctccaccccctgtgcccgcagatcccaaatctccaacctatttggccccaccacccactaccttgggccctgaatcgttctcagtcccgcagtaggggcagctgtggccccacacggctcctcatcatttccactcctgcatctttcggggccacccactgagcctgctctccccagtcccatccccatcacctaatcctacttcaaggccccagatgccggctggatgcctccaggaagacctccctgatagttattcccagatctcctccccaggctggtgtctcatggagccccagggagagggctgtggctcccagggtaaagtactaagcaggacaaggtgggaagggtgacactgacactacagctgcctccattggcacacgggttcccgtcacagggcccaggcccagggacaaggcatccggtggtagcagaggacgggcccctggggctgaggcagctgctggtggagacagggaccgtgcagaggggtccagtccagccctctaggcatcggcattcaccgggctgttcacagaagccatgctcagggctgcagcctgctcggcacaccactatgggggacagagaggcagagagaaagggaacaccaacgtcggggagggccagggacaagatggaaagcagggaggtttctgagcacgttccctgagccaccttgcttcatctttgtgacagataatcatcgggactagatggtactgtgaccgcccccccagtttacagatagggaaactgaggcccacagagacgaggtgaccagcccacctaggaagtggaggagtgatgatgtgaacccaggccatcgggctggagtctgtgctcttggaaagaggatgggacaggggcacccaggtgagatcgtgaggataggagacagtgaggggatttgggattggtggggggacccctggcctttcagggaagatgggagtgtattgaattagggtggctctgagaagatctggattagcctgggagtcctaggggccttggtggggctctgaaatttggggagaagtctgaagaattccaagctttaagaagccatgggttctggcctgcaaccctagggagggaggatggagggccccttggccagagtggactgggaggagattccaaagcttccgagtgggagtcgggagggccgcagaattagaagagctttggagtcctagcatcaggacagggtgtgaatgtgggttagggaaggaactggagggtgccagcatagaaaatggacgtgggcttccgatttggggcaacaagagggctgggagagggaagggggctcgagtagcaaggcagggctggagagaggtccagggtcctcagtttctccgaaggtggcagctggatggtgggcggggtttgggatacatccgcagcagtcagcgcgttccccagctccctgaagaggggtgcctggggtacatggtgggggactctagagtaccctgaagagggtgagtgggttgtgagaggggactgg

SEQ ID NO: 36465 - DNA, 2072 bp, Artificial sequence
  DNA replication origin
ttgtccctggccctccccgacgttggtgttccctttctctctgcctctctgtcccccatagtggtgtgccgagcaggctgcagccctgagcatggcttctgtgaacagcccggtgaatgccgatgcctagagggctggactggacccctctgcacggtccctgtctccaccagcagctgcctcagccccaggggcccgtcctctgctaccaccggatgccttgtccctgggcctgggccctgtgacgggaacccgtgtgccaatggaggcagctgtagtgtcagtgtcacccttcccaccttgtcctgcttagtactttaccctgggagccacagccctctccctggggctccatgagacaccagcctggggaggagatctgggaataactatcagggaggtcttcctggaggcatccagccggcatctggggccttgaagtaggattaggtgatggggatgggactggggagagcaggctcagtgggtggccccgaaagatgcaggagtggaaatgatgaggagccgtgtggggccacagctgcccctactgcgggactgagaacgattcagggcccaaggtagtgggtggtggggccaaataggttggagatttgggatctgcgggcacagggggtggagacatcagagaaggcttcctggaggtggcccggggctggggcttctgggacgtgattagagagggtggccaggtgagtggcctgcagggagcaagggtgcagaggtggcagtgagtgagcctggcatggagtgctgggatagagtagggtccagtgtgggccacctggatactgccacactcagggttcaaatacttagggagaggccctgggaaggagagatccagagaagccttcctggaggaggtgggctgagatctaggacctcccagtaggactcgtcagtgtagacagaagcgagcagggcagaccaggcaggcagcatttggtaggcaaagatgtaggggtgggaatggggtcactctgggtccccagagcctcctccctctggggtcacatgggcagacagaagaatgtggagtggatcgaggggatgtcgggaggacctcccagggtggcccctgcatagtgggacttgagactggacaaggagcagcccccagtggttaggactgaggagggggatgggatttttctccaaggaaacacccttctcaagtactcttgtccctgcccaggagacacccaggtcctttgaatgcacctgcccgcgtgggttctacgggctgcggtgtgaggtgagcggggtgacatgtgcagatggaccctgcttcaacggcggcttgtgtgtcgggggtgcagaccctgactctgcctacatctgccactgcccacccggtttccaaggctccaactgtgagaagagggtggaccggtgcagcctgcagccatgccgcaatggtgaggcctggaggcctgaacggcgagggatggggtgggggtcctggatggctcagacagtccagggttggaatcctggctttgactcttctaaccctagggcctggggacctgaccttccacctgcaagcctgtaaaatgggcaaggagacattccctatctcataactattaatatttactgagaatttactgtgtgccaggccctattctaggcactgaggatacagcagggaatgaaacagacaaagtccctggccctgcctgatagagctgaggtgcctggtgtgctgaggataagcagggaagccagtgtggttatactgagatgaggtcagggaggtgactgaggcacatcttgtgggaccccctgggtcacaagaaggggaactttcacttttcccctgagtgagatggagccacaggaaggttctgaggagagaagagacctgatatcggtgctaaaagattaaatgcggcccggcacggcgactcacgcctgtaattccagcactttgggaggccgaggcgggcagatcacctgagctcaggagttggagaccagcccgggccacatggtgaaaccccgtctctactaaaaatacaaaaaattagccgggcgtgatggca

SEQ ID NO: 36466 - DNA, 1030 bp, Artificial sequence
  DNA replication origin
tcaggagttggagaccagcccgggccacatggtgaaaccccgtctctactaaaaatacaaaaaattagccgggcgtgatggcaggtgcttgtaatcccagctactcgggaggctaaggcggaagaatcacttgaacccgggaggcggaggttgcagtgagccgagatcatgccactgcgctcccgcctgggcgacagagtgacactctgtctcaaaaaaaaaaaaaaaaaaaaaaaaaaaaaagattaagtaagatcatgaatgtaggctgaagcagagaattgcttgaactcgggaggcggaggttgcagtgagccgagatcgcgccactgcactccagcctggacgacagagcgagactccgtttcgaaaaaaaaaaaaaaaaagatcatgaatgtaaagggctggctgtgtatcttcttgcgagtgaatacaataattctctcccaaacactgagtgttcattctggggtgtgtggtactagggactcagcaccgaccaggacatctctgggccgcaccctcctgggggaaccagcccagaggggaagacagacaccctcagacagagcccagggtgggtggtcagggctgtgatgtaggagcacagggcagtgatcagggctgggatggaggaaggagcatcggagtagaaacctgaggggtgggctagggaagagaaaaggtgggaaaaaatgtgagaaaaggaggaagggaagagaggaggggtattctaggcagaggaaggccagagggttcaaacacgtagttctgggagctgtctactattgaagtatgatcgaagccgaaggaaaaagagacaagggcaccgagagccaaagaggtggagctgaattaattattccaaaacttcattaggaagaaaagcgagctggctttcctggcacactccaagacgctggcccttaagttagagagaaaaaggggaccccgtgcagcgatgacagagctgggaaacagcgcgggcaggtgggtccccggctcccggactgcgccctctgatgctccc

SEQ ID NO: 36467 - DNA, 1338 bp, Artificial sequence
  DNA replication origin
atttggaaatgtacgtctcccaaccggccaatcaagagcccagttcaaagggtaccgtctgccaccactggggctcggcgctttgtgggaaatgaagttctacttagcaatcgctttctgcggtgttcgttggggaactacagcaaccagagttcttttctctcaggcttgggggcgggttttcaggcagccaatgagcagtctgaggtcccggggcctggatgttcatggtgtttaggagagggagagaaggctgtgactgggtggctttggcgcaggtgttgaggtctccgaggtgtgcagaaggtgggtgcggcgccgtcccgggagagagtgccggttgtcgctcacagttccagagcgggcagtagacgccgaggcctgaagaggccccagcacgcggacatcactggccgctgtgcctggcccggcttgcgggaagccccgctcagtgggagagacaggcaagaccccgttgcggacctatgtatgttcactaatggaggcggcatggaacgcggtgggaacccgaggagaccttggtaggaagatcatcccggaagactaggagctgtctgagctgagacctgaagacggaaggatgttttgggggtcgggggcggtgtggtggaatggtttgcgcaaaggcagagagaaacagcctgttgtgtgaacatggactgcaggcgatctggtgttggtgatcatactgaaaattctgtatgaatgagatgtggaagattttcttgatcatttagggaccttggattttgtcctgagagcaatgaagagccatgggaggatttttagtagggaaggggtacggcccagtttgctgtgacatgagaatagattaacgggaaagtgactggggtcaggaaacccagggtggcagatgtgacagattcctaggcaagaggtgttgggaatggatcagggcaggggccaccgtagggagggcaagaggggatgggagagacgtccagaaggttgacaggctgtgtgggagggggaggcggagaggagtggagaagggatatctccagcgcgtagagcagatgctcagtggctaatgtcttgaatgaacaatcctaggaggcaggtgctgatgtgatctcccatttgtaaatgatacctaggacagaaaagtttaggtaacttgaccattatcaatacctaggaaggggagggcccaggatgtgtgtgtgtgtgtgtgtgtgtgtgtgtgtgtgtgtgtgcgcgcgtaccattaacttaccaaggagacatcagcagggccagatcacgtaggtcttgtgaggaatttgggagaggcatggaaatgtatatgtcactttt

SEQ ID NO: 36468 - DNA, 2745 bp, Artificial sequence
  DNA replication origin
agcaaactgggccgtaccccttccctactaaaaatcctcccatggctcttcattgctctcaggacaaaatccaaggtccctaaatgatcaagaaaatcttccacatctcattcatacagaattttcagtatgatcaccaacaccagatcgcctgcagtccatgttcacacaacaggctgtttctctctgcctttgcgcaaaccattccaccacaccgcccccgacccccaaaacatccttccgtcttcaggtctcagctcagacagctcctagtcttccgggatgatcttcctaccaaggtctcctcgggttcccaccgcgttccatgccgcctccattagtgaacatacataggtccgcaacggggtcttgcctgtctctcccactgagcggggcttcccgcaagccgggccaggcacagcggccagtgatgtccgcgtgctggggcctcttcaggcctcggcgtctactgcccgctctggaactgtgagcgacaaccggcactctctcccgggacggcgccgcacccaccttctgcacacctcggagacctcaacacctgcgccaaagccacccagtcacagccttctctccctctcctaaacaccatgaacatccaggccccgggacctcagactgctcattggctgcctgaaaacccgcccccaagcctgagagaaaagaactctggttgctgtagttccccaacgaacaccgcagaaagcgattgctaagtagaacttcatttcccacaaagcgccgagccccagtggtggcagacggtaccctttgaactgggctcttgattggccggttgggagacgtacatttccaaattaccgtggaaacaggaccacttacctggaaccccgggaaaatctttttgtctcagaatctcaaaactctttgtttcgcgatgattccaaagagctggacagtacacgtggggacagagtctgtacctattgtctgcctgttccccagatggcaccaacaaagcctcctaagtgtactcagctgctactggacgcctgcttggcatgaggagccactcttgtgctaagtctgcggacgccccggcttattagggcacctgtttcccagagacaggccagagctgaacctttaccctttcagggtctatttacccaggaaaaggcaaatgtaggccaggatcctgtccacgatctatctagaatgctgatgccccagacctgcagactcatgcctgcaacacgcgccacagcttccccacgagacgtctccacaccagagctcctccagcaccccctccgcaaacccccttccccaccatgcctctgagggtcgggtgaggggagccgaggccctgcaaacgctcaggcaggcatgtgagaaagctctttactgggggtacagcgaggaggagcaaggccatctccccctacctgcccccaccccctcctagggtcctggggtgagggggggtcttccctccaccggaccaccactgtctttggtacaataaatagaaaaaaagggggagaggggcccaagggtccagtccttagtggggagggagcggccaaaaccctctccttgacccccctgccccaggccccaatcagtgcaggcctcacccaccccagctgggtagcagcaattccagtcaaggagagagatgaggatgggagcccagggcccccagatgggggagggtatggcttcaggaggggccccagggagggggcagggtcacgagctggctgctgtgctctggggtacaccacggaggcccaggtgaggccccagagtggcagggtcatcaggaggcgggaggggtggacgacctccagtcatccgagtccggagggctgaggcagccgggtgctggggggcaggcgctgggtgaggtggggagcagtcagcagggccgcccaccaggctcacatccatcagctccgggggtggtggtgaggttggtgatgggggacgaccaaggtatcggggctgggggggtaactgggccccggtcccaggcagtgacgaggcagaggcaggggcttgatgtgtcttgtggggcacatcaccccctgcccagggccgcagcggctgggagggtgggacctaaaaaagcaaaggagccatgggtgatggagaccctggtctctaagccccaggcaccaccacccacctccaaagcccccaaagccccattacctgggggctgttcatctcacagtctgtgatagggggcccagggcccccacaatatcggttgctgtagcggtaggtccggttgtcactggaggagccactggagcctcctggaagtgccagggaggagaggtgaaggggcataaggtgagagaaggtggcgagtgggttttgggatggctgagggaaggtcacggcccaggctcaggttcaggcttcaagagcagagcccatctgaagcaccgggcccaattctgagattctgggttggaattcagttttgggttttagagtcagaaccagtttcagggctctgagcccaatttcagtgattgtgtcagggccagttggagctctcccatcccacacgtcatcttacagttcaggatcagtttcggcgctttgtgtgaagacccagtaaccaggtcccccaggacaggccaaacctgagcagcccccacccgttgtaccccatttgggcacctgggcacccaccagaactggagatggagctggcggtgctggaagaggggcaggtgtcgaggggcg

SEQ ID NO: 36469 - DNA, 1718 bp, Artificial sequence
  DNA replication origin
tttcagtgattgtgtcagggccagttggagctctcccatcccacacgtcatcttacagttcaggatcagtttcggcgctttgtgtgaagacccagtaaccaggtcccccaggacaggccaaacctgagcagcccccacccgttgtaccccatttgggcacctgggcacccaccagaactggagatggagctggcggtgctggaagaggggcaggtgtcgaggggcgcgggcgaggtggaggcactgctgcctgccgggcccgtgttggtggcctcgtcggccgtgcggcggaagaagccgtgctgcagagcccccagggggctgatgcgggcggcgggctcatactccagcatgcgcagcaccaggtcctggaagcggaggtagtcggcggggctgtggcccggctcccccgcccgccggcccccgggcccgcccgtctgcacgcccagcacctcctgcagccgccgtgtcccggggccctggtaatcctggcagggagggggtgggagggggggcaagagagtggccgtcagtgggcaggaggggcagggagacacacacggggaaacagaggcacaagagagaaagtggaaagaaaagctaagaagagttgtggggtgggaaggagagatgggagatggggtgggcaggggaggaaggaaaggacagacaagggggagtggaaggaagggaaagacacaagggagagggagcagggggagagagccccaagtgtgagtgaggggccacggggtgggaggagtggcatggggcaggggccgcaccttcctgagttctttcgtccttcgtagggtccagccacccccaggcagccgttcaaagtacttgcgagccttgggcgcctggtccagcatggcggccggtgggatgcccagcacctccacaatgcggttcatctggtcgacctgtgagcaggcaggggtcaaggtcatcaggccagccaggctccaccccctccacctccagcacaccccttcctgggggcacacctcattggagccactgaagaggggctctccggtgtgcatctccacaaggatgcagcccagggaccacatgtcaatggccaggtcgtagggtgtgcccaggagcacctcaggtgagcggtagaagcggctctggatatactggtagatctgggaaaagggtaatcgtcaagggacccagcctcccctactggtcccactgacacccccaaagctaagaggacccaactgaggacaggcttcttgctgacaaaatggggactgaggctccaaatcctgccattatcagcaccaattttctgggagccactggtgccatcttgtttatcaatctggggagtctgctggcctagacagaccctgatctccacccccaacccggatcctgggcccttctgggtcaccaggcagaggctgacattccataagccctataccatcgtcacttttagtggcagctcatacagagctgcaaagttgaagccttccacctccatcctcagctttaagaacagagaagacaaaaacttagcgaggcagcacccctggctcaaacccaacccaacttcaccctgttcacatctggcagcttcaaaatgggccctgcccctcaggcttcacccttcccatcctagtgggcagtatattcacacccccaccccaagcattatccctcagttcccacggctcctaataatcccatcccagcca

SEQ ID NO: 36470 - DNA, 1204 bp, Artificial sequence
  DNA replication origin
tgcataccattaactcatttaatcctcacaacaaccctgtgaagtaggtatcattattggccccatttcacagaatgagttgagttctccaactcaagtatggagaacctaaggaatttaaccactgggtcaggatttgaacccagcctctccaaaccctgactctgcctgaaaactcctctgttattttccaatcccatgggacccattatgtgcccagaagaatgtcttgggcaaccacactaccttttggtctggagacctttctatccccagcctccccctaccaccacgcaggtgaggagccagctgaacgcgtacctgcgtgtgctcctggggccctgggaagccagagaagggaccatggcccggtgggacggccatggtgggctcagagggccgcaggggagcgaggcctggagcgggagcccggccggggggcgccttcttgcatcctgcacctcggctgccaccgccgctgagacctgagagcagacaggaagtgggaaaacaacatggaacaaggggatatgtgaatagtgccaggcggggaagagtggacatgagaaagacagggcacagagagaagaggaaaagggcacaacggagcagcagatagcaatgaagagaaggggcagagaagtggtagccaggtggggggggatggcacagcagtccctcgacaaataatgatcaagtaaatgattaaggcagcacaaagagaacacataaaagacaatgattgggggccaagcaggggtcgatatgagccatcacagggaaaggaggacaggaagacaccaataattcagaggaggaaaagaaaaaagaaaccacagacagtatgcagaggagtaggcttcattcttttctcactactcgtggccctccccagggcccctaacacaagatgccactttctgtagtcttccctgaacatcaggatctcagcccgtagcacagccagggccaatactttaagatctatccttctcagtagattccctcaacccagagaactctaggattcccaaaccacatgagtcttcccctcccaaaccacagcagagtcctctgcagccctaaaaccacatcagcgtccttggggacctcccaaccacaccaaagttatctgagaacctctatagaacagagtcctatctctacagcattctcatccaccagggcacgattttcctagggg

SEQ ID NO: 36471 - DNA, 967 bp, Artificial sequence
  DNA replication origin
gctgtgattggctgagctcttggcaccagcgaccaatggtacagttgttgccatggcaggtgccgattgccaagctcagtcgggccccgccttccggtctcagcaggcccaggagggcctcctgggtggggggcgggacgccgggtccctaggggctggtggtcactcagggtggggcgtgtcgcccctcccccgtccacctgctctactcttcccccgcgtgccctgggctgacccttgtcccctcctctccccgcccccggtggcagtggcggctgctgttgtcacccaccgggcctcctgtcccgcttgccctccccgccgcggggccggccgggccagagacaggcggtcgccttttcagcgccgccaccgccgccatgctggccgctcgcccaccccactgggggccccaccgcgccccagccccccgtgggccccgcgccagccctgacccgggtagggggtgggggctgggagagatgatcctggtgtgggagggccccggagaagaggtggttttttgggggaagctccaagggtggaggagtcgtggagtggcaaggcatggaataggagaaagggatttgacatgggggagagagtggcccatggggagaagatttttgctgtagctgacaactctgggaggagagaaccctatgtgataacttggggatttgactttgaggccctctaggagtggacacagttgtggaatgaccctggtataaagaggggtgcctggagaaaggtctgtggtaggaatattagggtgtgtgtgtgtgtgtaggggggcaaggaagcagtgtaggggagaaaaggatgatcactctaaactgtgggaagagacacctcctccttctcccatcaggaggagtgggccttgattgggatgggatattggagtaatatggggaagaaccctgttgtggtagggggaattgggatatggtacagggagact

SEQ ID NO: 36472 - DNA, 1378 bp, Artificial sequence
  DNA replication origin
cacgccccaccctgagtgaccaccagcccctagggacccggcgtcccgccccccacccaggaggccctcctgggcctgctgagaccggaaggcggggcccgactgagcttggcaatcggcacctgccatggcaacaactgtaccattggtcgctggtgccaagagctcagccaatcacagcctagggcagctgttgctaggcgacgaagaagcggcccgcggagctgagcccaaacaaagggcgggagtggggcccggctaccccctcccagcctccctcctgcaactgcttcctcgggcttggccggttccaggaattcaactatgaatagccaggcagggcccgcacctgcctgccacccccctcctctcctcccttggcctcgtgctaagtctcacggcgacgggagcagggcggatcccgtcctgcccacctccctgcgaccgcttgccgccccacccgtccccgcgccgttacctgaaggagcgggcaaggggactcaaactgctcggggagcccgagctcagacctgcccactggctgagggtatccggcggacgcggcaagccagggccccgattacccagtaatgcaaccagcaaaatggcgaccacaacaaaccggcccccccacgccctggactccgcccccatccctccctctccgctcccctcacgtgacccacactgacactccgcctgcgcgagatggccgcttacctgcacgcatgcgcagcgagctaccaatcccacccaagaaccgaaatccaggctgccgctgcgcaaaggcagctagaaacggagcatgcgctctgtgaccgagtgagaatttacccaaccccgcaaaattgaccaagggtgcgtgctccctgtgtcagcaggtcaaggggaggaatgagcagcagacatgggagacggatgagtcttttaatagaaaaacacacgtgcaacagtatcaacacacatctctcgcaatcctgacagcgctgaacttcagttcttcaccttggggggtggcctgtgagaggaagataggtgatgaaggagggtccccaggatcatggcactcggggtgcaagggacagagatgtctgtcttggtgtattgctgggcccctgctcacctgtacactcccacgaccacggcatggtctctttcatatggctcaagggtcaactgctcctgcggcttcatgttctcctgttgcatctttttcacttcggaggcaaacacggcctcggctgaggctgtggagtcaatgcagttggcctaaagaggagaaaggactaatgtctacaacagggctttgggctgtttttctcttgtgtgctctttaaaccagatgttttcattattaattcaagtaaaactcagtgct

SEQ ID NO: 36473 - DNA, 871 bp, Artificial sequence
  DNA replication origin
gggtgtacaggggccagagggatttagctaggaatacaaaagagggcacagcccgtgcgaaggctatgagccctgattattggggtgctcgcattggggaagaggaaaccggaagcgagtttagggcgaccgctgcacaggcaaaggctgggaaggcagagagcgagggcagcgggttgcgtgtcgacaggctcgagaatccaggctcactgcgcgtgcgccgagctccgggcggggaaggggcccgggggcgggactacggggtggcgtcacgcagcgcacgtcgccgcgcgcctgcgctcttttccacgtgcgaaagccccggactcgtggagttgtgaacgccgcggactccggagccgcacaaaccagggctcgccatgaagccaggtcaggctggggtgagggtccggggtcagggacggaggccgggcgggaatccgggtgccaggccagaatcggaggggtggggccttggcctgggggcaggggttctgagcacgggttccagtctcctgtgggaagggggattctgattccagcaggtctaggggtttgtgactggcttcagaggtcacggtcgtgagtcgaagaaggccgtgggcctggcattgggggtgttgacgtggggttcgtctcattgaggccgtctaatagggattttggatattgggcaggaggcggcactcaagggtcttgggctagagtttggattcaggcatctggagtcttggatcgctgggcgtgttttgggaatcaggcttgggtcggagatggagagttcctgaccttgggtcctggagctgtgtgtgggaagcccccatttgccttccctgtcgctgccaccaccaccatccccttatcccgcatc

SEQ ID NO: 36474 - DNA, 2553 bp, Artificial sequence
  DNA replication origin
ggtcaggctggtcttgaacttctgacctcgtgatccgcccgcctcagtctcccaaagtgctgggattacaggtgtgagccaccgtgcctggctcttttccttttttctttagaggtaaggtcttgctctgtcacccaggctggagtgcggcagcgtgatcatagctcactgcagcctccaactcctggggtcacgccattgtcccacctcagcctcttgagtagctgggactataggtgtgcaccaccatgcccagctaattaaaaaaacaattgtatgttgcccaagctggttttgaattcctgggctcaagtgatcctcccgccttggcctcccaaagggctgggactgcaagtatgagccactgggcatggcctcccctagatttctctggagggagtgccaccttgccaacaccttgatgtcagcccagtattcctgatttctgacttttggccttcagaactgtgggagaatgaatttctcctgtttaagctaccatgtctgcggtaattggttacagaagctgcaggagactaatagggggaggttgcctgcatcaagtcacatagctgggatatggcggtacctcctctgtccccagccttgaagaggtcagcacagaatctctgggtctctctcaagctcttctaccctctctgcccaccccaagcccctactcaccggcaagtatcggccattatgggtgcagccacaatcttggacagggatgcagacaccctgggaaagcaggaagcggtcgtcgcactcacagccctcaaaacagcgggtggtgcagcccgtgaggccggagagagccgcacaggatccctggcaggtgcgagtgcagatggagtagtggctgtgggcggggcaatggagcgctgcagagagaggaggcagggctgagtcacacctccaaagggtcctggataaccaagggggcctactgcacacccagccctgttttaggcggtgctgaggacacaaatactgagaaaagtctcaaccccagtcctacagagctcacttccagtgggacagacaggaagagcccaaagtgaacatgctgcatcagggagtgtagacagagaggtcagggtcagggtggggaggcacaggcagaggggtcagggcaggcatgagggggcaaaggcagaggggtcagggccagggtagggggctacagacagaagggtcagggctgggatggggagggcacagacagagggttgagggccagggtagggggcacaggcagaggggtcaggaccagggtcgggggcacaggcaaagaggtcggggccagagtgggggcacacaggcagaggggtcagcgccaggatggggagggcacaaacagagggttgagggctggggttgggggcacaagcaaaggggtcagggctggggtgggggggcaaaggcagaggggtcagggccgggatggggagggtacacacagagggttgagggccggggtagggggcacaggcagaggggtcagggctgggtagggggcacaggcagaggggtcagggccagggtgtggggggcacaggcaaaggggtcagggctgggataggggggcacaggcagaggggtcagagttgggacaggggctatatggacccaagggaattatctgtggtaagtccctggtctctggctaagcaattggtggaggtgtggctgttctgcaatgcccaccaggtttggggaaggagcatcaggctgggggtgaaatgctgattttatttgggaacacagcaggtaagagggacggtaaggacacccaggggaaggtgtcttggacaccctaacaattaccacagactttgtagcttaaacaggggaaattcattctcccacagttctgaaggccagaagtcagaaatcaggatcactgggctgacagtcaggagagagttcagggcttgagacagacagaccaggtccatggtcaacaatgagaacaaatctaaggccgcgggtgtggatgaccgccctgggtataggtcctgcccaggggagacctggctctgacctggagccgaaggggccattgctttttcctgagagtctctggtgatgtccctcccatggggaattgaatgagaggtacagtcctagtttagcggggtgtttaatagcctgcagccttgtcttggggggatctgaggggatatggtcttgtcgggggtagaaggagggtctgtgtgagccacagatctcccaacccatccaactctccctttcaggtcactgcagaaagagtccagaatagaacactagggaagaagagaatttgaggtttgagcagagtgggcccagacaggaggctgagaaggaacagtcagagggatagcagggaagccagtggactatgccgtgggagaagaagttgtgtgggtgtggggtgggagggggtggggagggagcgcttttacagggagaaaccactccgacatgcaaatagaaggaatgggccaggaggggcccctacacctggtctagagtcctgcgagggacccacggacactcacggcagaa

SEQ ID NO: 36475 - DNA, 1052 bp, Artificial sequence
  DNA replication origin
ggtgctcattggctacagtgacagtgaagttctcagcccccaagggtggtccgtggcagggtgcactcagcaggtactcgcaggtgccttggaaatcgaatcggtgcccatccagagtgacgtaatgggggtcaccccacgcctggcactcagctgtgctgacgggctggcagccgtgctggccggatggcaggaggccacacacttcacccagcccacagctggcaggtgtgcagaccagcgagccacccccaggcccgcagcgacaccactgggagcaggtgccatcagcccaaaactcactgcccgcctcgtggtaggtgccattggcccagcagccgcagccgttgttgaggggaacacagcggtcagcacttaacacgaaacccgcgtcgcactggcagccctccacacaggggccctcacatacggctggcgtcgtaaggggtgcaggggacggacagctggctgggcagggtgggccacagacctcatagtggctgttttctgggcaggtgatctctgtgggcagacgaaggagcaggaaggagagaaatagagagaagggtgtcaggggtggggtcccaggacagggtgggaggagacagagatactagggagcagacagaaaaagggagagacagaaaacaagacacagagaggacacagagaaagaaatgggagagggcgagacaccaggagacccaagcagaaactgagggagctagagaatgagaaacagacagatagacacaagcaaagcgaggcccagagatgagcaccaagagacagagagacaaacagagaaaaaagaaaacaaagagacccagaaggaccagagtgaaaccaaaccagccccgaagagacgggaccccgccccccgccccacctctgctcccccaacactcaccacagccaacctgtgcccgccagtcttcgatgacaaccccagcggcctggcaggcggccacgtaggaagccagagccttgcaaagaatgtcacggtccccaccacccatgcagacgtccagaacacagcccttgaagaagct

SEQ ID NO: 36476 - DNA, 915 bp, Artificial sequence
  DNA replication origin
agtttcctcatctgtgaagtgggcatcgtatcagggcctcccccacagcaaggccgtgcatgtcacatgctgagctcagagtctagtccaggtgaacagtcgtttgagtgtttgtgagggaacaagtgagagacccagagaccaggacacagagagaaatacagggagatcgggctaggtgcggtggctcacgcctgtaatcccagcactctgggaggccgaggcgggtggatcacctgaggttagtagttcgagaccagcctcgccgatatggtgaaacccccatctctactaaaaatacaaaaattagctgggtgtggtggtgctactgtaatcccagctactctggaaactgaggcaggagaatcacttgaacctgggaggtggaggttacaagagccaagatttcgacactgtactgcagcctgggtgacagagtgaggatctgtctcaaaaaaaaaaaaaaaaaaaaagaaagaaagaaagaaatatagggagatatgtagggagatcagaggagacagatgggctatcctttctgcccagggaaatggagatagagcttaatggtagctcacagagagaaaatgagggatggaacagagtaggcactggataaatgatggtgagtgagtggaagagacacacagagaatgagggtaggagggaggaagggaagaggagggagagatagacagagagacagaaagagagagagagaagaccaagtgatatagacttaggtgaagacagagggagagagacacagaaagacagagagacagagagacagaagagggagatagagatgaagggagaagatctagaaaaagtaaagtgaggtttcgttccccaagacctgggctagaacaactgtccacagtgtgtcagatgacaatccaactctcgggggaa

SEQ ID NO: 36477 - DNA, 1386 bp, Artificial sequence
  DNA replication origin
ttccagctggactcgctcctgcacgcacacctgagcggcgccgacgtggtggtgaccacaacctcagggctctcgctggctttcgatggggacagcttcgtgcgcctgcgcgtgccggcggcgtacgcgggctctctctgtggcttatgcgggaactacaaccaggaccccgcagacgacctgaaggcggtgggcgggaagcccgccggatggcaggtgggcggcgcccagggctgcggggaatgtgtgtccaagccatgcccgtcgccgtgcaccccagagcagcaagagtccttcggcggcccggacgcctgcggcgtgatctccgccaccgacggcccgctggcgccctgccacggccttgtgccgcccgcgcagtacttccagggctgcttgctggacgcctgccaagttcagggccatcctggaggcctctgtcctgcagtggccacctacgtggcagcctgtcaggccgctggggcccagctccgcgagtggaggcggccggacttctgtcgtgagtactgctccatgcatggtccacatggttgggtctctccctgcccttcccaggactgtaggacagcagccccttcctcctccatggggctcaggggccactttccttcccgagctcggtatctactgtcaggaaacaccttggcactgacacactgaaatgccccaagtcaggtactgcagtgagagagagtcagttagaaacacctagtcagagtgtgggcgcggtggctcacgcctgtaatcccagcaatttgggaggccgaggcgggcggatcacctgaggtcaggaggtcgagactagcccggccaacatggtgaaaccccacctctactaaaactacaaaaattatccgggcgtggtggcgggcacctgtaatctcagctactcaggaggctgaggcaggagaatcacttgaacccaggaggcagaggttgcagtgagccgagatcgtgccactgcccttcagcctgggtgacagagattccatctccaaaacaaaaaacaaacaaacaacaaacaacagaaaaaaaaaaagaaagaaaagaaacctggggtccaggacactcttagggattggtgatccatgctttcaggtatccaaggcatgtagattgggatggctgaccctgcctctgtcacatagcaaagtaccccttgttaggaagacctagtgagtttcagctggtcagagggcccaggtctgttgcacacactgaaatacacctagtcacatggaattagtcgcataccttcagtgatatctgcttaaattttatactgactggtcagatacactcagaaagaaacaggatcctggcatagccttgggcagatccacacagatgcatagttagatagtccta

SEQ ID NO: 36478 - DNA, 1482 bp, Artificial sequence
  DNA replication origin
aagtccggccgcctccactcgcggagctgggccccagcggcctgacaggctgccacgtaggtggccactgcaggacagaggcctccaggatggccctgaacttggcaggcgtccagcaagcagccctggaagtactgcgcgggcggcacaaggccgtggcagggcgccagcgggccgtcggtggcggagatcacgccgcaggcgtccgggccgccgaaggactcttgctgctctggggtgcacggcgacgggcatggcttggacacacattccccgcagccctgggcgccgcccacctgccatccggcgggcttcccgcccaccgccttcaggtcgtctgcggggtcctggttgtagttcccgcataagccacagagagagcccgcgtacgccgccggcacgcgcaggcgcacgaagctgtccccatcgaaagccagcgagagccctgaggttgtggtcaccaccacgtcggcgccgctcaggtgtgcgtgcaggagcgagtccagctggaagggcagagtgacgaacacgccgtccacctgtgggcagtgggggagcggtgaacggagcaaacacgggtttgaatcctggccccactacctactagctgtgggacccagagcatgtcacctcccgctgaaaataataatgagcatctataggccgggcctggtggcaaagcctgcaatcccaggactttggaaggccgagatgggaggatcgcttgacgccagaagttcagatcagcctgggcaacatagtgagacccccatctctacaaaaaaatgaaaaattagccagcgtggtggcgtgtgcctttagtcacagatacttgggaggtggaggccaaggcgggaggatcgattcagcccacgagttccaggctgcagtgagccctaatcctgtcactgcgctccagcctgggcaacagagtcaggctaagaaaagaaagaaagaaagaaagaaaagcaagaaagaaaaaaagaaaagaaaaacaaagagcctctactggctcatgtcactgactccttatccttctcgaaaacaggtacttttcctagaccagtttacagaggaatacactaggctcacagaggaagaagctgctgtgccaagccatcaggctcctaggcgtacactctgacccttccatcatgccccagctaagctgtgaaaggggcccaggggaatggtgaagcccttaccatctcaggcaaccccagagctggcacttgctcctgtctggcccacagccctcctcacctgtagcttccggggccagcgggcactcagtgtcaggctgtggttgtagatttgcagggtgacactgcgggtgtagctgacagcctggctgccccggtgctcattggctacagtgacagtgaagttctcagcccccaagggtggtccgtggcagggtgcactcagcaggtactcgcaggtgccttggaaatcgaatcggtgcccatccagagtgacgta

SEQ ID NO: 36479 - DNA, 1201 bp, Artificial sequence
  DNA replication origin
cccacagccctcctcacctgtagcttccggggccagcgggcactcagtgtcaggctgtggttgtagatttgcagggtgacactgcgggtgtagctgacagcctggctgccccggtgctcattggctacagtgacagtgaagttctcagcccccaagggtggtccgtggcagggtgcactcagcaggtactcgcaggtgccttggaaatcgaatcggtgcccatccagagtgacgtaatgggggtcaccccacgcctggcactcagctgtgctgacgggctggcagccgtgctggccggatggcaggaggccacacacttcacccagcccacagctggcaggtgtgcagaccagcgagccacccccaggcccgcagcgacaccactgggagcaggtgccatcagcccaaaactcactgcccgcctcgtggtaggtgccattggcccagcagccgcagccgttgttgaggggaacacagcggtcagcacttaacacgaaacccgcgtcgcactggcagccctccacacaggggccctcacatacggctggcgtcgtaaggggtgcaggggacggacagctggccgggcagggtgggccacagacctcatagtggctgttttctgggcaggtgatctctgtgggcagatgaaggagcaggaaggagagaaacagaaagaagggtgttaggggtggggtcccagaacagggtgggaggagacagagagagacactagggagcagacagagaaagggggagacagaaaacaagacacagagagaggacacagagaaagaaatgggagagggcgagacaccaggagacccaagcagaaactgagggagctagagaatgagaaacagacagatagagacaagcaaagcgaggcccagagacgagcaccaagaaacagagagacaaacagagaaaaaagaaaacaaagagacccagaaggaccagagtgaaaccaaaccagccccgaagagatgggaccccgcccccagccccgcctctgctcccccaacactcaccacagccaacctgtgcccgccagtcttcgatgacaaccccagcagcctggcaggcggccacataggaagccagagccttgcaaagaatgtcacggtccccaccacccatgcagacgtccagaacacagcccttgaagaagctctcaggtggcacatgagcatggcaggtggtg

SEQ ID NO: 36480 - DNA, 919 bp, Artificial sequence
  DNA replication origin
ctcagtttcctcatctgtgaagtgggcatcgtatcagggcctcccccacagcaaggccgtgcatgtcacatgctgagctcagagtctagtccaggtgaacagtcgtttgagtgtcggtgagggaaaagtgagaggcccagagaccaggacatggagagaaatacagggagactgggctgggcccggtggctcacgcctgtaatcccagcactctgggagaccgaggccgatggatcatctgaggtcaggagttcgagacaagcctggctaacatggtgaaattccgtctctactaaaaatacaaaaattagctgggtgtggtgatgctcctgaattctcagctactcaggacactgaggcaggagaattgcttgaacctgggaggcagaggttacaagagccgagactgcaacactgcacacaagcctcggtgacatagtgagactccgtctgaaaaataaaaaaagtaatcaagaaaaagaaatatagggagatgggggagaggaatgggctatcctttctgcccaaggaaatggagatgtagcttgatggcagctcacatggagagactgagggatgcagcagagtaggcactgaataaatgatggtgagtgagtggaagagatgcacaaagaatgagggaggtagggaggaagggaaaagggtgagacagagacagagagacagaaagagagagagagagacagagacagagagagagaagacccagaggcatagccttaggtgaagacagagggagagagacacagagagagagacagagacaggggagggagatagagatgaagggagaagatctagaaaaagtaaagtgaggtttcgttccccaagacctgggctagaacaactgtccacagtgtgtcagatgacaatccaactctcgggggaaggccctggc

SEQ ID NO: 36481 - DNA, 1734 bp, Artificial sequence
  DNA replication origin
cgtgtagctcacagtctggctgccccgatgctcgttttccaccagcacccggaaggcaggcagcgctgcgttctggccgcatgagccgaccagcaggtacgtgcaggtgcccatgaagtcgaagcgccggccgtcgaagctcacatagtgtgggtccccggacccctggcaggtcccgaagcgatcggggtagcagcccaggaggccgttctggacgctgcagcgctcacccgccgggcagctctgcttgtcgcggcaggtgacctgatgggtggcgccgttgcaggtgcagcgcctttggcacaactcgtccgcccacacttcctggcccggagcgagctggagaccctggaaggtgcagccacacgacgaggccggcacgcaggcgccgccgctggccacgaagcctgggaggcacacgcagccctccacgcaggggcgcccggagcagttggacggcgccgcagccccgttgcaggaggtcgggcaagcagggccgcagagctcatagcggctgttggcagggcaggacagggctgcggggagatcagagagggtggatcaggcccgcgtagcaggggccgtcgaagagcgccctgtcggggacggcgcccaggaattccatccccaaaccctgctcctctctcagagctcgccatctcagataatggcactgccattcttctgggtgctcctgcgccacaccccagcgacgcagttaatctccaccccgccaaccccctaacgctcactggacaaccaatctgtcagcaagtcctgtgagctccatattcaaaatctacccagattggccgggagtggtggcgcaggcctgtaatccgagctactcaagaggctgaggcaggagaatcgcttgaacccggaaggcggaggttgcagtgagctgagaccacactactgcactccagcccgggcgcagagcaagactttgtctcaaaaaaaaaaaaaaaaatccacccagttacagaatctgcctctgatcctatccaccgcagcagcctcctgcctgggctccctcctgcccccacagcctgttcctcacaccaggccgaggaatctgggaacatctgggtcagatcaggtccctccccatctcagagcactactgtggcttcctctcactcagggtaaacgccagagtcctccccatgcctcaggaggccctgtgccatctgttcctctcacctctcagccctcacctcttctccctctccctcgggctcactctgccccagccccagctgcctcctcctcccgggtcctcaccctcccacctcagggcctttgcattggctgttccctctgccttccctttccccagaaagcccactggggcccaggtggcctgggttcagatcccagatctctccttctcggccactgactccaatctccccgtgcctcagtttccccatcagtaagatgggataatgtagtcgagacctcacagggttgttgtgaggattaaatgagttgatctatggggaaacattctgtggacatcactgttagttagtacttagctgactccattgcctgaccctggtctcagctccaatgttacctgcccagaaaggccttccctgatcaccctcttcacgagcctcacagtcactgtcattgaatgaacttgtttctttgcctctctgaagatacttcctagttcatctgctcactgtctgtgtccctcccctgccgctaagagagaagttc

SEQ ID NO: 36482 - DNA, 889 bp, Artificial sequence
  DNA replication origin
caagctcgatggccccttcgctgtctgccatgacaccctggaccccaggcccttcctggagcagtgtgtatatgacctgtgtgtggtcggtggggagcggctcagcctgtgccgtggcctcagcgcctatgcccaggcctgtctggagcttggcatctcggttggggactggagatcaccagccaactgccgtgagtgatgccctgggtgggggctgggagcatacagtgaggggcaggagatccctagcatctgcttaatatctgagaagttattatggttcagcctggtgctgggcaatgccaggggcctagtgatggccaagacagccagctctgtccacaatgagcctaaggttggagagacgtttcactagacattgacagtctggaggggtccaggcaggatggggaggcccactcggatgggttggggccaggatgggagagagacaggcagatgagtcagggctgggattgcgggggacacaggcagaggggttggggccaggatggaggaagtcagtggggctatgggaaaccagaggaggttcctggcccagcctggggagcaggggtggtcagggagggttttctagagaaagatgtccaatttgaaacccataagaggggctggaagttgccaagagaaagaggaggaagtgagttgcaggcccagagaacagcatgctcaaaggcttggcaggacgggaattcttgtctgcagaatcccaacacagagacgtgacgtctcttcctttgcctatagccctcccatgactcccattgccctctagataaagtccaggctctttagccaggtgtccgtctgcttaatcgttcactcattcattccacaagcattccttgaacccctgcctgccccctgt

SEQ ID NO: 36483 - DNA, 1883 bp, Artificial sequence
  DNA replication origin
aattttccatcaacttagcagaatgaggctcagagtcaaaaccttagttgagttgcagaaaaccaagaaagttcttgcacacttgagtttggggactaaggtttttgcctgtgctcccatccagaaaagggtgagaattggtgaattctaccacatccccctgcagagcctaagggcctctctcctgtctcagctagcctggggtgacatgtggaggaggcacacatggaaggcgtggacccacgcagagttccccagattggaacaaggacatggagagggtcttggtctgacttaccccacaggagggttgctccagcccagagtatccaccagctccatagggcacccatggctgcagtaggaaaagagaaaggatcatagaaggctgatccaccgcctctgctggagactgtcctgggcagaagggcccactctcatgacaagggccacctgggaccatgaaggctgaggtggggaaagaagtcgggcagattgggccagggggtatggatccaaggaccagtgtgtgtgtataggggaggctggctgtccagcgggtctggaggtgggttggggagggcagaagccagggacggggtggagagttggctgtcttgtgggtctaggggtaggatgaggaggcctacagtcaggggcaagagtaggggacctgctgtcccacttccaaaggggaccccagcccttctcacctgcaggtccctggagctgcagggccagccctgtggcagggctatatagtggagtttctgggccacaccctgggccacgtgccaggcagatgatgccaacttcctggaggaggctgccatcctcatggccagatgaaatgggaaactgtgaaggcctgggaaggagggacagtgattctggatgcctgggttccaagaagggagtgaggacagctggtggccattccctggaagccttctggagagtttggtcctggaagggtggggtccctgagggagacagctggggagcaggcagatgagcacctgggtccctgggtggaggtggggtagggtgggggtgtgggcagtgagggtgggaggtggcatgtggtcatatttgctggcttagtggctaggttccttcctttggctcctgccaggaacaacagtgagggacccatatccgggtcctggttccttctcagtccccacaggctggggagtccctagccacccacatcctgcttccagacaccactaggggcaggtgtctgggatgggcaggagtctgaggctatggagtgggacacaagacctccaccgcagcccagtggggcgtctgcggtttctcatctgcaaaatgggaacaccaaaaccagcctctctgggcatctttacgtcccagagatgtaaaaaaattctcaaggactgtagagctggggggcagcctcctctggtgtgggcgcaggccaggctgcaggtgggcactgggactgaggcggtgtgtgaagaagggacaatggcctctgtttcctggttccacacagacacccagattctacttctgatcccagacacctgctcctcagtggtgctggaaacaggatataggtggccagggactccccagcctgtgaggactgaggaagagccaggacctgttggttttggagtttttttgtgtgtagggagggtttgctcttagcaggggctagctgaacaggtttaggggactctgtgcctctccatcaccccagaatttgcctgagatgggaggtggaggtctaggttgcacacaaggagcagaagaatgagctgaaagttgggctttctcagctggagtcagctcctctgaggggctggcctgacccatgccctgcctgccttctccctgactcaggatctcat

SEQ ID NO: 36484 - DNA, 937 bp, Artificial sequence
  DNA replication origin
ctgcccggccagccgccccgtccgggagggaggtgggggggtcggccccccgcccgaccagccgccccatccgggagggaggtgggggggtcagccccccgcccggccagccgccctgtctgggagggaggtgggggtgtcagccccacgcccagccagccgcctcgtccgggagggaggtgggggggtcagccccccgcccggccagccgccccgtccgggagggaggtggggggggtcagcccccctgcccggccagtggccccgtccgggaggtgaggggcgcctctgcccggccacccctactgggaagtgaggagcccctctgcccggccagccgccccgtccgggagggaggtgggggtgtcagccccccgcccggccagccgccccgtccaggagggaggtggggggggtcagccccccccgcccggccagccgccccgtccgggaggtgaggggcgcctctgcccagccaccaccccgtctgggaggtgtgcccaacagctcattgagaacgggccaggatgacaatggcggccttgtggaatagaaaggcgggaaaggcggggaaaagattgagaaatcggatggttgccgtgtctgtgtagaaagaagtagacatgggagacttttcattttgttctgcactaagaaaaattcctctgtcttgggatcctgttgatctgtgaccttacccccaaccctgtgctctctgaaacatgtgctgtgtccactcagggttaaatggattaagggcggtgcaagatgtgctttgttaaacagatgcttgaaggcagcatgctcgttaagagtcatcaccaatccctaatctcaagtaatcagggacacaaacactgcggaaggccgcagggtcctctgcctaggaaaaccagagacctttgttcacttgtttatctgctgaccttccctccac

SEQ ID NO: 36485 - DNA, 1372 bp, Artificial sequence
  DNA replication origin
gctgacccccccacctccctcccggacggggcggctggccgggcagaggggctcctcacttcccagtaggggcggccgggcagaggcgcccctcacctcccagacggggcggctggccgggcggagggctgacccccccacctccctcccggacggggcggctggccaggcggggggctgacccccccacctccctcccggacggggcggctggccgggtgggggggctgacccccccatctccctcccggacggggtggctggccgggctgaggggctcctcacttcccagtaggggcggccgggcagaggcgcccctcacctcccggacggggcggctggccgggcggggggctgacccccccacctccctcccggatggcacagctggccgggcgggggggctgaccccccacctccctcccggatggggtggctggccgggtggggggctgacccccccccacctccctcccggacggggtggctgctgggcggagatgctcctcacttcccagatggggtggctgccgggcggagaggctcctcacttctcagacggggcagctgccgggcggaggggctcctcacttctcagacggggtggttgccaggcagagggtctcctcacttctcagacggggcggccgggcagagacgctcctcacctcccagacggggtctcggccgggcagaggcgctcctcacatcccagatggggcggcggggcagaggcgctccccacatctcagactatgggcggccgggcagagacgctcctcacttcctagatgtgatggcggctgggaagaggtgctcctcacttcctagatgggatggcggccgggcggagacgctcctcactttccagactgggcagccaggcagaggggctcctcacatcccagacgatgggcggccaggcagagacactcctcacttcccagacggggtggcggccgggcagaggctgcaatctcggcactttgggaggccaaggcaggcggctgggaggtgtaggttgtagtgagccgagatcacgccactgcactccagcatgggcaccattgagcactgagtgaacgagactccgtctgcaatcccggcacctcgggaggccgaggttggcggatcactcgcggttaggggctggagaccggcccggccaacacagcgaaaccctgtctccaccaaaaccagtcaggcgtggcggcgcgtgcctgcaatcgcaggcactcggcagactgaggcaggagaatcaggcagggaggatgcagtgagccgagatggcagcagtacagtccagcttcggctccgcatgagagggagaccgtggggagagggagagcgagagggagacggagagcgagag

SEQ ID NO: 36486 - DNA, 1476 bp, Artificial sequence
  DNA replication origin
taggggcggctgggcagaggcgcccctcacctcccggacggggcggctggccgggcggagggctgacccccccacctccctcccggacggggcggctggccaggcggggggcttacccccccacctccctcccggacggggcggctggccgggtgggggggctgacccccccatctccctcccggacggggtggctggccgggctgaggggctcctcacttcccagtaggggtggccgggcagaggcacccctcacctcccggacggggcggctggccgggcggggggctgacccccccacctccctcccggacggcacggctggccaggtggggggctgacccccccacctccctcccggatggcacggctggccggtcgggggggctgaccccccacctccctcccagatggggcggctggccgggcggggggttgaccccccccacctccctcccggacggggtggctgccgggcggagatgctcctcacttcccagatggggtggctgccgggcggagaggctcctcacttctcagacggggcggctgccgggcggaggggctcctcacttctcagacggggtggttgccaggcagagggtctcctcacttctcagacggggcggccgggcagagacgctcctcacctcccagacggggtctcggccgggcaaaggcactcctcacatcccagatggggcggcggggcagaggcgctccccacatctcagacgatgggcggccaggcagagacgctcctcacttcctagatgtgatggcggctgggaagaggcgctcctcacttcctagatgggatggcggccgggcggagacgctcctcactttccagactgggcagccaggcagaggggctcctcacatcccagacgatgggcggccaggcagagacgctcctcacttcccagacggggtggcggccgggcagaggctgcaatctcggcactttgggaggccaaggcaggcggctgggaggtgtaggttgtagtgagccgagatcacgccactgcactccagcctgggcaccattgagcactgagtgaacgagactccgtctgcaatcccggcacctcgggaggctgaggttggcgggatcactcgcggttaggggctggagacctgcccggccaacacagcgaaaccccgtctccaccaaaaccagtcaggcgtggcggcgcgtgcctgcaatggcaggcactgggcaggctgaggcaggagaatcaggcagggaggttgcagtgagccgagatggcagcagtacagtccagcttcggctccgcatgagagggagaccgtggggagagggagacagagggagagggctgtttttttttttagagatggggtctagctatgttgcccaggctggtctccaactcttggcctcaaacagtcctcctgcctcagcctcccaaagtgttgggattacaggcatcagccactttgccctcataa

SEQ ID NO: 36487 - DNA, 924 bp, Artificial sequence
  DNA replication origin
acccggccagccgccccgtccgggagggaggtgggggggtaagccccccgcctggccagccgccccgtccgggagggaggtgggggggtcagccctccgcccggccagccgccccgtccgggaggtgaggggcgcctctgcccagccgcccctactgggaagtgaggagcccctctgcccggccagccgccccgtccgggagggaggtgggggtgtcagccccccgcccggccagccgccccgtccgggagggaggtggggggggtcagcccccccgcccggccagccgccccgtccgggaggtgaggggcgcctctgcccggccgcccctactgggaagtgaggagcccctctgcccggccagccgccccgtctgggagggaggtgggggtgtcggccccccgcccggccagccgccccctccgggagggaggtggggggggtcagcccccccgcccggccagccgccccgtccgggaggtgtgcccaacagctcattgagaacgggccaggatgacaatggcggctttgtggaatagaaaggcaggaaaggtggggaaaagattgagaaatcggatggttgccgtgtctgtgtagaaagaagtagacatgggagacttttcattttgttctgcactaagaaaaattcctctgccttgggatcctgttgatctgtgaccttacccccaaccctgtgctctctgaaacatgtgctgtgtccactcagggttaaatggattaagggcggtgcaagatgtgctttgttaaacagatgcttgaaggcagcgtgctcgttaagagtcatcaccaatccctaatctcaagtaatcagggacacaaacactgcggaaggccgcagggtcctctgcctaggaaaaccagagacctttgttcacttgtttatctgctgaccttccctccact

SEQ ID NO: 36488 - DNA, 893 bp, Artificial sequence
  DNA replication origin
aaaatatttactgagaggagacagccccttctctgcagtgctgcctgttgcactcttgcaacgtattttcatgccttctctaataaatgcctttcttttcttttttctttttttgagatagagtctccctccatcgcccaggctggaatgcagtggcgcgatctcggctcactacagcctctgcctcctgggttcacgcgattctccctcctcagcctccagagaagctaggattacagccatgcaccaccacccctagctaatttttgtatttttagtggagatggggtttcaccatgttggccaggctggtcttgaacacctgacctcaagtgatccactggccttggcctcccaaagtgctgggattacaggtatgagccaccatgcccagacctaataaatgcctttctttacctaaaaaaaaaaaaaaaaaattaaaaaaaatgggaaaaaaaatttactgactacaattgctttgccaggtacttagcagtggaggaggcagtgcttgccatcttgcagcttgaagtctgggtgtgcagagaggcgctgggcaaacacacccatgctgcgtgtttgggaaggggcagtagagggcgctgtgggcacacggggactgagaactactgggtggggaggcctcggggagcaagctaagaccctaaggatgaaaaggagtgggagggagagaaccgtgtcatgaaacccctaaagtaattgagtgccagcacaggacgctgaagaagcacagagagtccgaggctgagacagcaagtagagacctcctggaggaaccttctagaaaaagttaagggttttagactcttcctaagggaaaacgggaagctatgggggattttaagagaggagtgacttgacgttctgtgctt

SEQ ID NO: 36489 - DNA, 1336 bp, Artificial sequence
  DNA replication origin
cctgggctcccactctggcggcacttgaggagcccttcagcccaccgccgcactgtgggagcccctttctgggctggccaaggcgggagccggctccctcagcttgcagggaagtgtggagggcgaggcgagagcgggaacccgggctgcgcgcggcgcttgcgggccagctggagttccgggtgggcgtgggcttggcgggccccgcacttggagcagccggcaggccctgccggccccgggcaatgaggggcttagcgcctgggccagcggctgcggagggtgtactgggtcccccagcagtgccagcccaccggcgctgtgctcgatttctcgccgggccttagctgccttcccgcggggcagggctcgggacctgcggcccgccgtgcctgagcctcccaccccctcggtgggctcctgtgcggcccgagcctcccggatgagcgccgccccctgctccacggtgcctagtcccatcgaccacccaagggctgaggagtgcgagtgcatggcgcgggactggcaggcagctccacctgcagccccagtgcgggatccactgggtgaagccagttgggctcctgaggctggtggggatgtgaacctttatgtctagctcagggattgtaaatacaccaatgggcactctgtgtctagctcaaggtttgtaaatacaccaatcagcaccctgtgtctagctcagggtttgtgaatgcaccaatcaacactctgtatctagctactctggtggggcgttggagaactttgtgtggatactctgtatctaactaatctgatggggacgtggagaacctttgtgtctagctcagggattgtaaacgcaccaatcagtgccctgtcaaaacagaccacttggctctaccaatcagcaggacatgggtggggccagataagagaataaaagcaggctgcccgaactagcagtggcagctggctggggtccctttccacgacgtggcggctttgttcttttgctctttgcaataaatcttgctactggtcattctttgggtccacactgcttttatgagctgtgatactcaccgcgaaggtctgtagcttcactcctgaagccagtgagaccacgagcccactgggaggaacaaacaactccagatgcgccgccttaagagctgtaacactcaccaccaaggtctgcagcttcacttctgagccagcgacaccacgaacccaccagaaggaaaaaactccgaacacatccgaacatcagaaggaacaaactccagacgcgccaccttaagagctgtaacactcaccgcgagggtccgcagtttcattcttgaagtcagtg

SEQ ID NO: 36490 - DNA, 902 bp, Artificial sequence
  DNA replication origin
agtcccgcgccatgcactcgcactcctcagcccttgggtggtcgatgggactaggcaccgtggagcagggggcggcgctcatccgggaggctcgggccgcacaggagcccaccgagggggtgggaggctcaggcacggcgggccgcaggtcccgagccctgccccgcgggaaggcagctaaggcccggcgagaaatcgagcacagcgccggtgggctggcactgctgggggacccagtacaccctccgcagccgctggcccaggcgctaagcccctcattgcccggggccggcagggcctgccggctgctccaagtgcggggcccgccaagcccacgcccacccggaactccagctggcccgcaagcgccgcgcgcagcccgggttcccgctctcgcctcgccctccacacttccctgcaagctgagggagccggctcccgccttggccagcccagaaaggggctcccacagtgcggcggtgggctgaagggctcctcaagtgccgccagagtgggagcccaggcagaggaggcgcggagagcgagcgagggctgtgagaactgccagcacgctgttacctctcactcctgccttggcctccctaagtgctgtgattacaggcatgagccaccacacctggccccttctatgcctctagacctcatgaaatgcccttccgtgctatgcctgttgaaagaaagccagtttctcgcttgagagagtgtgtcccttcctctgccctccctaactcctgttgtctcgcctctcccacagtcctcctgggtgcatccccgagtcctttccttttacccaccctgagactcccacagctctctcagtggagtcctccgcagaagtctggagcctcaccaggatgttgcctgtccccgagctcatttct

SEQ ID NO: 36491 - DNA, 1108 bp, Artificial sequence
  DNA replication origin
ggatgtgtttagtgtccctggggatgtcacagccacgtctgctttccccaccagctctgggttcctctgctgaagtcagaactcctgctcttgagaatccccgattcctattttataggagtttcaatttcggggagcttaatgtgcatgttgtattcagtgctttgtacacgtggtatcgttaagtcttcacaaagagccccattttacagatgactcatagagaagtgaagtcatttgtgcaaggctacagagctataaatggcaaagcaaaaatgaaaggcagttttaaaaattaacaaccaggccgggcgcggtggctcacgcctgtaatctcagcgctatgggaggccaaggcgggcggatcacgaggccaggagttcgtgaccagcctggccagcatggtgaaacccccgtctctactatttaaaaaaaaaaaaaaaaattagccgggcgtggtggtgtgcgcctgtaatctatcccagctactcgggaggctgaggcaggagaatcgcttgaacctgggaggtggaggttgcagtgagccaagatcacgccacagcactccagcctggacgacagggcaagactccgtctcaaaataaataaataaataaataaccatcgccacgattaacaaaaacaacaacaacaaaaaaaaaaacaacaaaaaacaaacaaacaaaaaacccactgcctttctatttaaagaatgaggaaagtaggtcccgcagaggttcagtgacttcttcaagatctctaagcttgtaagaggcaaaattctgggtctttttacttggcctctcctgagtggtatggggtctagagggaggagagaagaagaggaaataagagggactctagtgcccaaactccagagaactgcccctcagggtccttggggaattgttccattgtcagagggaagtgggttacctggtctcctggctacctagcagggacactcggagcatatcaaaaatgcttgttggaagagagagccccagcttcattctgagtataagtgtttctgctataacctgctatatgcattcttaaaaaaccttcagttcttcaaaacggtgcactaaaattaacaagacttcat

SEQ ID NO: 36492 - DNA, 1149 bp, Artificial sequence
  DNA replication origin
ccggtgggggacgagggcgagggcggcaggcagtccccgttccccgcgccgctcaccccgcgcagctccaccggcggcccccggctccgcatcccgggccacgactgccgggccgggcgggggtggcggggcccctggggcggccgccccgggccggggtggcgcgcccctcggcctcctcacgcgcggggcagccgggcggcccccatccttggcaccggcctcccggtcggccccagcccctgccccccgcccgtgctgcttccccgggccaccggcggggcccgagtgacgtgtgggcgccgccgccgcggtgcctcctgggagttgtagtctccggccgtgcggcctcggggcccggctctcagcgccctccagcagagccccgcggccagcctcgggccgcaatggacatgacaccccacgaagccgaaggagtcctcccggggagatgagcccggcctcggcccctccttcggacgcggcgtagcgggcgcccggggcggggggaagcgctcctcacagaccctgtgggggccgcggcccaggatgggttggactgcaacggacgcgattagcaacgcgaaaaataggagctgcgtgcatgactgtgactgcccggagccgcgaacgcagcctggaccttatccctgaggcaggacggcccctcggaccccccgaccgagatgtacgctgggaactgtagtccgcgcggggacctggcgctgcagggggcggcccccaaacagcgggctgcgggcgtcggcgggtggttggagcaagttaggggtcgggccggtggcgggactctgcggggaagatggggctgggaggatgtgtttagtgtccctggggatgtcacagccacgtctgctttccccaccagctctgggttcctctgctgaagtcagaactcctgctcttgagaatccccgattcctattttataggagtttcaatttcggggagcttaatgtgcatgttgtattcagtgctttgtacacgtggtatcgttaagtcttcacaaagagccccattttacagatgactcatagagaagtgaagtcatttgtgcaaggctacagagctataaatggcaaagcaaaaatgaaaggcagttttaaaaattaacaaccaggccgggcgcgg

SEQ ID NO: 36493 - DNA, 1650 bp, Artificial sequence
  DNA replication origin
gcagtcgtggcccgggatgcggagccgggggccgccggtggagctgcgcggggtgagcggcgcggggaacggggactgcctgccgccctcgccctcgtcccccaccggcggaccccggcgggcattcgagagccgcgcggccaggccctcttagccctctgccgtttggggggcacgggtgaacctgccgccccactcccaccccgccccgccccgcccgtacagccaaatcggaagggacgagcctgccctttgaaagggttttttttcttgctcctgcggagggcgccccagccatggccctcaggagctccctagaccccgcagggactgccctccatcccggccgccggggcccgccctctgcatcccgcgggcagcctgtgtgaagcggcctcccgcagcccccggcccctcccccatggaggaggaggagggggcggtggccaaggagtggggcacgacccccgcggggcccgtctggaccgcggtgttcgactacgaggcggcgggcgacgaggagctgaccctgcggaggggcgatcgcgtccaggtgctttcccaagactgtgcggtgtccggcgacgagggctggtggaccgggcagctccccagcggccgcgtgggcgtcttccccagcaactacgtggcccccggcgcccccgctgcacccgcgggcctccagctgccccaggagatccccttccacgagctgcagctagaggagatcatcggtgtggggggctttggcaaggtctatcgggccctgtggcgtggcgaggaggtggcagtcaaggccgcccggctggaccctgagaaggacccggcagtgacagcggagcaggtgtgccaggaagcccggctctttggagccctgcagcaccccaacataattgcccttaggggcgcctgcctcaaccccccacacctctgcctagtgatggagtatgcccggggtggtgcactgagcagggtgctggcaggtcgccgggtgccacctcacgtgctggtcaactgggctgtgcaggtggcccggggcatgaactacctacacaatgatgcccctgtgcccatcatccaccgggacctcaagtccatcaacagtaagtggtgtcctctccccaaaattccttccacagaacctctcaaggccaggcctaggtggtgggaaacagggtgagggacaccagatgacactgtgcctggagtgagaaggggcagcagtatgataccttcagggtgaaggtgaggtaggccttgcctgccttaagggagaaaaaggaggctcagaaaggttgaaggacttacctgcctcccaggctgcagagtcacaatcgctcagtaaacatgtatccatgaacacctgcgttccctgcatgaacaggacagatgcagtgcctgccttcaaggtgcttgccatccagccatgctgccagagtccaccaggcagagacaaaaagagcctaccccgtctggagtcagtgtctctcaaccccagcactattggcacttgaggccagatcattgttgtaggggctgtcctgtaaattgtgagttgcttagcggcatctttagcctcttcccactagatgtcattagcattccctgccccctctccccagctatgacaaccaaaagtgtctccaggca

SEQ ID NO: 36494 - DNA, 2000 bp, Artificial sequence
  DNA replication origin
taagtgagaacatgcagtgtttggctttctgttcctgcattattttgctgaggataatggcttccagctccatccatgtccctgcaaaggacatgatctcgttcctttttatggctgcatagtattccatggtgagacagacgctcgctctgtctcccaggctggagtgcaatggtgcgatctcaactcactgcaacctctgcctcccaggttcaagcgattctcctgcctcagcctcccaagtagctgggactacaggcctgcaccaccatgcctggctaatttttgtatttttagtagagatggggttttcaccatgttggccaggctggtctccaactcctgacctcaagtgattcttctgcctgggcctcccaaagtgctgggattccaggcaagagccaccgcacctggcctggtatggattttcttttaactgccctggggcagcccccagagccatgcgagcaaggcactgagggaatcaaattgacctttttccctctggctgctgtaagaaataaaggtggagaaagcagtgagatgatggaggccaggccagggtgggggacttggaagggacagatgtccacagtcggggctatatggcagagacacggtcatcggagtttcctggtgggttgaagggtgaaaggctagctcccaagttccaacacctcattcaccccagcactgtccccacccacagcccccctgccctctgtctgggcacctgctttgtaccaggcccaggaggtcagtcctgcaggggacacagagacaaatacccataccatggcagcaaacactggcaccagataggtccagagcattgcaggtacagagatgaaggcagctgacccccagggaactaactacccagagctggagaccagaagcgcaggcagcccgccagaatgaatggtgaagggttaggctgtgaagaggaggggaggctggaggagttggcagggaaccgctcatggccttcagtgccaggcggaggagctggaaccttgtcctgacagcagtagggggctatggggagatatatagcagggagggtcatgactggagttcaaaagagcccttggactcccaggcggagggtgggcctgagctgggggcactggaggctgggagcccagtggggacagatcctccacccagtaaccaagtggcttctctggacccagtgactcccgtggactgtggtggcagcagcagtggcagcagcagtggaggaagtgggacatggagccgcggtgggcccccaaagaaggaagaactggtcgggggcaagaagaagggacgaacgtgggggcccagctccaccctgcagaaggagcgggtgggaggagaggagaggtgaggtgtggtgtggtcatgcccaccctgtgcccaagccccagctcccaggctccaggccacaggactgaggtctccatctctccctggaccccgcaggctgaaggggctgggggaaggaagcaaacagtggtcatcaagtgcccccaacctgggcaagtcccccaaacacacacccatcgcccctggctttgccagcctcaatgagatgggtaagagcctgggttcttgtaagggggtgggggttccctggccaaaggggtgagcctcctggggctgagcgaagagaccaggtttcactgggccagtgagtggaaggccttcctgggaagggagatggtggcccctggggcgtggggggtcatttccaggggcagggaccacccttctctgaggcttctcctggagacagattcaagaacgatgctcgtgggtcttggtcttgctgttggaggggtcatcgggggctgtcccttggcacaagtccccgtggggccctggccagccctgcagcggagtgatggccctctccggttgcagaggagttcgcggaggcagaggatggaggcagcagcgtgcccccttccccctactcgaccccgtcctacctctcagtgccactgcctgccgag

SEQ ID NO: 36495 - DNA, 1392 bp, Artificial sequence
  DNA replication origin
gcactccagcctgggcaacagagcaagactctgtctccaaaaaaaaaaaaaaaaaaaaaaggaaaaaggaacacaatcaagtgcggtagggggcaggggttacctttaatgctccattttgtgccaaatcccccatgatgccctgtccctgagtatccctgcccaccctccccccagtgcagggtgggcacagggctccaccccctggggtacaaaggaataagttaagtgtcccccccctccctccttccccaataaatagagtgaacatcctgcccagggcctcccccaccttgtggcatggcgggctggggcagggcctggggcgctacattcatggctgcccaggcgggcggtggtgggcaggccttagtgggagccgtgggccccgcacaggggcactgtgctgtcttggttctgcccctccatgtccatgtccagcagtgtgggctgcacgctggggggcccagggctctccggagtgtctggcctgctgggaggcgagatggtgagtgtccggccgaaggagaccagtttccaggggtccaagcgggggcgactggcagccggccgaggtctcggggcaaaggtcagggtggtggggcggcctgggaactcagggggccggcggcgggctgggaacagggcctgggggtcgggcaggcgggggaagtccagaaggtcacgagggcctggtaagagaggttcagaggaggtgagtggggtggggcagagggtggcattaaaaagcccagagctgttacatgaaaagcacaagttctggtttctctcgagaaatccgtggatcttgctgcatccagtttccatctgtagtgtggcagtgctgggaccttgacctagactgggaccactcccagctgcttgctcctctgggtggaccctggcatgttcctcaaccttctggaactgctgcttagcggcagcctcgggggccaaagccctggtcttcccgactctcctgcactgggctaagctcaggcatggcttagctctgaagggggataaaaatggtgcctcaccacgcaggtgaggagcaaatagaataaccataacttaaaacaagcagcacagtgcctgacgtgggtacttaataacactgctatggccgcatctcccacccagttaacagatggaggagaacagtgtctaggctgtgtaagaattggcgatggtcatgctggtcacaaccgctataggcacctgcctggccttataggcatcagtttgccgcctgtgtctcagtcccctggagacccccgatgcctccaggagtgagcggtaaagggacacagaccctccctcctccacaagaagcaggaggtggctgcctgaggggtcgtggctgggctggacttgcgaccctggcagagg

SEQ ID NO: 36496 - DNA, 999 bp, Artificial sequence
  DNA replication origin
ttttttttttttttttttttggagacagagtcttgctctgttgcccaggctggagtgcagtggcaccatctcagctcactgcaacctccgcctcctgggttcaagtgattcttctgcctcagcctcatgagtagctgggactacaggctcccgccaccacacccagataatttttgtatttttggtagagacagggtttcaccatgtcgaccaggctgctctcaaactcctgacctcaagtgatccacccatctcggcctcccaaaatgctgggattacaggcgtgagccactgcgcctggcctagactgtttctttccctggcccaggccctgatgctgggtcatcccagtggaacattccccccgaccccacacaccctccctgggcttctctgggtttctaaggtccaagggatgaggccctccctggtccccccaagaacaccacacaagttatgatcaccagtgacaagtgttttaccaacaaacacatgagtcgggggaagttacatggtgaggtgggagggcgagggatagagaggtccccctggattggcctcagccaattacatcccgagtctgggacccagccccactgtcttcccgctggaggctgcaacgattcatcttcagctgagtcagctggatgtagcggagcacattggtgtctgcaggggaggtgggcagggcatcatctgggtgtcccggggcagcaggtgacttccacacctccctggctcacaccccattctccgaagtatccagcagctcgctcacacagccagtagagccagagcccttccccaaagccccagtcacagtcggcagtccccagtcacagcggagccatcgcacacctctgtgcgcctgtatttgcggcaccctctgccaggaatgcctcttcgcagaggctcccgtcacacttctcatcctccagcgacatctgcaagaagtctgttctctccgagccacttaacaggaaaactaatctcgtctcg

SEQ ID NO: 36497 - DNA, 941 bp, Artificial sequence
  DNA replication origin
ccctgagccaggctctcgaggtcccggccctcgcccccgcgcggggccttagtgctcttgcccaccgacagctctgggtggatcgcccagtggcgcctgtccgtgttttggcgccccctagcagcggcgcagttgcgcctgtttcgataggcgagcggattggcgcccctggttgccggagcaatcccttaggcctggttccctgccgcctggagcctcggctcctcgcagtcaggtgggttctgggggtgccagcaggctctgagagtgccggccgcggggccctcgcagcttgcctgctgcagtcggagctggtaaactacgagcgcgtgcgcgagtactgtctcaaggtactggagaagcagcagggcaacttcaaggccacctaccgtgccggcattgccttctaccacctgggcgactacgcacgcgcgctgcgctacctgcaggaggcccgcagccgggaacccacaggtgagtggcggggcggggcagaggtgagggctgggcccagggcggggaaaggggctgcagcggagggaacaggcaggaagatcagggcagaatagcagagccctcctcccgcggagctgcttctaggtagggctgcgccacccacctactccctacacgcccactcatccattcatccaccccgcccttcacccgccattcaaacatccgtccacctatcgctcctctgacatctccccggccatttctcatctaccgtcattgccacatctgatatctcctattcacctgctcagtcacttccctatccacccactgtcatctccattaccccgtcccacccctgcctaccgcacacactcattcctccactcacccattcacgcacacctattcattcacttcctgcaccatccactcatccactcgggtggacgatgccaggaaattggggtgtgtgtgtgtgt

SEQ ID NO: 36498 - DNA, 796 bp, Artificial sequence
  DNA replication origin
gcgatgcggtagctgcagcggcggcggcaggagtttcccacaatgcagcgcggcgcgctgtccccggtgctgatgctcagcgctgccccggagcctccgccgcgcccgcctcccgccctctccccaccgggctcgggcccaggctcgggctcccgccatggctcggctcgtcccggtcctaccccagagccgtcggggagcctgggcgcggcgctcgacagcagcctgcgtgccgccgtggcgttcaaggcagagggccagcgctgctatcgagagaagaagttccgggaggccatcggcaagtaccaccgagcgctgctgcagctgaaggcggcgcagggggcccgccctagcggcctgcccgcccccgcccccgggcccaccagcagccccgggccggcgcgcctcagcgaggagcagcggcgcctggtggagagcacggaggtggagtgttacgactccctcacgggtacgccgtcggggggtggggggatggggcacgaggggagggggcaatcgggagagcttggcgacttgggggccaggggccctggggctgaagggtccagggctgtgggcttctgggggagccttcagagcttgatcaaggaaagggattaggggtaggggatgacaggggtctgtggctggagggagctgggatgcaggaaatggtctttgggtcgggtattcagggcctcgcttcccctgagtcattctttccaccccctggccgcacgtggacccaaggtgaggaagtctgccctgagccaggctctcgaggtcccggccctcg

SEQ ID NO: 36499 - DNA, 1019 bp, Artificial sequence
  DNA replication origin
gcgtacccgtgagggagtcgtaacactccacctccgtgctctccaccaggcgccgctgctcctcgctgaggcgcgccggcccggggctgctggtgggcccgggggcgggggcgggcaggccgctagggcgggccccctgcgccgccttcagctgcagcagcgctcggtggtacttgccgatggcctcccggaacttcttctctcgatagcagcgctggccctctgccttgaacgccacggcggcacgcaggctgctgtcgagcgccgcgcccaggctccccgacggctctggggtaggaccgggacgagccgagccatggcgggagcccgagcctgggcccgagcccggtggggagagggcgggaggcgggcgcggcggaggctccggggcagcgctgagcatcagcaccggggacagcgcgccgcgctgcattgtgggaaactcctgccgccgccgctgcagctaccgcatcgccccccgcggggctggtccccaccctttctccgccccctcacctccggcagccgactccggctgccccctatgggtctagggaaacccctcgagacttcccccatgctcactctcaaattaaccaagtcctagttctccagcccgccccccgaattgttcccattccccttaccctccccaacctcctgcctgctctcctccccggtgcccaaagctcccgaagatttctagaaggaaaggacgagcctgggggaaagagcaggaagacatcagcctcacggaaagctggctctcagcccactggccatttggcatatcgaatgagaacacaggatttggacccaagcttcccaaattcaaatccctgcttactttctcactagtggtatgacttagacagctcgcttaaactacctggaactctgtatcctcatcagtaacatggcacaataatatcacctttagggccagtcgaggtggctcacgcctgtaatcccagcactttgggaggtcgaggtggatggatcgcttgaggtcagaagtt

SEQ ID NO: 36500 - DNA, 1124 bp, Artificial sequence
  DNA replication origin
gaatgactcttggggaagcccgccattgccccctggtggaggagttcagaatttgcattttatctcccagcaaccattaaaggaagtggtgagcacatccaatcagagggatgcgaggcctagaaagcgaccaatcaaaagcgagaggggaccggaattcgaccaatgagggcagagagcgctcagaataaaataaattcttttattgagatgagagacggacacacactgggagggttttgttttttgttgttgatttttttgtgactgagtcccagtactcagggaggctcagactggaggcggcggagcaggcaggcggcggcaaggctggtcccctggcgctggggccgcgcatacttgaggaagactgcggcgcgacccggcgcgggacctcggagcgcagcgcgggccatgcacggctcgagggtgcccagttcctcggggctgcagcagggagatggagaaactgaggcagggcaagtggttggagatgacccatccttggaactggagactggaggctgagaagaagcgtcgatgtggttccccacggacgggtcgggggctctcttgagatcgggcacgcgtcccgtcttcaactggagtgactaggcgagcaccggggagaggtggacaccctattcttcctacagggcgcggctagtgcggagtcagaacactcgaggaagcaaggaggggagctgaggatgggcagccatcctctctatgctgggtgcacaggctgagggaaaccatggttcgccctgccacctggtagcatggttagcggccctagcagctaaaggaacaccccatccaccaccagatacagagatggaggactcgaggcctgggtgatccttcgttctcagccctggaaggcaataggagcatcttctgggcctgggagactatcttccactctggggcaaggttaagagaccccagatctggactaatggggtcctcccaccccattctctcccacacccagaaaaatcaagtctaggtgccacctcctcctcaataattgtctctcattctccgagaccgtaaaaatgaccaggaaggtaagtccctgaagctgcggtgaccccatacacttcctccgccaagactac

SEQ ID NO: 36501 - DNA, 2075 bp, Artificial sequence
  DNA replication origin
ccccagatctggactaatggggtcctcccaccccattctctcccacacccagaaaaatcaagtctaggtgccacctcctcctcaataattgtctctcattctccgagaccgtaaaaatgaccaggaaggtaagtccctgaagctgcggtgaccccatacacttcctccgccaagactacacctgtaaagttctggctggagcctggagcccgccccgtcgagcaagcggtgcgccaggctcagagccgcagccgcacgacgacccggctcccatcccgccgcctcggcctccagcaaagacagctccaggaagtaggtggcaagtaacatcacctgcaagtgaggcggggcgactgtcaggccacgccccacttcgcgccggccacgcccccaccccgcgtattcacaagggctcacctgggggctgctccctgccagcgcggccagcagcccgaggcacagcagcgggccggggtggtgcagccggaaatccaggcggctcaggatgcgacgctcggcgcgcagcagctccgcccgtgagaaggagtccgcgctcaggaggcagaggaaggcgggctgcagatgggggatgcggggggaggtgaaggagtcttggatccgggctctttactccctgccctggaaaggccccaagttccggacctcagtttcctggtgtgtaaaatggggccattgacttgtgtctggaagtcgtagagagcacgggcttgagggtcctgggttcaagacctaggttcgagttcaaaccccatcatctgctcactgtgtgacataggacattcacttaagctctctgcctcagctaccccccgccccccgtaaaacagatactactccctgcttcaccaggcagttctgataaggcactgaattcatgcatgttgacggtaactattcaagatggactagtttatattatttttatttacttttctaaattagagacgaggtcaccttggctccccaaagtgatttgttttgtttttttttgttgttgttgtttgtttttttggagtgcagtagcgcgatctcacctcacagcaacctccgcctcctgggttcaagcaattatcctacttcagcctcctgagtagctgggcctacaggcgtgcaccaccacacctggctaatttttatatttttagtagagacagggtttcaccatgttggtcaggctggtctcaaactcctgatctcaagtgatctgccggtttcagccttccaaggtgctgagattacaggcgtgagccaccacccccagccttaagacagactattctagactgagtccaagttccaactgcttgatttggggcaaatgtcttcctctctctgagcctcggtctcctcttctgtttaagggacacattgacagcccctccctcatacatgttgggaatcccagactcagcacggtgcttggcacacagtagtcactgaatcagttactccccaaaggactccatccaccctcccaaaccccaccccggaagtacctcgggaagcacgcactcttccattttgcacgccacaaacaggcaagccacgcccagcagctgcaggcgatgtagacgcacgcggccagcgctcaggtaggaatcaagcaggtgaaccgccagataaagtgtgtcaccagccagacccaggtactcctgaggaggggcaagggtgaccacggggtcctgggcggcgacgcaaactcagccccccacacccttccagatacctacgtgcacctggaccagccagtctaccaccagggcgcgcatctccggggtcacagcgcggggcagggctctcaggggcagcacgcggcacacctggggttggggcagggacgcttcactctccacacctgtgcctctgcctttctcctgagctccagccctggatgcagcagcctcctccagtcagttggacatcttaggcatgccacacccaaactggcctccaaatgagctcctcttacgtgtcctcacctagaactctgggcttcgttccagatgcctccatacccacctctccgccacgtggactcctgggcgtctccctct

SEQ ID NO: 36502 - DNA, 957 bp, Artificial sequence
  DNA replication origin
tgttttgttttcacacagcgccgtttctaccgctgggaatgccctttcccaccgtccccgggctctttgcagtccctcctggggtgtttatggtcccctgtacttgtcctccacatttatttgtttaacaaatatttaatggtttagtagcaaatgttttaggtgctggagatgctgcaatgctggcctcgttctggggagatgagcaaacacatagaacaactagggaaaggccacgcaaaccaaaacattggcctcgccagccttcagatatccctatgagagggttgctgcggaaggaagactgaagggaggagtttgttgaacgtcttgcctgcgactctcctgggccaggatctctgttaggacctgagagacacttgtgttgtgggcagaagtccctgccctcgtgggactggcagcctagcggccaaatagacaaagcacacagggagacatcttcacagtgaaaatgctgagacaaagagatagtgatcgggtggtaggagtatagacaaagtcatggagatgttagctgaatgacggaaaggtcgagtaaggggctggggaaggaccctctctgtagaggaaacaggaagtgcaaagggcctggggtaggaatgggcttggtatagtctaggagctaaaaagaaggcagctgtggctgacgcatgggttgtggggagagagagggaagaggtgatgctggagcagagcctgaaagaaatcagagttttctccaagggtactgggagccatggaagggttttaagctggggagttccttggtcagatctttctttgggaagatgcttctgggtgctctgaggcagaggggttgaggattcgtggtcaagagttgaagtctgaggccgggtgcagtggctcatacctgtaatcccagcactttgggaggctgaggtgggcggatcacctgaggtcaggagttcaagacca

SEQ ID NO: 36503 - DNA, 1586 bp, Artificial sequence
  DNA replication origin
agtccatcacaatcacaccccctgaccgctgtgagtgcctggggcccccgcgctggtgtgcctgccccaggggtggagggatgggatctgctcttaactcacttctcaaggagggccctcgaaggcccccgcttcatgtctgggagatttccccaagtctgctctcaggcccttttgctgttggtcctctttggacctggtgaggccaccaggagccattgactgcagcacgttctggagctcagtcggggggctcagggcaggaggcagcccggtccctgagcctggctgggttcactgctttacagctgtttgggttcttactctgaactcagcccagggctgggctatgctggggacacagcactgattgagccagccctgggccctgccctggaaagctcccagcccaggtagggtgggcggcctggagtggtcagggctagggcgtgggaggccagggactggggaatcccagaggaaatatccgacctggcctgcagttagggagggctttctagaggaggaagcaaacgtgtcagctggccggaggaatgacgtgtgggatgccagcaatgggagaagcatggcatagctaaggaccggcagcagccagggagatggtggtgagaagagagggcatggggctggagtgcaagggtctgggggccactgggaggggtggggactgcttgcatggcgggagccagccatggaagggtttcatacagagagggacagggttaaagcaggcctttagaaagcccccctggctgcccgtggagaatggatgggagggtgcgagaggcaggccaggacagggctctgggctggactctggcatggtggtgtgtggggcagagagaaggtgggaggctcagaaggccctgccagctgtggggcgcatgggcaagggcacaggaaactcccagaggaggccgcccggggctcaggtttggggagtgggtccgtggctgagggcctccattgcggagggatgggcctttcctgtcctgtcctgtgggcagcccccgccagctggggccgtttccccagggagtctgggcaggtgtcccaggccctctcctgactggtcctccccatccacctctgccgcccacagatgacagcctgggcttactggagctggaccagcggacccacttcccccagttctcctactcggccagcatccgcgagtgagcagtctgcccacgcagaggacgcacgctcgctgccatcaccgctgggtggttttttccccctaactttttacttagcctttttggtttgtgtccccacccccacctcctcaccccctttccagttcttcttcaggcccctcccagacgcaccccagcggcccctgcagcccctgcctccagcctccagcctcacctttgtgcccagactcgcatttggaagactccacctcccgcccaggcctgggctgttgggcggttggagattcaggttttaatccacacaagccccagtgaggggtgaagcatggcgcctggggcctgcctgagtttctggcctgggtgtcgtgctggtgtctgcctccgcgctgctgcatctggacg

SEQ ID NO: 36504 - DNA, 872 bp, Artificial sequence
  DNA replication origin
agattctttctcccacgctggctcctcctggaaagctgtgccctgagaggcagaggcggagggtcttaccagcctgaggagccagcattccgcagccccaggcccacagctgcttatgcccccatttcgtggactccttcagtggtcatctgggcaggagagcagggatctgactgtgcatgagtgatctcattcatagccccattttatagatgaagaaactgaggcccagagaggggaagtcacgtcactgaactaacacagtgaggcagtattcagcattcattcagttagcaagtattcattgactgtgtgctgtgccggatagccccgggctccgagacacagtggtcccctgatggagcttacattccagtgggggtggggcaggcagtaaataagtagacatggaatgtcggggtggcaagtgctggggtgaaaagtgggaactgtgagtgagggacaatgggctgggggcgggggggcatcaagaggctgcccggaggagacggcagtggtcagaggcctggagcctggaggaggtgagacgctggctgggcaagggtgtcccagggagagggacagcaaggacagaggctcccaggtggggatgtgcctggtgttttctggtaacagcgtggctggagcagtgtgagctagggcgagctgggggaggcaagcagaggagcaacgcggagtccagctgtgtcgcgcctgcaggtcatggaaaaggaccttggctttggcactccagacgagagcagccctgtgatgtcgtgagccgatgcgtggcctgatccatttgtactagtgggaagctgaggtccccttttagtgaagttaggacagggaagagaccctttttgacccca

SEQ ID NO: 36505 - DNA, 1017 bp, Artificial sequence
  DNA replication origin
gtgctagccgttgggcctgcctcggaggaggcgtcgccgccgccgctgccgctgccggcgccgttgccgctgccgggaaacacaaggaaagggaaccagcgcagcgtggcgatgggcgggggtagagccccgccggagaggctgggcggctgccggtgacaggtgagtgcgccagcgcgtgtccccgaacgccccccccacgatggtcgcgtccgggccccccgcggtgccgcgatgggctgtaccacccgtgcccggcggggggaccgcggccctcgagcccctccttcaggagctgagtgggggtggccgagcgggggcggtgggaccagcctcggggggccggggcggtggcggcgggccataccactgaggcggtggggggagcgctgcaagtttgcgggacggggagcgcaggccgcagcgtgcgcgggccgggggctggacctttcgggcgcggcgggcagatcgagcctggcgtgcgcgggctaagctatcgagggggcgcgccgcatcaagtgtagagggctgtacctttttggcgctgtggaagccgttgctgtgctgtatttacaggggtgggggcttctggggaggatgcttccccaactgtggctgggttatatcaccacggcgttgggggagccctgcttagaacgtaggggaacccaaatcagaggactgtgatgtttgtgatctttaagggactgggacggggcgggacaggccctagtgggttttaggggcgtattttgggaggactgtgatgccgattggtgaggaggggtttctgtttcctgtatttgacgtgtgtggcgttgggggtttacactgatctcagcctttattgaacttcttaacgactctggagggaacgtcatggttactggggtgctttggaccatggaggtgctgctctggattccattaccctctcagattatttaccaggcagtaacagttctttccttccataggggagggaggaaagctgtgttagaagtcactgaagttgtc

SEQ ID NO: 36506 - DNA, 1258 bp, Artificial sequence
  DNA replication origin
tttgtgactttcaaatcatttcccccactccttcagggtgagttgcaggactgtttcacactatgcgcagctgggctggggatggtggcagaggattgggctgtgtctctaaaggtcaggcttcctgcacacacatggtccatgtccctgctgcaagccctgagtcagggggagtaatggccacagtcaccattcagttaggccgccccctgcccccaataagccgtagtggttttgtcactctatcccctccccccatggatttcacctgcctgctggcacctttccaaatgatgggctccgtttgtgagaccatgagtttccactggtttggtcgcccacccctccctgctgcacagcgcccctgagccaggcctgtcctaggagctggtagcaggtagtgagcagggcctctccagggatggggtgtaggtaaagcggtggtgctggccaaggaatctgaggagtgggagaaagtggccagggccgcttcagtggttgtggataggaaggccttgcagaaggggtgacatggaggccaagttgggaatgtggcttcatgaagttcaggaggagagctttcagacagagggacagccaggggcagaggtgctgaggtgggacaaggaacaggaagaaggctggtggctgtgggtgagggtgggccctgcctccagcatgaggcagaggtgggtgggcaggggctaggtggctgggggtgttgtgatcaaggaggaggaatgtgcacagtgacccgggagtgctggatcgggaggatttggagctgggatgtgctgagctgagtttcatttaggatcatcgctctggcttctgtgaggagaaggaatggctgggagggctggggtggatgccactgcagcagtccaggcaggaagccaggatggctgcgagggcatggcagtggggagcagggaagagggccgcttgggctgcttagggtgtgctttggaggaagagctgtgggatgtgctgatgggttggaagttggggctagagaagatgagaatcatagggcccgcctagatgttagaccggagcatctgggggaacggctgttaacagagaaggggagacgggaggaaggtcaaggaagagggagctgtgttctgactgcattgcgcctgttagggtccccgctggggctcaggcggacacctgggctgggggttcatggctgctgacagtgcgcagggtacagctggaatcaaagccaagggccttggctgggcgtggtggc

SEQ ID NO: 36507 - DNA, 804 bp, Artificial sequence
  DNA replication origin
agccgaggcgccgcgcccccagatcgcacagtacctgcactccacgtctcccactccgagacccagccccacacgcaccttccaggctgtatccccgcctgacggcccctcctagccgcgcgcaggcgcactacggctagactgcaggccggcgggggccaggcatgcgcctttctcattggccgcgccgcttgctagcttcgggcggaggggagcgccgggccgacggtgggcggtcacgtgacggttacgactgcactctcgctggtgtcggtgggcggtcacgtgatggttatggccgcactctcgctggtggcggcctgttggggtagagcggccgcggacgagtcagttcagcttccggcggtgagaggatgcttccggggcgggcagcccgggccgggggaggagtgtctgacagttggcgccgccgggagggagggcgggcggcgcgagtgggcgcgggcccggtgggccaggtgaggcgcgggccgggggtggtgggactgggccggttgcggtagggacgggtggcgtccgggtgtctggactcagttcgggctccgttgtacggcttcggacttacgatttgtttctttgagcctcagtttcctcccctgtggaatgggggttagaatccgactgtatcaccggctttataaatgggagtgagaagtcaggtcgtgtacgttggatgccttagctcagcgcctccgcataacgctcacttcgttactatactattattattagtattgatgtttgagcgcttagtatgaaaaattgttgggtttggaagccgtc

SEQ ID NO: 36508 - DNA, 1303 bp, Artificial sequence
  DNA replication origin
tgcaacctccgcctctcagattcgaacgattctcctgtctcagcctcccgagtagctgggattacaggcatgtgccaccatgcctggctaattttgtatttttaatagagatggggtttctccatgttggtcaggctggtctcgaacttccgacctgaggtgatccgcccgcctcggcctcccaaagtgctgggattacaggcgtgagccaccgcgcctggcctattattattatttttttttgagacggagtctcgctcttgttgcccaggctggagtgcaatggcgcgatctcggctcactgcaacctccacctccccggttcaagccattctcctgcctcagcctcccgagtagctgggattataggcatgcaccaccacgcccggctaattttgtatttttagtagagacggggtttctccatgttgatcaggctggtctcgaactcccgacatcaggtgatccgcccaccttggcctcctaaagtgctgggattacaggcatgagccaccgcacccggccgagggtgacatggttaataacaatattagccaaaaacaccatgtcaagctgagcctaccacaagaataaactcacagaatcgtcacactcagccctgatgtggatgtccccgtgtgcattttgcagatgaagctgggattggaaaggtgccataaggcagtcaaggtatccagaggtgtagtggtggggctgggattctgacacaccccaggtaatgggctgcagtaccccgtatgttatgtgagatgtgacacggggaaatgacgaagacacggagggaagaaaaataactgtaaggctgggtggctccttatggggaaaactggaagcatgaggagtggatggtgactggtcagaggaacagtgatgccaagggagggacaaagacacaaggggtaatgatgacgtaagagttgcattagcgcgatttaagaagagcgatggggacagtagccatgcgaaggtgacttgggggtatgatgagggtttaaagagaaatgaggattttataaaggagaaatggcaacaaaagcaggatgcaggtaacatatggcgatgacgaatttaaagggagcgattacgacctatggtggcaaagagggcttacagggaacgaaagcgagttaagggcgttgatgacaacaagaggagttgtgaggatttaaagagggtgatggcgacagaaggagttgtgaggatttaagtgggatgagacagaaggagaggaatggtgacataaagagaccgaggacgacataaattatagcgtggaagacaa

SEQ ID NO: 36509 - DNA, 1634 bp, Artificial sequence
  DNA replication origin
caggtggattgcctgaggtcaggagttcgagacctgcctggccaacatggtgaaatcccatctccactaaaaatacaaaaaaattagctggctatggtgatgtacgcctgtagtcccagctacttgggaggctgaggcaggagaatcgcttgaacccaagaggcagcagaggttgcaatgagctgagatcatgccactgcactccagcctaggagacagagcaagactccatctcaaaaaaaaaaaaaaaaaaaaagacttgagcagaggtcctcaaactgagcatgccccagaatcagctgggcgggcttgttaaaacccagattcctggaccccaccccagcactctgattcagtaggccatgtgcagtgaggcccaggaatttgcatttctaacaagttcccaggtgatgctgttgccgctggatcagggaccttacgttgagaagcactgggttagagcataaattctggaaccagacagcctgggttcgaatcctggctccatttatctgctgtgtgactttaagtaagtcacttaccctctctgagcctcagtttcctcacatgtgaaatggatgtggtgattgaccctcttcttcatggaggctgaggatttggtgagatccacagtacctggcttgtggtgagctgtccgtatgtggggtccgttgtgacgatgaccctggcagggcacatgtcttaactgtcccctcgccctcagagtgcgcccccacccctgtgtccaagtggccgcactccagacctgaaggctctactcaacgtggtggacaatgcccggagtttcatctacgtcgctgtcatgaactacctgcccactctggagttctcccaccctcacaggtactgctgggtgtggagatagggagccgctgcagttggccaggagacgggagagggaatcatggagaccagaaagctggtgggggctccaggcaaggggacagatggaagagaagctgcagggagagacagtcaccaggaggtgaccggaagaaggtatctaggcacttgagacaggagaaagagagattacagaggagacagggatgaggtttcaggacaaggtttgagggaacagagaaaaggatgagagggccgggcgtggtggctcacgcctgtaatcccaacattttgcggggctgaggtgggtggatcacttgaggtcaggagttcaagaccagcctggctaacatggtgaaatcccatctctcctaaaaatacaaaaattagccgggcgtggtggcacgtgcttgtaatcccagctacttgagaggctgaggcaggagaattgcttgaacctgggaggtgaaggttgcagtgagttgagatcgcgccactgctctccagcctgtgcgacagacagagcaagactctgtctcaaaaaaacaacaaaaaaaaagagaaggctcagaatattggggttgagggcaggaagcctgaggcaggggtgcaggatgtgggatttggggaggtaggaggcatgggctggaaacaggatgaggggcttgggggatggggactaaaagtatttgggtttagggtagcaagcttggggatttgtgatcctgggataagaaggataacaaccggccggacgtggtggctcacac

SEQ ID NO: 36510 - DNA, 2196 bp, Artificial sequence
  DNA replication origin
accttctcaaaaaaaaaaaaaagaaaagaaaaaaaaaaagaaggataacaaccatacccactgcaacatccaggtggatgatggcacttgtggggctcaaagaaggtattctaggggcagtagataagacagtgggtccaggcatggtggctcacgcctgtaatcccaacactttgggaggccgaggcggaaggatccctaggagtttgagaccagcctgggcaacataatgagaccccgtctctatagaaaaattggaagattagcccagtgcggtggcactcacctgcagtcccagctactcaggagactgaggcaggaggatcacttgagcccaggagttggaggctgcattgagctatggtcgtgccactacactccagcctgggtgatagagcaagaacctgtctcaaaaagaaaaaaaagaggatggaccgggcacagtggctcacgcctgtaatcccagcactttgggaggccaaggcgggcagatcacctgaggtcgggagttcgagaccagcctgacaaacatggagaaaccccgtctctactaaaaatacaaaattagccaggcgtggtagcgcatgcctgtaatcctagctacccgggaggctgaggcaggagaatcgcttgaacccaggaggcagaggttgcagtgagccgagattgtgccattgcactccagcgtgggcaacaagagcgaaattccacctcaaaaaaaaaaagaaagaataaaagaggatgacaacactgggttttggggagcaggaatgggagccacagccaggaagaggaaatagggatgtgggatttatggagacaggaacagggtctgggagccagcgatgaggaagtcctctcaatagctaaagcagggcccaggcttggttccccaaagctgagggcaaagcctgtggacacagccgccctctgcatcctgccccacctcctatacacccgtcctcaggttctggcctgccattgacgatgggctgcggcgggccacctacgagcgtggcgtcaaggtgcgcctgctcatcagctgctggggacactcggagccatccatgcgggccttcctgctctctctggctgccctgcgtgacaaccatacccactctgacatccaggtggtaagtactgccccaagccaccccttggcccctgtgtggggcagtcctagggacacagccctcatgggactcgtctgtcaatgacaagggcagcccagagtgagccctgtcactgtggggaaaccatgggtcagggccagggtcatggggcacagggagaggggccaggaccgggatgagggggcacaggcagaggggttgggaccgggatgggggtgcagagagaggtgttgggaccaggaatggggacatgggcaggtagaggggtcagggctgggattgggagcacaggcagaggggtcagggctgggatggggaggcacaggcagaagggtcggggccgggttggagggcacagagagaggggttagggccagggttgggggcacaggcagaggggtcggggccaggatggaggaggcccaggcagaggggtgagggctggggtggggggcacagagagagggtttgggaccaggactgggggagtgggcaggtagaggggtcggggctggggttgggggcacaggcagaggggtcagggctgggatggaggaggtacaggcagaggggtcagggctgggatgggggggcacaggcagaggggtcagggctgggatggaggaggcccaggcagaggggtcagggccagggtcggggggcacaggcagaggggtcagggctggggtggggatgcccagaggaagcctctgccctagcgggaagggccaaggaagatgttctggaaatgggggcatctgagatgagacctcaggaatgaacaggagccattctgccgggaacagtgttttgcaaatgagaccaccggggcctccctttcagctttcgttctcagagggcccctccacctggccctgttctggcccccgaggattctgtgggaagcagtggagtcccacagatctcgctccacactctgctccctgatcccggggctcctccgactccccctgcctctcacactccttcccatcctcccctcccactcagaaactctttgtggtccccgcggatgaggcccaggctcgaatcccatatgccc

SEQ ID NO: 36511 - DNA, 960 bp, Artificial sequence
  DNA replication origin
cttgctctgtcacccaggctcaagtgtagtggcatgatcatagttcactgtagcctggacctcccaggctcaaggaattctcctgcctcagcctcccatgtatctgggacaataggcccataccaccgtgcccagctgatttttttttccatgttttataaagaggaggtctcactatgttccccaggctggtctcaaacccctaggctcaagggatcctcccaccacagcctcccaaagtgctggaattacaggtgtgagccacgttgcccaccctagaattttttttcatgtaacagcccccacactgactgccctcacccaacttttcccttaccttcgtctcggccaggtagtcagccgaggacttgagctgccaggggttggcagcgtcagggtgggggttgcgcttgaagaagtggtgggccttgcaggcggcgtgcaacaggtgtggcttgggcaggccctgggtttcgcagatgtagcgcacctggtcgtactcgttgttgccggggtagagaggccagcccaggtgcagctcagccatgacgcagcccagggaccacacgtccaccttctcgcagaagggcagccccagcaggatctcaggggcccggtagaagcgcgactggatgtatggctccttcacgtagcgcacctcgctgaaaatgctggcggatccgaagtcaatcacctgtcgggggtggggaagagggcgagtgggcaggtcaagcagcagggacagccgagctgggccaccccggcatctttcacctggcatcttcctgcatctgctatttgactctggccatctctgggtctgtgattctttagttgctttgttggtttttgtttgtttgtttgtttgtttgtttgagacagagtctcactcttgttgcccagtctggagtgcaatggcacgatctcagcacactgcaacctccacctccccggttcaag

SEQ ID NO: 36512 - DNA, 1069 bp, Artificial sequence
  DNA replication origin
tagcactttgggaggccgaggcgagtggatcacctgcggtcaggagttcgagaccagcctggccatcatcgtgaaaccccgtctctactaaaaatataaaaattagctgcgcatggtggtgtgcacctgtaatcccagctacttgggaggctgaagcaggagaatcactggaacctgggaggaggaggttgcagtgagccaagattgcaccattgcactccagcctgggtgacaagagcaaaactctgtctcaaaaacctccgactcaaaaaaaaaaaaaaaaaaaaaaaaaagaaaagaaaagaaaaagaaaaacaggggcctggcgggggatagaaaggatggggactgatggctgatgctttcacagaatgattagggaaggtctcactgagaaggtgatcatttttttttgtcctgcctttcaccttttgatagaaaggtgacatttgagtaaagacctgaaggaggtgaggcagggagccctgtgctcatgcagggaagagcattccaggcagagggaacagcgagtgcaaaagccctgagctgggaatgtctgacttgttcaaggaatagtgaggagacccttgtggctggaggagggtgagtgatggggagagtgggagatgtggcagagaggtgacagagcagacattggagacctgtgggccacggtgaggactttggcttttgtcacaggatgtggctatgagcaggggaggacccaatctatcccgggcggccacaggatccctctggatgcttgtgacagacagactagggggcagaggagaggagcagggagaccagcgaggagacccccgcgttggtctaggttggaaaggatgcaggataggaccagggtcggggctgtggatggcatgcagagggagcagattctagatctgttggctgatggacaaggtgtggggtgcaagaggaagaatagggtcctaaccctcctttgcatagttctagtggagagaaacagagacagagtcagtcactcgaaccagacacaaaggctggaagagacagagatagggacttaacaactacggccacagct

SEQ ID NO: 36513 - DNA, 1030 bp, Artificial sequence
  DNA replication origin
gcccgtgctccgccgccagcccttggctacctccccgaaggtccccttgcccaagacctcgatgatgtcgtagcagtcagtctccgactggatggtggacatggtgccgctgctgccagacaccgccctgcccaggcccctgtaccactggctctgccgcccaggcctcccgcctggctgctgacacagcaggccccccagtgggggaaagagaaccgcactcgtgtctcctcctatgaggttggcccctgcttccctggcacccccaaacccccaggccacactgtcagtctgccaggggctgcacccctccccagaaaccctcctggcttgggatgaggggccccaggccccaccgaatgggttccagcgctgttgagtggctctggttctgttgttggagacctgagccctggctggagtgggggtggggtaccaggctgggccccctcccccgcccagtggcggaatcttgcaaagaccaaacaggtgaagtgttgacagaggggggtctaatcgtgggccttgggcatacaggaatggggataaggcaggagtgaggaaaggtgggcttcttgagcttgggagatgtgatgtgtgtgtgtctgtgttcagaaaactcctgtcccagtctgtggctactgtggggtgaggttgtaaaaggccctgaatgccaggctaaggagtttggattctgttctgagggcactggggagccacagaagggctttgagcaggggagggcagggtcagatatgagtgtcagaaagttactgtatgaaaagggataggttggagcgggtaagagtggaagccccaagccagggaaagagtccaggacagggcacagatgggagaggttggggaggagagggcgaggccaatggatgagacactcaaaaggccaggagaagcagccgtgagaccgacggtttgagggaaaggcgggagctgtctaagaacgggcctagggctctgggatgaaggggcagtccccgagaaatggacatggataagaagcagcttgggg

SEQ ID NO: 36514 - DNA, 1252 bp, Artificial sequence
  DNA replication origin
tgagaggccaaggtgggcggatcacctgaggtcaggagtttgagaccagccttgccaacatgacaaaacctcaactccactaaaaatacaaaaattagctgggcatggtggtatacacctgtagttccagctacttgggaggctgagatcgggaggctgaggtatgagaatcgcttgaacctggaaggcggaggttgctgtgagccaagattgcaccactgcactccagcatgggcaacagagtgagactctgtctcaaaaaataaaaataaataaataaatgataaaataaaatgcctaaggtcactcaagtgactgccagagacagcctctgaccctaagcagcctggctccagcgccaaactctgaaccaccacccacacaacctcctaaaaaccaggagacctctggagaaggggtgcagaagctgctgggtccccaaggggatgcaggagagagtttgggagttgtcagcacagagaggaggcgtggaagccatgggggagggtgatgcaccctagggagggtgtgggggtggacaagggcccgggaggaacctccggtgcccaaggagcacggggagagagaggtgtggggaagaggagcaagtgtcaggaagatcgaaggggccttgaagagtcaggacaagagagacaaaggaaaccctcaggcgtggccacggggaggtcactgctgacacagacaaggtaggaggaaaaccccaaatgctggggtcttggaaatgggggtgcactgtgagtgtagataactcctgccatgtttggtgggggcaaagaaaaagtgtgtggtgagacagtgacctgaggagggctggctggaagggacaaggtactcaagtgagtgggggattctgccaggcccctcatccactgagacaggatagggagatgtgaggagagtggggggctgtcggggcgagacttgggactggatattgagtctccttagtccagtgtgggacatcacagagagacatggaggaggctggaggccctgctgggagcctcaggacttagatcctgaattgggatggcagggatggatggcccatggcccctgggagctgagaccagcactgacaggtgctgaggaccctgggacctagttccaagaggcggctgtgtttctggggtagaggctttgaggggaccaggagcagccttcctgggtggggccagagtggacagggcagtcaaaccagccagacaggaaagagaaggccaggatgtgc

SEQ ID NO: 36515 - DNA, 1210 bp, Artificial sequence
  DNA replication origin
ctgccacatccagggtgggcaccactaccgacacagccccttcccgggtctctaggcagggaagtgtgggcagagtgggcagtgagggcaaggcaggcagctccacctgggggacctggattcccacggctggggcctccacagcaggcggagccggggctccgagcccaagggttggcaggtggagggcaaagccaccagctgcctctgctgagggggcagccttgggggctgagacctgggggacacccacctccgcccctggcagccgcggcccaaccagctccacctgaggggctgtgaaacgagctcctgcagccacctcagcctccaccttggctttcctggggggaggagcggcggcggccagccgggctgcctgagcctcttcggccacttctcgtacacgcagccgaggcagctggaggcgccggcgggcaggggcagccgggacaggacccttgacagcctcggctttgaggccccgacgcaggcgggagaacttgggaaaggagaactcgacgtcaacaggggccaggtcagcggggacccccagagccccaggcaccatcttcttcttcttcacaggggacagactctggatgttctggggagagaggagagaggcaggaggcggtgggacagtgggaggctgggagtggacaggaagagccccacctggtattggaccaggcgggggatgtgctgggtcaagtatcttgttccccaaacatcatccccacttcttgcctgtcatttcaccatgagtgcccaggaaagcaggcagccatctaggatctccaaatgagtcaacaggagtgtagggacggggacccaagacttctagatcctgatccgggattttccccaacatcctcattctagagatggggaaactgaggcccagggagagaaacaactttgtccagggccactcagcagtaattgggccagcactcaggctggaatctggctttcctggttcgaagtagcctggttcaggacccctagcaagcctggatccgatggtggggacgcctctccgaggtgggtgagggccctgggctggggtgggtctgtcccccttcccggggaagagtttggggcagagaggaaggggcagagggtggaattagcttgggttagtgacaagacagagggcaaggctggcccacgatggcggggaatggggctcacggcgcagagaccg

SEQ ID NO: 36516 - DNA, 1204 bp, Artificial sequence
  DNA replication origin
gctactcaggaggctgaggcaggagggtcgcttgaacccgggaggcagaggttgcagtgagccaagatcgcgccattgcactccagcctgggcaacaagagcaaaactccatctaaaaaagaaaagaaaagaaaagaaagacagacagacagaaagaaagaaagagaaagaaaggaaagaaagctgggtgaaagaaagaaagaaagaaaaagaaagaaagaaagaaagaaagaaagaaagaaagaaagaaagaaagaaagaaaggaaagaaagctgggtgtagtggctcacgcctgtaatatcagcattttgggaggctggggtgggaggatcagttgagcctaggaatttgagattggactgggcaacatagtgagactgtttagaaaagaaagaaagaaatcagggagagggaaagcaaacatctatggagactgacaaggaactcccagagacgctccagagggtgtagcaccttggaagccaagggaagcaaggatatgacagagagtgaggttagatcagatgctgagtggtttaagcagatgaggcctgggacttgacccttggacttactatacagaggtcactgcctggaaccttgagaggagcagttcagatgtgcgtgttggaaagcagggtcagaggtgtgactggagaactggtaacaatgccactggagaactcaataccttttgcctattaaggtgaacagataaatggggcaggagctccgggggagtgaggccatgacaacctttcttatgcgagaaataataatatgtttgtatgctgatgggaataatgtagacgagaaggacaactgatgacgtgggaagaggagagaattgctggaggatgtccctgagaaggcggtggagagattgccctgagctaggagtggggttagttcatccccaggaacaggaaggcgaatggagtaagtcgccgcaggagaaagggggtgaacacacagtgtgggagattctggaagttcccttctgattctgttctctcggtaaaagaagcaaagtcagtatctgaaacgtaaggatgggtaggggagcgacaaggtgcgggcgtggcctgagtgggcgcggctttgttcattgcagggggcggggataaggtcatggggcggggactagcgtaactgcgacttaatcctgcgctggggattggagaaactaaaatttggggcggg

SEQ ID NO: 36517 - DNA, 1061 bp, Artificial sequence
  DNA replication origin
gtgtgccctgaaggcccgctgaacagccgcttttggccgggcgcggtggctcacgcctgtaatcccagcactttgggaggccgaggcgggaggatcccttgggcccaggaggagttcgagaccagcctgggcagtgtggcgagaccgtcccccacccccgtctctaaatatatataaacatatatatgtatatgagccactgttgagcgcaatggcgggctctgggcgaggtccggccctagagccccaacgcgacacctcgccgccctctgcaggagctgaggcgggcggagttggtggaaattatcgtggagacggaggcgcagaccggggtcagcggcatcaacgtagcgggcggcggcaaagagggaatcttcgttcgggagctgcgcgaggactcacccgccgccaggagcctcagcctgcaggaaggtgggcgggcccggggtgtggggcggggtcgaactgcgggggcggggttaggaatctgccttgggtccaaagagaggctgaaactgaccgggggatgggggcgtgaccggcgaccaggaggggttaagggcttggggcggggctttgctgactgttcacagcaaattccggaggttcactgtctgggtgcgaatttcacatcccccgtttactagcttgtgatctttctgtgcctcagttttctcatctctgaaatgggacttattctagtatggggttattatgtattgaggatttaacgagtcagtatgtgaaaacacttagcacatagctaagtggcacatagtgcttaactatgtgagtgctagtaaatgtttttgttgttggggcaggagaaaagggtggagtgagccacttagaggggttgggaagagtaaaggatgttttaggatatggatgaagctgacgtgatttattcatgcaacaactatttattagtgccttctatttcagactttatttatttatgtattttgatacggagtttctctcttgttgcccaggctggagtgcaatggcacgatctcggctcactgccacctccgcctccctggttcaagcgattctcc

SEQ ID NO: 36518 - DNA, 792 bp, Artificial sequence
  DNA replication origin
cagagcccgccattgcgctcaacagtggctcatatacatatatatgtttatatatatttagagacgggggtgggggacggtctcgccacactgcccaggctggtctcgaactcctcctgggcccaagggatcctcccgcctcggcctcccaaagtgctgggattacaggcgtgagccaccgcgcccggccaaaagcggctgttcagcgggccttcagggcacacgcccctcggcgctgccctcgcaggacgtcggggcacacccactccggcgtctcccctttaagcaagcctgagggcagctggctttctaggacccgcggaacggttaaacagctccgcgggccggctggcctctccgaggccctggagcggcagccgaaaggggttaggggaggagacggggttgtaaggggagggactgcgtcggagtgggctggagataacttgagttgtgattgagaggcgggaccaggatcgtgggggcgtggtcaggtcgggagggcggggctggggggggttggtgcgggtaggaggggtaagacaacacaggcctgagaggaagagccaaatggggtatagaagggtgcaaaagataggagaggaatgtggccagagtttatgggaggttatttggagctggggcggagacccttattatttttttgttgggggagacagggtctctcactctgtccccaggcttgagtgcagtggtgtgatcatggctcactgcagcctccacctccttaaactcaagcagaccttccgctccggtctcccaagtagttgg

SEQ ID NO: 36519 - DNA, 1216 bp, Artificial sequence
  DNA replication origin
ttgtagagacatggtctcactatgttgcccagggtggtctcaaactccttgcctcaagccatcctccttcctcagcctcccaaagtactgagattacaagtgtgagctgcctcaccctgccaataagtacacttaatgataacattattatttcttcagtgaaccatgtggaatggccaatattcaactttttcccctacaaaagcagctgtttcacatattttattataataacataattatatctaaataagttataatattataaatactaaactagtttcacgtagtttaatatttattgtctactatgactatgtttcaaacagtaaataaataaggaaacacaggaaatgtacagagaattacaggaagacactaaaagttcctagagaccttttagatcatcagagaaggctcctgtaaggaggtgacatttgaatggagccctcaggccagagaagtcagccatgggagaccctgggaaaagcattccgggaggagggaacaacaaaaaaaggcagagaaaagcccagaggctggatgggcttgaactggaaagagaccagcatgggtggcacacagagagtgacatggtaggagaccagattggggagcagctaggggaacgggcacaagccaggtcacagaaagccacatatgcagaagtagggagtttggattttatcctgagtgtggtgggcagtcattaaaggaatttgagcagggagggaatggtgctgtgagctgattaggtttccggaagatcccccccatggctgcttcgaggaagactgtggggggcaaaaagaggggggatctgagacccactggtaggctgtactcgtttgggacggacgatggtgatggcctggagtaggagctggtagtggcatggaaggaagtcggtcgagtcaggacttatttgggaggcagaatagacagggcttgtcgggaaatcgtgatcggcaccgggttcagtcactgagataagtttgagggtccactgttcttggagtggcgggggtagggctggagttttggactcctggcgctacctacttttttgggccaggaagactgtagagtccagtttcggaaccctgcctagcaagattttaagaatggcccaccacactactcaaaacagggtcttcgtccccttccccgcagtccggggagtccggaaccgcaggaattccgcccccacccccga

SEQ ID NO: 36520 - DNA, 1276 bp, Artificial sequence
  DNA replication origin
tccagtttcggaaccctgcctagcaagattttaagaatggcccaccacactactcaaaacagggtcttcgtccccttccccgcagtccggggagtccggaaccgcaggaattccgcccccacccccgactccgcccccgggtcccggcgccccctagcggtgcccaggccggctttcccccggggattctggcccctctgaccccaggaccccttctactgccccgattcccggctgtgattcctgccggcctcccggcgccgtgcgagccgggacccctggcgggctgttctctgcgcccggcctccgctcgcttccggcagtggaggcggctcctcccgaagcggcggcggcgggggcgggtgagtcacgcagccggagccaagaagccggcgcctccgcccccttctcggactgcggcgtgattcacccggcccggccggggcagacagcacgtagaggtccgtgcgtctcgatcccgggcagccccggcgggcacctgtcggacccagggatcgaactctgtgaaggacccggccgctggtagcccttctgttcccaggccccttcatttacataccttgctcactagcggccaatcagaacgaagaggtagccacccacaaccaatcaggaaacggcggcggcagcatcgcttgttggctgtcctccggaaacccgcgcctgggtcgcgagacgcagttctgactccggctcacgactccagactcctaactacccttagcgaccgcccactctcgtggctgccccgccctccgccccagggattggccctgcatggtgatgggcggagcttgtagggggcggattctgaaggaggggcttcagggcgcatgcccgggcagctgcgcgagtgaggggtggaaagaggtggctttttactccggggaacggtggcgagtgggggcttttgcctctcaaaatacgagcccctcacaactacccatgcacctgccaaacccggcaattaagcttcttacacatccagccccgacaggggtctacactacagataatgcccgggttcaaattccgactccggattccccactcactggatgcgtgaccttggaaaaatgatcaacctcttcaagctacacaaagttaaatggggatcgtcttgcctacctcttgacaggatactttaagtaggatcgtatctataagaacacaataccacactcaagcaatgctggacagttggacttaattgtggttaaaggcgggagtgaggtgggagtgcgataccaacgga

SEQ ID NO: 36521 - DNA, 1818 bp, Artificial sequence
  DNA replication origin
catggtggccggcgcctgtaatcccagctactccagaggctgaggcaggagaatcgcttgaacctgagaggtgaaggttgcagtgaactgagatcaggccactgcactccagcctgggcaaccagagtaaaattatgtctcaaaaataattaagtaaataaaaagaaaaataaggccgggtgtgggggctcacgcctgtaatcccaacactttgggaggccaaggtgggtggataatttgaggtcaggagttcgagaccagcctggccaacatggtaaaaccccatctctactaaaaatacaaaaattagctgggtattgtgatgcacacttgtagtcccagctactcaggaggctgaggcaggagaatcacttgaacccgggaggcggaggttgcagtgagccgagatcacaccactgcactccagcctgggtgacagagcaagactctgtctcaaaaaaaaaaaaaaaaaaagaagtgaaaatgtgtaagtcagccaggtggtgataaatgctgtgggggcaggggggagcagaggagtgaggagggtgttgcaatttacataggatggccagatagggcgtctgagacaaggtgacatttgggtaaaaacctgaagaagggccaggcacgttggctcacccctgtaatcccagcactttgggaggccaaggcagtcagattgcttgagcccaggagcttgagaccagcctggggtaacatggcaaggccctgaggtcctgtctctactcaaaaaaaaaaccaaaaaaacaaaaaaaacaaaaaaactgggtgtggtggtgctcacctgtagtcccagctactagtgaggctgaggtagaaggatcgcttgagcccataatgggcagaggttgcagtgagaggaaatcccactgctgcactccagcctgggctacagagcaagaccctgtttcaaaaacaaaaacaggtagggcgccctggctcactcctacaatcccagcactttgggaggctgaggcaggcggattacttgaggtcaggaattcaataccagcctcgccaacatagtgaaaccccatttctactaaaaatacaaaaattatctgggcaaggtggcagctgcctgtaatcccagctactccggaggctgaggcaggataattgcttgaaccggagaggtggagattgcagtgagctgagatggggccactgcactccagcctgggcgacaagagcgaaactccgtctcaaaaacaaacaggccaggcgcggtggatcatgcctgtaatcccagcactttgggaggccgaggcaggcggatcacgaggttaggagttcgagaccagcctggccaacatggtgaaaccccgtctctactgaaaattagccgggtgtggtggcgggcgcctgtaatcccagctactcgggaggctgaggcaggagaattgcttgaacccgggaggcgaaggttgcagtgagccgagatggcgccactgcactccagcctgggcgacagagcaagacttcgtctggaaacaaacaaacaaactttttgtttaaaaagtgagccaccgtgccccgccctccccctttccctgcagctctctgcctgccctgaagataaccctgggaaggggaatcgcacagttccttagcaccgcgatgaggccagtaagaggagcaccctctttccagatgaaaaaactgaggctccgagaggcccagcgccttccttaacaccgcacttgttaaaaagaactggccacagaagtggaaaggctggccctgcagaaggaaccgagtccccgagggcagtgtccacgttccccaacctgc

SEQ ID NO: 36522 - DNA, 1265 bp, Artificial sequence
  DNA replication origin
cgggggcgcggcctcctccggttgctcggccccgcccgcctgcacagcgacttggggaggggcatgccagcccctctggctccacggtggagtccaggcctaccataaaggaaccgcagggagcaatggtgacgatcttggagcgaggactgtagctgagtggaaggaagcggttctgttggaccggccgccctccaccccggagtcgctgccccgccccctgccagttgcacttctttaaatggcccggggcgctagggaggggtgggcggatccggcgtctcggggcacgggcggatggctccgcccagccaatcgacgccccgcggcgggcgggactccagccaatcgcggctcgcggctcggctccggggcggggctggtgggccagaggccagacggagaggccccgccgaggtgagcgaggctccaaccggtcactggtgggtcctggcactggcgggtcgcaacgctgtgggcgttccaggaggtggtcgtggcgaacctggcagctgcggtgaggagtggtcgcctggcttgggaatttaccttaggctgggggagagagaagcgcgccccggggacttgcggaggcggggtctgggtgggaccgggggagggggcctcagattcagggtgatgatagggagggtctggggacctgagactgagttcaagacccaggaggggaggcgaggttgttggggcagtattttcaagtggagggagtttgaagctgggacgttgggcttttggagaagcgagagaacagaggggaggaacttttgagacagggaacctggagattcgattccacttgggtcttccggacgggttgaattcggggctttatcgtgttctggaaaaggtgtgagaggtacggagctgagattctgagtatttggagaagcgagagaactagggtcaaggattcttgggactccaagacgcactggcgggggaaggaggttgccgggaagagttcaatgttcgggtcttggagccggacagcgagtttggaggtgaagtccaggggcgtttgaaagtcaggagactaggagaagtgggaggaagtatcagaattaggatacgtagtctcccgaactagatcggagcattgtcgtctttgagcgatgtgttcggatctgggtctctggatccaagggcagtttggaaggagaatcgcggactttcaaggaacagagggaccgggagaaagcaaatttagagccggagtctggggtgggggaggggtgttccgggcc

SEQ ID NO: 36523 - DNA, 985 bp, Artificial sequence
  DNA replication origin
gagcctcgctcacctcggcggggcctctccgtctggcctctggcccaccagccccgccccggagccgagccgcgagccgcgattggctggagtcccgcccgccgcggggcgtcgattggctgggcggagccatccgcccgtgccccgagacgccggatccgcccacccctccctagcgccccgggccatttaaagaagtgcaactggcagggggcggggcagcgactccggggtggagggcggccggtccaacagaaccgcttccttccactcagctacagtcctcgctccaagatcgtcaccattgctccctgcggttcctttatggtaggcctggactccaccgtggagccagaggggctggcatgcccctccccaagtcgctgtgcaggcgggcggggccgagcaaccggaggaggccgcgcccccggggttccgagggaggacgctggggcgcgggggatgacgtagcggaagaccagccaatagagtggcgcggcccgcgttgcctaggcgatcgtagcctcgcccccttgctgcccctcccgccccctatacgttaccgcgcggccccttcttaatcctcaggttttctcagcacgtcctctggtggtcccacctgggtcttctgacaccctctttccttccccgctccatcaagatgactcctctgctactgttcatggcttcctacccaccccgaatacaaacttcaaactccttccttttgccacaaagcccctcacgaccttgcttgatgcgttctcctggttctctccgatcctgccccattgagtcacttccagtttttctaaaatggcttcaagctcccattcaccccatcaggaaaacgaaaggattttctctgtttgttttcttccctgctttaccccagtgtctacaacaatgccaggtacataataagttcgcaaacatgacaataaaaggcctctggatctttattattaatattattttttgccgg

SEQ ID NO: 36524 - DNA, 1188 bp, Artificial sequence
  DNA replication origin
caaaaacaaaacaaacaaaaagaaaaaaccaaaaatgtttgaagaccacttccccagaacagaggaggggatggatttgagagttcatggtggcttctaggacccagctcctggagcccaagagtgccagcccactgaccaggctctctgctcctctttgcccacaggttacgaagtgacagtgctggtgcgggactcctccaggctgccatcagaggggccccggccggcccacgtggtagtgggagatgttctgcaggcagccgatgtggacaagaccgtggctgggcaggacgctgtcatcgtgctgctgggcacccgcaatgacctcagtactgagccccccctctgcccacggccctcccctacacctcggcccccagcgccacccccgcccccggccccgcccctgccacccctgccgccgccgccgcccaccagtgacagccactctctgtcccctctaaggtcccacgacagtgatgtccgagggcgcccggaacattgtggcagccatgaaggctcatggtgtggacaaggtcgtggcctgcacctcgggtgggtggtgggatcatggaggtggggctgaactggggggtactggggaggcagcccaggggcctctgaaaggtgacgctgaagccattccatgttactgtgcatttactgaacaccagctgtgtgcctgaaccttactgggtgatgctggggacacagtggtgacctgtacagccctgggccctgctcacacaaggctcacagagagaggtggtaaacagatccatgatcaaactgacatccagatcatcggagctgggatcgggaggcaggcagaggggatagggccacaatgggagaaactacaggactatgggagcccagaggaggcgtccgacttaggctgagagaggtcagggtaggcctcccagaggaagtgatagagctgtggatagacactaggtctctgccctcacagagctcccgattatggggacacagacattaagcaaatagttgccctgtataatcatttatttatttatttatttatttatagttattttgaggtttgtttgagatagagtcttgctctgatgcccaggctggagtgcagtggcgtgatcttggctccctgcaacctccgcctcccggaggtggttctcctgcctcaagtgattctcctgcctc

SEQ ID NO: 36525 - DNA, 1152 bp, Artificial sequence
  DNA replication origin
agcgcggaggcagggcgctgagtgacaagttatctcggctccgtccactctatttgttgctatgtggaggcgtggccttctgtggccccgccttccagtctaagtggcgcgcagagagggcggtgctggacggtgagcgaatgcaagctgacgcctgccccgcccatccgcgttaggccccgccccttgacctgagccgcgggcggagagtctgaggcgtggcccttcgagccagctccgccccgttgttcctggcttgagtagggcagagagcaccgcccagcagccagtgggttcccgcgcgtgccgagactctgaggccttgcacccccacgatcccgtacgatggccgtcaagaagatcgcgatcttcggcgccactggccagaccgggctcaccaccctggcgcaggcggtgcaagcaggcatgagccggggcgggcggggcatgtcacgggacagacgggcagaactttaggaaggggcaccatggggtcgggccgaggctgattggggccatgagcgccccagccaggtgtatgaggactcaggggccaaagcaagtggccacgggggcagaaatggggaaagatgtgagatccaagtttatgtgagtccaagccagagaggaattggccccgggagccccgggaggactccactggcacagtcgtgtgtaagtccagggctcttatgcaatgcggttgtcattattgtggttgtggtggtggttgttcgcactcccagagaggatttactaagccaagcttgctctgtcgtctcttcacatgagagctttcaaaatggggtgggaactagtatcaccctacttgacagatgagaaaactgagacccagagagtgacttgcccaatatcacacagctgttaactgacaggactgggatttgaactcagctcatgctcttaaccaccacaagtccccaggctggaaactgaaaaagttggggggtcaggttgctgcgagtacctaatgggaaggagtcacagagagacatgagtgaagacttggggacagcagtcctgggaaagtcaatgagggctgaaaatttggagttgccccaggagagagggcagaaaaggggataaccatcccccagcactccctgcccccacagcccagacttgaccaac

SEQ ID NO: 36526 - DNA, 1266 bp, Artificial sequence
  DNA replication origin
tgggggtgcaaggcctcagagtctcggcacgcgcgggaacccactggctgctgggcggtgctctctgccctactcaagccaggaacaacggggcggagctggctcgaagggccacgcctcagactctccgcccgcggctcaggtcaaggggcggggcctaacgcggatgggcggggcaggcgtcagcttgcattcgctcaccgtccagcaccgccctctctgcgcgccacttagactggaaggcggggccacagaaggccacgcctccacatagcaacaaatagagtggacggagccgagataacttgtcactcagcgccctgcctccgcgctccacctcccggagaggggcggggccaggcgagcctcacccacggcctctcgtagctcacgccccctctcccggagcctggagcggatctggggcgcactctaagccccagggcctcccagaaccagcaaggggagaaagttaggaggacagagtgtgtgtgtgcacttggatgtaagacactgtgtcacggcgtacctatgcacttatatgaccctgtgtgactcagtgacccggagggcaagcaggactgtgggtgacaccttgtgtcatcctctgagtgtgatcccgtgttacagtgtgactacacgtgcgtgacaccacgtgtggcaggcattgattctgttcttttgtgaccttgtggtgacaccgtgggtgacactgcgtcagcctgtacgatagggtgtgggacgtgtgaggtgtgctacatggaagcgtgagactaattagactgtgacagtgtgtgacaccacatgtctcgtgtaaggatgtgtgacaccgggaccccattcgagtgtgtggctgtgggtgtctgtgttgagctgctcattgtgaccccctgtgactatgatgtgtgaggtgcggcggtgcagcatgtgcggggcgactgctatgaaggttcgagtgtgtagagtgtgtgacactgtggctgtgaagctgtgcgtgatgtgtgggcctatgacactgtttgtgactgccggggagtgtgcggctgtgtgtgacaggtgcatttgtgtgtgacgccgcgtgggcggtggttaccctattggatttgtgtggtggtgggtgacaccgttccagtgtggacgccgcgtgtgacggcgtgagggtgtgaccccgtgagaccccacaggagggagtgacggcgcgcaagcgcgtggatgcgggggtgagtttgtgcgccgaggcccccgcgagtatggcagcgtggcgag

SEQ ID NO: 36527 - DNA, 2441 bp, Artificial sequence
  DNA replication origin
actagccgggtatggtggtacatgcctgtaatcccagctactcaggaggctgagacaggagaattgcttgaacccaggaggcggaggtcgcagtgagccgagatcgcaccactgcactctagcctgggtgagagagtgagactccatctcaaaaaaaacaaaaaaaaagagaagaaatttaaagggttaagtgacattagatgtatctcctttaccttctgggcccccaggcctgattctaagactaacggctgggcgtggtggctcacacctgtaatcctagcactttgggagtctgaggcgggtggatcacgaggtcaggagttcaagaccagcctggccaacatggtgaaaccccatctctactaaaaacacaaaaattaggtgggcaaggttgcaggtgcctgtaatcccagctactcaggaggctgaggcaggagaattgcttgaaaccgggaggcgaaggttgtagtgagccgagattgtgccactaaactctagcctgggcgacagagtaagactccttctcaaaagaaaaaggaaaaaaaaaagactaacaaaggaggaagttgggagatcaatgtcctcaaaagacccagacaattgccaacccactgaattctaggaaggcagggtctaagtcttggtcagtagagtgagtagagtggaaattgtcccttagggggacacattgaaatcttttttttttttctgagacaaggtattgctctatcacccaggctagagtgcagtgacacaatcatagctccctgtagcctccaactcttgtgctcacgcgatcctcccacctcagcctcctgagtagatgggactagaggcaagctccaccatgaccaggtaatttttgtattttttgtagagagggggtctcactatgttgctcaggctggtctcaaacatctgggctcaagctatttgcccacttcaacttcccaaagtgctggggttacacatgtgagccactgtgcccagtcccaaatccatttttgttcttccctccttccatggaaaagtgaaagtgagcacacagctacctaccacctgtgtgaccttggctgaaatacttccactctttgggccttagtttgttcatctgcaaaatagtaatgatggcccggcacggtggctcatgcttataatctcagcactttgggaggtcaaggtaggtggatcacttgaggccaggaattcgagaccggcctggccaacatggcaaaacccggtctttactaaaaaaaatacaaaaattagccaggcgtggtggcacgtgtctgtagtcccagttacttgggaggctgaggcaggagaatcgcttgaacctgggggatggaggttgcagtgagctgagattgactcactgcactccagcctgaatgacagaatgaaactctgtcacacacacacaaaagggtaggccaggcggtggctcacgcctataatcccagcactttgagaggccaaggaggtgggtgggtcacctgaggtcaagagttggagaccagccttaccaacatagtgaaaccccatgtctactaaaaattcaaaattagccaggcatggtagctcatgcccgtaatcccagctacttgggaggctgaggcaggagaactgcttgaagtcgggaggcagaggttgcagtgagccaagatcgcgccattacactccaacttgggtgacaagagtgaaactccgtctcaaaaaaaaaaaaaagtaatgataatcgtacccgtttcttagcggtgtttgaagaggtaagttattaatgcagggatcatggtatctggtacactgcaagcccttgatacatgttccttgctattattcttcatcttttcctcacacatctcagcaaatcgatttgcctcttctggagtcagacagaaatgagttcaagttccgctttattcttgctgtatctttaaccgagtatctttaacttggcctttctgtgcctcagtttccctccctgttaaacggtggttacagctgttttcttcagtggaagacacttagagatggggaggcccttagcactcctgttagccctctggccaggccgaggatcagctctggccataacgcgattgaatgggaaggaagggagcaggtaatagggaagccgggaaggggtgtcctgcgagcctccccccaacacccccccccccccgcaaaggctggtggggcgctgggctgcggtggcatcagaggctttaacccttcccaggccgcgcctctctccctgcggtccagacactgcgcccaaggagggggcctgggaaggacaaggcctgggggtaagacccacgcgtggcgcggaagctagaccgggtgggggggttgtgggctcgtcctgccctcgaccctttgcctccctccagccggggagacccggggctccagccatgccccgtgcgcgcgga

SEQ ID NO: 36528 - DNA, 1210 bp, Artificial sequence
  DNA replication origin
gactcttgcagagagctgggtctgagcaggcttggctcgcggagggctggggtgaaggtggaagcgcctgggggctcatcagggcctctcctccagatgagcgggaagccgtgcagaagaaaaccttcaccaagtgggtgaactcgcacctcgcccgcgtgggctgccacatcggggacctctatgtggacctccgggacggcttcgtgctcacgcggctcctggaagtgctgtctggggagcagctggtgagggggcctgaagggctggggcaggggtcctccctggggtctcaggctgggggttgggcttctctggaagggctgaactgcaagcaggggcctggctcatgggcgagtggaacgtgctggaagggccctgtgggtaagaggtccctctactcgggtgtgtggggctgtggcgctggggcggagcttggtcgtgagaagcctgggcgcgtggctggaaccgaagctgatggctcgctagctacggttgcgaggcggggcttcggtggaaggggccgggctctgttgcaaggggcagggctattagagaagggaggagctttgttagaagggactggcccgggttatgagctagtaggggcatgctataaaacaggggcagaactgtattgcgggttgggggtgggtagtggatgaaggtgcggggctctaggctagggggcagtgttcgttggtagggtgacacctaggtcgtcggtgtctagggacgcagacggtgtcctgggatgtggcttgttgtataaattggggctgtgtctctgggcttgaatggggtttcatctaaaagcgtgggattctcatggggtagagattcgttaaaggactggagcctggatctcaaggaattgtgaggggcatggctatggaataggaacaaacagctgggcgctgtggctcatgcctgtaatctcagcactttggggagccaaggtgggaggaacacttgagctcaggagtttcagaacagcccgggcaacataatgagacccccgtctctacggtttgtttgtttgtttgtttatttgtttaaattaaccaggcgtggtggcgcaggcctgtagtcccaagtacccaggaggttgaggagagaggatcgcttgagcctgggaggtcgaggctgcagtgagccatgattgcaccactgctctgcagcctgggcgacaaagcgagactctgtttct

SEQ ID NO: 36529 - DNA, 845 bp, Artificial sequence
  DNA replication origin
tcaggaggctgaggcaggagaatgtgagccgagaccacaccactgcactccagcctgggtaatagatagagactctgtctcaaaaaaaaaaaaaaaaaaaaaaaaagtgaccgggcttggtggctcatgcctgtaatcccagcactctgagaggctgaggtgggtggatcacctgaggtcaggagttcgagacaagcctgacaaacatggagaaaccctatctctactaaaaataccaaattagctgggcctggtggcacatgcctgtaatcccagctactagggaggccaaggcaggagaatcgcttgaacctgggaggtggaggttgcggtgagctgagatcacaccattgcactccagcctgggcaacaagagtgaaactccatctaaaaaaaacaaaaacaaaacaaaaaaaaaaacaaagaaagatccctctgggttggaggtgttcaccaacattgggagctgagagcccagggaggaggatagagttggaccagggtgggactatggggaagcaacaaggggcaggtggggaagacactcagggagtggagtggacaggccttacgggaggggagagggagagggtgtccaggggaagactcagagctctggcctggggactagaggatgatggggctgccctgagacagggacagggagaaggagcaggtttgaggaacaccctgaggccagtttgagatgggtccagtggttatgggtccaggacattggagttggggatgttccaggtagatggaacagccagtgctaaaggaccaaggagggaggatgcttgtgattcaggaaaaaggccagcaggtatggagtggagtgagct

SEQ ID NO: 36530 - DNA, 1604 bp, Artificial sequence
  DNA replication origin
ccagaccccgtctcaaaaattaaataaataggccgggcatggtggctcatgcctgtaatcccagcactttgggaggccaaggaggtggaccataaggtcaggagatcgagaccatcctggctaacacggtgaaaccccgtctctactaaaaatacaaaaaattagccgggcgtggtggcgggcgcctgtagtccaagctacttgggaggctgaggcaggagaatggtgtgaacccaggaggtggagcttgcagtgagccgagatcatgccactgcactccagcctgggcgacagagtgagactccatctaaaaaaataaataaataaataaataaataaataaataaataaataaataaaataaaataaaacagggttgataaattctctctaaccaggtcagtgtgaagatgaaagtgaacagctctgataaggttcccagacatgtgtctggcacacagtagagctcagaggaagggagcagctttaatttgggatgggagatgggtgtcagggctgatcctggtttggggctgaggctgaagtcagggatgggattagggatagactggaaatggaaaagcagctgaggatgaggatggagttgtgggagagatagacatggggatgggctagggcgaaatgagtttggaaatggattagggtggggataggaatggagttggagccgaagatgtggtggggatggagacacttgaagatggggttggcgttaggggtggggatggcgttggagatgccactgggtttggggctggggtaggggagtgggagttggtttagtgggagatggttgaaagcagggttggggagggtgttggggatgggtggaaattgagaatggggaagaggaggggttacgttgggacacggttggggatgagagaggaagaggtgtgaggatggtatgtgggagggatcgcacatgaggaaggggaggcacaaggggaggaggctgaggagacagttgggatttggaaagagttgggatttggagaggcctcaggatttgggatggtgctggggtgggatggagttgagtgtgacatggcattggggttgggagtcccccaagacgaagtctgggctgggcccgcgagaggctcaccttcaggatccagcagccgcgccagccccaggtgctgctcagctgtgcggaaggctctctgcaggttgtagttggcattggacttggtgagtttgctgaagtccacgagatcaggcctgggcaggggcacagagcaggcaggcagcaggcaggctccagagccggcgggcaagcagggaagaagccacccttgtctgagcactgcccagggcaatgggcagaagggcacagtctagccaaggggcaagctgtgtgtgctgtgcagcatttagctgtgatgtgagtgtgatggacgcgggcatgtctctgtgcgttcccgggaatgtgtgtgtgcatgtgcatttgttgctgggccggcctgtgcacacagacgaatgggtaggccagcctgagtgtgcttggaagagatgagcccacacggtgcctgcctgtgtatgtctctgtgaaatcatatgacaatacgagtgtgtacagc

SEQ ID NO: 36531 - DNA, 3340 bp, Artificial sequence
  DNA replication origin
gcttgaacctaggagctcgaggctgcagtgagctatgattgcaccactgcacaatcagcctggacaagagagccagactccatctcttgaaaaaaaaaaaagtaaaaagttgagctctgaagaataagtgggaattaggaacacagaagaggaacagtgctccagacagtgagaacagcacatgcaaaggccctgaggtggaaggtagaaaggtgtgttcaagaaacaaatataggccaggtgcggtggctcacatctgtaatcccagcactttgggaggccgaggtgggcggatcacctgaggtcagcagttcgagaccagcctgaccaacatggtgaagccctgtctctactgaaaatataaaattagccaggcatggtggtgcatgcccataaccccagctacttgggaggctgagacagaagaatcacttgaacctgggaggtagaggttgcagtgagttgagatcgtgccattgcactccagcctgggcaacaagagcaaaattccatcttaaaaaaaaaaagaaaagaaaaagaaaagtatagcttatttctctgcggtggtttatatgtgtcaggcactatttaattccaggaggtagatttctatttgacggatacaaaacctgaggaacagagaggttaattatcttgcccaaggtcacacagctagtgagagtggcttctccatccctccatccaataccttcaagcactctgtcaaagtgcccactgtcttgtttccccactccctcttgcttccagatgtgaacatggaggctccagatgagaagtccatcatcacctacgtggtctctttctaccactatttctccaagatgaaggctctggctgtggaggggaagcgtatcgggaaggtataaggagccaaggagtgggtgagtgggaagctggaagctggtggcaggcacgggtgggatgaggctgaccccccttcctctgctgtgtcaggtcttggaccaggtattggaggtggggaagatcatagaacgctacgaggagctggcggctgagctgctggcctggatccaccgcaccgtgggcctcatcagcaatcagaaatttgccaactccttaagtggggtgcagcagcaactccaggctttcacggcctattgcacgctggagaagcctgtcaagtgaggcccagctctggagggagggtgggcaggggtggcatgacggcagggctcctgagctcatgccccttcaggttccaggagaaggggaacctagaggtgctgctcttcagcatccagagcaaactgcgtgcctgcaaccgtcgcctctttgtgcctcgggagggctgtggcatctgggatattgacaaggtgaggccggggatgcaggggagaggcggggttgcactgtggagttgtataggttgcacactgctcaagggaatcattcacattgtagacatgatggattagatattcattctgacagtttttcagtagtaaagtgtcataaggaagcaatattttttccaatttgcatgaagttgccataatgctatgagtgacctcagactaagtcaagaccattaaactgtggggagctgtcagagtctgagtgcctcctcccatctcctgcaggcatggggtgagctggagaaggctgagcatgagcgggaggctgccctacgggctgagctgattcggcaggagaagctggaactactggcacagaggtttgaccacaaggtggctatgagggagagctggctgaatgagaaccagcgtctggtctcccaggtacaaggtgtagggcttggctccagggtaaagggacggagggcggggctgatggtcctgggaccagagagggagacttgatcttctaggcaacagggaagagttagattagtctcctggtgataaatgaggatggggatgggagacttggccttccaagtgattgttgggtgaggggaatgggcctgatctccagggtaatgggagagtgaggctggtctccagggtaactagagagggcagaattcatcttttcaggaatgggggagtgttttaagtgacaagggaggttgtatcttgtgtctagggtaactcagaaggatagaattggtttcctaagtaacagagtcaggtaaacctggtccctaatctccaggacaggggaagcatgggcctccttcctgggtaacaagtttaaggttagagatgtaacaggagggtgggacttgtttccagggtaactggagagagtggggctggtctctggggaaacgggaaggtggggttggtctctagggcaacaggggagggtgggtctggtctccagggtaactggggaagattgggctggtctccaggacaacaggggagggtggagctggtctccaggataactgtggaagatgggctggtctccagggcaacaggggatggggggttggtctttagggtaactggggagggtggggctggtctccaaggtaacaatggagggtggggctggtctccaggttacctgggtaacaggggaggatgaggctggtctccaggataactagggagggcagggccagtctccaaggtaatggagtggggagtccccagggtcacacagggtcaaggtaacaggtggactgctgaggcagcatgggtgagtgtctggctcactgccccaggacaactttgggtatgagctgcccgcagtggaggcagccatgaagaaacacgaagcgatcgaggcagacattgcggcctacgaggagcgggtgcagggtgtggcggagctggcccaggcattggcagccgaaggctactacgatatccggcgggtggcagcccagcgtgacagcgtcctgcgccagtgggccctgctaactgggcttgtgggtgcccggcggacacgacttgagcagaaccttgccctgcagaaggtcttccaggagatggtgtacatggtggactggatggaggagatgcaggtgccggcgggggggcggggatgcgggtggagtgccaggagggaggggaggatgcagacgctgaaagagttgtcagacagctggagatggagagggaagggcagagatagaagaagatagagagaaagccagggagacaaaaagagagaacaagagagagagggagagaaagatacagagatggacaagagaggcagacaaagaaacacagaatgagaaagagacagagacaaatagagagaaatagaaacatgctggacacggtggctcacacctgtaataccagcactttgggaggccaaggagggcagatcacttgaggtcagcagtttcagaccagcctggccaacatggtgaaac

SEQ ID NO: 36532 - DNA, 1055 bp, Artificial sequence
  DNA replication origin
acagagatggacaagagaggcagacaaagaaacacagaatgagaaagagacagagacaaatagagagaaatagaaacatgctggacacggtggctcacacctgtaataccagcactttgggaggccaaggagggcagatcacttgaggtcagcagtttcagaccagcctggccaacatggtgaaaccccatctctactaaaaatacaaaacaattagccgggcgtagtggcgggcgcctgtagtcccagctacttgggaggctgaggcaggagaatggcgtgaacccgggaggcggagcttgcagggagccgagatcccgccactgcactccagcctgggcgacagagcgagactccgtctcaaaaaaaaaaacaaaaaaaacaaaaaacaattagctgggcgtggtggcgtgtgcctgtagtcctagctatttgggaggctgaggctcaagaattgcttgaatccaggaggcagaggctgcagtaagccaaggtggtgccactgcactccatccagcctgagtgacagagtttgattctgtttcaaaaaaaaagagagaaatgaaaaaagacatagagatatagaaacagagtaaaccagggatgcagacagagagatagtgacagtttgagagagaggaaatcagagagacagagagaggagaaggcagacacaaaggtgacatggaaatctacatgactacagagaaagatacaggaagatggaatcaatttaagagagagagagagagacctaccagatctagagagagatgagacaagaaagatagaagccagctgggcatggtggctctcacctgcggtaccagcactttgggaggccgaggtaggcagattgcttgagccccagagtttgagaccagcctgatcaacatagtgagatcctgtctgtacaaaaaaaaaaaaaaaaaaaattagctaggcgtggtggtgtgcgcttgtagtcccagctactctgaagtgggaggatcgcttgagcccaggaggttgaggctgtgtgagccatgattgcaccactacacttcaacctggat

SEQ ID NO: 36533 - DNA, 1756 bp, Artificial sequence
  DNA replication origin
cgaggtcagcgccgaactggtgcagcgcccgcgcctcctgcagccgccgctctcgccgcgccgccgcctcttccagcctctgccagcggcgccgggcgctcgccgcgcgctccgccaggcctaccaggtgcacggtgtctgctcccgggccgacggcaccgccggccgcaaccagctcctcgccacaccgcagggcctgctgcagcaacgctcgccgcccgcccagctcgccctgcaggatcttgtgctgggccaggaggcgcgctgtgctggacaggtcatgcgcgccgcccgctgttcccgctgcgcccgctgcgcccgccgcaccgccgccgcccgcagcctccaggagacgctccttgtcgcgcgcccagctctcggcctcctccagctcctgcagcagcgcccacaggctccgcgaagcctccagctccgcgcgtcgccgcgctgcctgctcctgcagctccgccaggcagccgtgcacgtggttcacgcggttgcagatgacctgcgggtcgcagggctggtagcctgagccaggagaaggggagcatccaggattggtcacaagccaaggggcgcccaagagaggatggtgcgggctacctaccctgtccttggtgtgacttcatcagatgccgggtcacgtggctcctcctccaggcagccttccctgacaccccaaggctggagcaggctcctcctcgaccctctcaggcttctctgcttccccatcctagccctgactactctgtgttgtcattgccttgtcctgtctcccccactggactgagagctccttaagggcaggacctgggtctgtcacaccctatcccaaacactgcccagcaaagggtggagcccagagctgtagcctagtgaatgtagtgatttgttgactgaatgatggatggattcagagcatctcagattctgtatatttgagtgaaaattgtgcttatgtcagaactgagtcaaatgaaacttctttgttttttgtttgtttgtgtgtttgagacagattcttactctgttgcccaggctggagtgcagtagcgcgatctcggttcactgcaacctccacctccaggtttaagcgattctcctgcctcagcctccccagtagctaggattacaggcgcccgccaccacgcctggctcatttttgtatttttagtagagacggggtttcaccatgctggccaggctggtctcaaactcctgacctccagtgatccacccgccttggcctcctaaactgctgggattacaggcatgagccactgccaccggccaacttctcttttcttaaaccatgtttctaggttccctctgtcatcctctgttgcattatctatcaatcccagtggttatctgcactcctttttctttttaaaatagagacaggatctcactatgttggccaggctggtcttgaacggctggcctcaagcaatccttccacttggcctcccgaagtgttgggattataggcatgagccactgtgcttaaccccgaactccctctttttccttaaatagttcaccttcctcctggatggctagttggcgactagaaaacagtgaagttaatttaatgggtcacagccagcatttgtttggtggaatagaatagaaggaacggaaaatatcacaatgcaaaacaaggtcgggggagtatttttgttgttgttgctgttgttgtttggtattgtttgtttgtttgattgagacagagtctctcactgtcgcctgg

SEQ ID NO: 36534 - DNA, 1320 bp, Artificial sequence
  DNA replication origin
cgcatgacctgtccagcacagcgcgcctcctggcccagcacaagatcctgcagggcgagctgggcgggcggcgagcgttgctgcagcaggccctgcggtgtggcgaggagctggttgcggccggcggtgccgtcggcccgggagcagacaccgtgcacctggtaggcctggcggagcgcgcggcgagcgcccggcgccgctggcagaggctggaagaggcggcggcgcggcgagagcggcggctgcaggaggcgcgggcgctgcaccagttcggcgctgacctcgacgggctgctggactggcttcgcgacgcttaccgcctggcagccgccggtgacttcggccacgacgaagcttccagccgccgcctggcgcgccagcaccgcgcgctcaccggggaggtggaggcacatcgcgggcccgtgagcggcctgcggcgccagctggcgacactcgggggtgccagtggcgcagggccactggtggtggcgctgcaggtgcgcgtggtggaagcagagcagttgttcgctgaggtgaccgaagtggcggcgctgaggcgccagtggctgcgggacgcgctcgctgtctaccgcatgtttggcgaggtgcacgcgtgtgagctgtggatcggcgagaaggagcaatggctgctctccatgcgtgtgccggattcactcgacgacgtcgaggtggtgcagcaccggtgagcgcgcacatgtgggactccggggtccccttcctcatgcacccagtctcaccttcattggctcaacagttcccatgtttgctcagctggaactaggagttccaatccctgcttcacccatagccagctttgtgacagttctgcaacctgcctaatcttcctgaacctcagcttgcccacctgtataatgggggtgatattagtccctacccaggcttgtgatgaacggtaaatgagttcatacatgcagaatacgaagcaaatgcctgggggtagaggaagcattcccccagcatttgctcttgttacccaggcttacattcgccaagcatgaaatcaacgacctatgcttctacagggacacctcagcctggcccctctgctgggaggcctcccattgcttctgcataaatgtcacctccctagctactaaaatagctctgactcttgtgattttccattgtttcatcctgttttacatttctttgtagcacttaccatcccatgacatattgtatactgacttgtctgttggctgacttagcaatgagttgttcaattagtgggtgaacaatgcctattccccctctgcaccactctgtctgagcatctta

SEQ ID NO: 36535 - DNA, 1276 bp, Artificial sequence
  DNA replication origin
ccggcgcaggcggcgcggctgcaccagggcgcggaggagctgggcgccgagtggggcgcgctagctagcgcggctcaggcctgcggcgaggcggtggcggcagcagggcgcctgcagcgcttcctacatgacctcgacgctttcctggactggctcgtgcgcgcccaggaggcggcgggcggcagcgaggggcccctgcccaacagcctagaagaggcggacgcgctgctggcgcgccacgctgcgctcaaggaggaggtggaccagcgcgaggaagactatgctcgcatcgtggcggccagcgaggcgctgctggccgccgacggcgcagagctgggcccgggcctggcactagacgagtggctgccacacctcgaacttggctggcataaactgctcggcttgtgggaggcgcgcagggaggcgctggtccaggcgcacatctaccagctcttcctgcgggatctacgccaggcgctcgtggtgctgcgtaaccaggtgcccactcggggtgtacatttcggagagggagagtccgaggccgcggggggattgcagggacagggacatgcgggggtggggaggagggtgtttcctgggaccactgggttctgaggtgggtgggaggtgagagagtatccggaatggataactgagtttgtggaacatccagtgtgtgtggaagtgtgtatgtaacagaatttgaggagtatcatcagtggggtaggttggtgtcttatcggaggtgacagtttgtgggctatcccgagtaagtaatgcacgaggatatttattggagtggcttcctgggttcgtggattatctgaaaggaaataagactatgaggttgattggcgatggttaaatggggttcaaagaagatcttggtatggataacaaaggattaggattatggaggtaggtaacaggctgaggggttattggagtcagtcagtgattgtggattacatggtgtggatggctaaattagcacaatatcttcatttctgggaatgacaactatggattctctggagagagtaactgtgtctgtggcatgaggaaccaagtgcagtggttatctggggacagccaatccagttgggagatcactctgggatgggaaccaagtttgagaattttggcaagatggaacagccagttttcagattgtccagtgtttggggatcatgttagaaagggtgcctgcctgtactggttatataagggatgctgacccagtttgaggattatctacagcagtggtccccaatct

SEQ ID NO: 36536 - DNA, 1290 bp, Artificial sequence
  DNA replication origin
caggtctcctgaaccgtcactaataaggaagggggcctggaccatctcggattaggggagatcgtccctaatgtgtgcagatcatccctaagggaaggggcttgattactgaacacctttaaaggggcgagggcttggttcagagccatcgctggctgcaggagggcgcagggccgctggcccccccacggccctcggcccttatccccaccgcccgccccgcccctctcctggggtagagcgattctcacaaatctcaggagagaaaggtgagatcagcgcgcgtccccgcgggacccgtaggcgcggacacgcgcggttgccaggggcgcccggggcccctccttcgtttcccggagtcggcgtgggcgggcagggacttgcggagcatgcgcactgagacccggctccgcgcgccccctggcggcttagagcgagcatcgctccgcgacccacttagacggggcgtccccacccccacctcggccgagaagcacttccctcccgactaaaggggatgtctccgtccccagcacacctggagttcctacctcgtggcagtctcggaggaagtgctgcagctcaagttggtcatgtagcttttgcatccattgctgggcccgtaactggttttcttggttcctggggatggggagataagggctggggaaaggccccgggttggggggtgcggcgctggcagtaggactgtgagggcactgggctgggtaggggaagaagggcgtggaaaatatgtaagagagagggaggaattagtggggcaaagccagggacgcagggacggggctgaagaagggcagagagagagacagacagaggaagagaaagggagaggcagagacaggcacttagaaagaaagagatatagacggagagaaaaaaaggcaagtccagagagaaagataacagagaagtaaagacagacatacctagggacaaaaacaaaacaaaacaaacgagaaagtgagaggagacaccagaaagagagcgagagagagaataaaaaaagacgagaaaagagatggagcaaggcagagccagaaagaaactcagggagcagcagacgacgaaagagaggaggcagagagagggaaagtgacaggaggagtccggtcagggacagcccagagagagacaggcagaggagtggcaaatgccaccaggaaaagacagccccacagacgacagacagaccagggggccgcagagttggagagagggaagagagcagagtgtggggagagatgacagcagagtcgcagagaagct

SEQ ID NO: 36537 - DNA, 1202 bp, Artificial sequence
  DNA replication origin
accgcggacagctcccggcgtccttgcccctcccccagggtgggggtccgggcgcctgcccggcccgcccccgcgccgccccgcccctccctcccgcggccacgacgggcgggcacgcgcccgagccccctcccctgtctgcgtccgcggggtgcgcgccaaccccctcccctgggcgcccccgagacctgaagcggcagtggcgttggcggggcgtccctgcagcgggcgggcgggtgctcgcccctcaactgcgacggcagcggcagcggcggcgaaggctgaggctccggcggccgcgcgccccctccctcgcccccgcgcggcggccgcgcgcccgcccgcgtgcgccccctgcctgcctccctgcccgcctctttgcggggccccaggtgggggtgcaggaggaaccaccactcgccccaaggcttcgggtggggggcttctgcgccatctcagatgattgctgcctgatccagaacaatctcatgagggatggggggtgctcctggaccaaatctaatgccgggagggagcgcctggggcttggactgcctcactaagggagtggggattatggtgaggggctgggtgggggcctcctgaaccatctctaatgggaagaagctcgggctcctggccaccacatgtggacaggggatatgggagggcgacctggaacatctcacaatctccagtgggggcgagggggaacagggggttcctccagtggctcaagtcccggcctaccccagttatgggggaggggggcacggtatggaggcccttgtttattccgtgtgcggagagaacaatctcccatgggtgttcaacataggggggagggtcgaatcgtctttaattgaggctgaggggtttaggggttagacctggttcctgaaccagctttggttggaagaaacttaggtacggggtgatgatggaggaggggatgatcctgggtcacacagatggaggggctcagggccaggcctagctctgtttagggtttaggaaaatgtttactaggccatctctaatgtggccaaagtctagaatcgtttctatggaatgcaagggaaggaggggaagacagcaggtctcctgaaccgtcactaataaggaagggggcctggaccatctcggattaggggagatcgtccctaatgtgtgcagatcatccctaagggaaggggcttgat

SEQ ID NO: 36538 - DNA, 2208 bp, Artificial sequence
  DNA replication origin
atctgagatggcgcagaagccccccacccgaagccttggggcgagtggtggttcctcctgcacccccacctggggccccgcaaagaggcgggcagggaggcaggcagggggcgcacgcgggcgggcgcgcggccgccgcgcgggggcgagggagggggcgcgcggccgccggagcctcagccttcgccgccgctgccgctgccgtcgcagttgaggggcgagcacccgcccgcccgctgcagggacgccccgccaacgccactgccgcttcaggtctcgggggcgcccaggggagggggttggcgcgcaccccgcggacgcagacaggggagggggctcgggcgcgtgcccgcccgtcgtggccgcgggagggaggggcggggcggcgcgggggcgggccgggcaggcgcccggacccccaccctgggggaggggcaaggacgccgggagctgtccgcggtgctggcgcgggcgggactgaggggccggcccccaagggaggggagcgaagcggggggacttctaagaccacttctagggtaatctggatttgccctaagggttcagggcgtctcagcctttcgagggggggctcttctccgggtaatggggcatctaagatttgccctggggttgggggtttctcaaccttttggggggtttctttcttgttttgggaggatctgtatcagccttggatgatggaggtgaatcacttttggggggctctgccttggaagatgaggggccttggattttctctgggtctagggggctctgactttgtggggcttttcctgggttgttggatagtctggttttgccctccatcatgaaggaatcacttttgagggggctttactttgaggatggggtaccatctctttaagggctctgctttcactgcgggctgtggttgccgttggactcttccctgcacgtcgggaacctgtgaattgagttggggggttcagcactggacttggttctagtgtgtgtatgaaggagtgtgatgctgtcctggacccctggggagcacatgctcaggggacatgggctggggtttggccggctggggatctgggatttgtccttggctatgactgcatttgcctcccgggaccgcggagctggagtccagtgtttgtttttttttttttttttttttttttttttttttttgcaggagggaggagggaggatcttgtgactggagtggggaggagaaaggggaggagcaaactgtttcaggtgccaggtttggtcatgagtggggaagttctggcttggaggataagtctggttttttactggagggggttgggggaggctcaaaaagcagcctgtgattgatcctctctagtgccgtgagaggggcccactcttggtgcttgcgttttggatgactggttttgttggtgggtaggaggactagaactggctttagttgtaggggtgggggtgctggccgggcttgggaggtccgatctgatccacgatggagagtctgtggctagattttggggtagactggtttggagagccagaacacagctttgtttttcacatttggctggggttggctttggttgagggctagaactggtcatggtttggggatctatggtcttagagtcccagggctagaactggggagccctgtgggctcattaggggtgctagatctcgattatggaggatgggtctactccagattagagggttagtttagagagagctagagttggctttaattgggaggttgtttggggggtttatctggccatactggaggaactggggctagatatgggggcttcatttgatacccttgggaatgggttgaggctcttgaattggtccttattggggggtggctaagattgaatgaagtgtctaagtgttgctatgggaggggtggtcctggggatgaattgggagttagctaaattgggttggagagcttgttttggggggggtgatctgtccccaagtctaagaggctgactggccctgccttgggggcttgtggggagttgaggagggcttccctcaggacaggggacaggggagcaaaggattgggcattctggggacccttccatccatcctctatccaggaaagagcttgagctgcacccacccccaatataaaggcctcacttgcaaaggttttttcatcctttcctattccttccacccatacac

SEQ ID NO: 36539 - DNA, 1527 bp, Artificial sequence
  DNA replication origin
acaaggaagagcatgcctggcagaggaaacagcaaaggcaaaggctccgaggcagggactagcttagtgtgatgcaggttcatgcggagcgcatcgctcctggaggggactgaacaaggagagggtggaagggtgggccgcggtgaggggtctggctgtcaccataagggtactggagagccacagcaggatcaggagggcgggtggggcccattgaccctgcctctgtccccacagtccatggagtcgcaggtggaggagtggtaccgcgaggtgggagagctgcaggcgcagacggcggcgctgccgctggagccggcgagcaaggagctggtgggtgagcggcagaacgcggtgggcgagcgcctggtgcgcctgctcgagccgttgcaggagcgccgccgcttgctgctggcttccaaggagttgcaccaggtggcgcacgacctggacgacgagctggtgaggccagcgcaggggcctggggcggggcggggcggggcggtggggcggagaaggtgggcatggggcggggctgaagatggagacggctgagaccctcccactcatacgctgaaagacgcattcagccgttcactcattcattcattcacactcatttactcactttgaatcattcgttgatttattcatgaagtcactcatttatttattcactcatccatagtttgttctttcctccactcatttatttacttaactattcattcattcactcctctgttcctcattccatcactcaatttcctgatttgctcattcatttgttcactcagttgatcattctagccccagccctgtgtttggatgatagtggggccacaggggtggccaaggcagaccccattgtgccccagagggttcagagtccaacggggaaaacagacttgtccccagacagtgacaattcagggtggttaggaatatgataggaaacaagacctgtatgtgcaaaggccaacggtgtgagcctggcttaagtgcagacagcaagaaagagtatgtcaacagaggagactgagacaggtgtggtggtgcctgttgtcccagctacatgggaggctgaggtaggaggattatttgagcctggggattcgatcccatctcaaagaaaaaaaaaaaacaaaaaatggaggaggctgaatattcaactgggctcttaggcaaggaagggcctgggatgccgtgcaggtttaaagtttagttgcgatgcaggggttcttggatgcattctccccttgacctgcttcctgtgtcctctccaggcatgggttcaggagcggctgccactggccatgcagacagagcgaggcaacggtttgcaggcggtccagcagcacatcaaaaagaaccaggtgagcagagccaggtgagggagcgagttaggacatttggatacatgtgatagaaacagctgaaggtggttaaagccaaaacaatgaatgtattggcttttggaattaacaagactgtggacagcagatacagatgtatccaggtgcttcc

SEQ ID NO: 36540 - DNA, 1207 bp, Artificial sequence
  DNA replication origin
gcggcgggagatccaggcgcatgggccgcgcctggaggaggtgctggagcgcgcgggcgcgctggcgtcgctgcgcagcccggaggcagaggcagtgcgccggggcctggagcagctgcagagcgcctgggccggactgcgggaggctgccgagcgacggcagcaggtgctggacgccgccttccaggtggagcagtactacttcgacgtggctgaggtggaggcgtggctgggcgagcaggagctgctcatgatgagtgaggacaagggcaaggtgcgcccgagctgggggtgcggagggcctgggggcgctggagccgggggccgccgctgccgcctcatcgtgggcgctttgtgcccccaggacgaacagagcaccctgcagctgctcaagaaacacctgcagctggagcaaggcgtggagaactacgaggaaagcatcgcgcagctgtcgcgccagtgccgggcgctgctggagatggggcacccggacaggtgggcgggcgcgtggccagttcacaggaatggtccagcaggacctgaagcttcgctgttgggagttggcgcagcgctggaattggacgttgggtgggagaggtcctccttgctgtgtgctggagccctcgaatttggcaagtgggcgggccggaatggggggacacggctcagggatggttgagagggtggggccaggagcacctggatttgagtgtagtagtggggaccttgtcgggggagaaaagagtaggcgatgtctaggactggggtagagaagaatttactcaggacaggcaaggggctctttctactcagtgtctgggaggacagaaaagcctgtgctgagattggctatggcggtggggctggagacctcctggtgcagtggggtgatgttgcctcgtgtaggcggatgctgagctccaggcctggaccagggatggaatctgtaaggaggtacagagagagacctctgtccaagtgggctcagagattggggctagaggtgggatgcattggctggggacccaacctgggagtccagagtcccaccgaggttcctggataggaggggcgtgagactgagatagaaaccgggtgaggctgccgaggtgggcggatcacttgaggtcaggagttggagaccagcttggccaacatggtgaaaccctgtctctactaaaaataaaaaattagctgggcatggtgg

SEQ ID NO: 36541 - DNA, 1069 bp, Artificial sequence
  DNA replication origin
ggccaacatagtgaaaccccgtctctactaaaaacacaaaaaaatcagctgggtgtggtggcacatgcctgtagtcctagctgtttgggaggctgaggcaggagaattgcttgaactggggaggtgaaggttgctgtaagtggctattgaaccactgcacgccaacctgggcgacagagcaagactctgtatcaaaaagaaaaaaaaacattgtaggctggagggggctggtgtatgctgcccctttgctcactttgctgtacccccccccccacttcctgatggcaggtgctgcaggagaaattctcagagtttgccagcgagacaggtatggcagggcgggaacggctggcagctgtgaaccagatggtggatgagctgatcgagtgtggccatacagcagcggccaccatggccgagtggaaggacggactgaacgaggcctgggctgagctgctggagctcatgggcacacgggcccagctgctggccgcctctcgggagcttcataagttcttcagtgacgcccgagagcttcagggacagattgaggagaagcggaggcggctgccccgcctgaccaccccgcctgagccgagacccagtgccagttccatgcagcggaccctgagagcctttgagcatgacctgcagctcctcgtgtcccaggtggggcgccggtggccatcagggcaggtgggagggcctggacagctgtgggcagcagagtgggcaaaaatcaggctgtggagcaggtcgaaattaggcagtggcacagacagaaagcggactacagaacaggaagaaattagataatggagcagatagaaaatggactgatggaatgatatatagaaatcaggtattggcagggaaaagtggtaccttagaaggtctcacagatattaaacagcttctggctgggcgtggtggctccctttgggaggccaacgcaggcggatcatctgaggtcaggagtttaagaccagcctggtcaacgtggtgaaaccccatctctactaaaaatacgaaaattagccaggtctggtggcgggcacctgtaatccca

SEQ ID NO: 36542 - DNA, 1841 bp, Artificial sequence
  DNA replication origin
ctccatcctcagatcgagaaaatcaaagcggaacagagcaagcagccgcctaccccactgctggggcgcaagttctttggggaccccacggaactggcggccaaggcggcgcccctgctgcggccagggggctatgaaaggggcttggagcccctggcccgccgagcctcggacacgctctcggccgaggtgcggactcgggtggggtatgtgcgccaggagctcaagcccgagcgcctccagccgcgcattgaccggctgccggagatcccggggagggtggagcccgcggccctgccggccgcaccagaggacgcggcggagacccccgcgacccccgcggcggcggagcaggtgcggccacgaccggagcgccaggagtcagctgatcgcgcggaggagctgcccaggaggcggcggcctgagcggcaagagtcagtcgatcaatccgaggaggctgcgcggaggcggcggccggagcggcaggagtcagcggagcacgaggcggcacacagccttaccctgggccgctatgagcagatggagcggcggcgcgagcggcgtgagcggcgcttggagcggcaggagtccagcgaacaggagatgcccatcagaggagacctggtcaaggggtgaggtgcccgccttatgaccagaaagtgaggggaggggaaagcggagagctcctagaacccctcaggcccagtgaaagggcttcagggctcagaacttcccaaagaaggagatatcgccgcggtacccattttgcagaggtgtaaactgaagctgcaagataatcgatgtgcccattgttacacagaaaggggagcccttcctgttgaaagaaaaggcagactgcctttctccagacgtaggttctcggcccctgggttgtgactcctgcatcaagtctcccgggtgccccgaggcagggattttgtcctctctgtgcctcagtttgcccactgggctaatggtggaaccctcacctccttgattggagaggagaccctttatcacaattctctcagcagccttatgaagtgggggctgttgtcttctccattgtatgactagggcaactgaggcacaaaaagggcaagtcactcagcttaaacgaaccaggactttcagaatccagagttggccagtgtgtgttgtgcagatctgtccagtcagctgagtgtgtctccagaaagaggcctttggtcaggagacaatgacttcttgattctttttaaattgcacatttcatgaacatttgctgagtgcccactctgcctggcatgtgctgagtcgagcggtgactgaaccagtcccatccctgactttagagactcacagtccattgggaaaaacaggcttgtcatcaatgatgaccgagaattatctgggctggaatgggggcgattgggggactggagagtcaggggtgggtggagaaaggcaacgtttgcaagttgttctttgtgctgcttaaaattcaaaggggcatctgggcgcggtggctcacgcctgtaatctcagcactttgggaggttgaggcgggcagatcacttgaggtcagaagttcgagaccaacctggccaatatagcaaaaccctgtctctactaaaaatgcaaaaattagccggcatggtggcgcacgcctgtagtaccagctacttgggaggctgaggcaggggaatcgcttcaacacaggaggcagaggttgcagtgagccgagatcatgcaccactacactccagcctgggcaacagagaaagactccgtctcaaaaaaaaaaaaaaaaaaattcaaaggggcgagaggtttggtcttccattcagcagacacgtccc

SEQ ID NO: 36543 - DNA, 1113 bp, Artificial sequence
  DNA replication origin
accacaccccctcctgctcattggttggctttcttgatttaagccaccaccaccccccagctctggccccacctactaccgccacctgctggagggcctgaagttgagccacaccccctcctcagtcccaccgctccacgcaatggtcaccctgagcctgagacccgccttccaaagccccgcccacacgctcaccggttggacgacttgcggttagcgtcgagctcgcgcttgcgcagtaggaagccctcgtgctgcactgtgtgagtgggcggtggcggaggcgcgggggcggagccgccctgggccggggcggagcgcgagcgccggcttcccccgccctcaccaccctctctgggccgcggccgccgtcgcggcttgggccggtcccgcgcccggggccggtccggccgaggtgtccgctcgggcagctcaagcccgttgggcaggcgacctgggggaagctcgcgtggctgaggcagcgacggctgtgtgaagggagggggaagaggggtgctgtccatggagagggtgtgggggtcatctgtttgggggagtcatgggtctggggtcccatctgtctacagggccatttgtctcggaggcgagtatgggaggacctcagggttggaggcccaattcttagggccccatgggtcttgggagtgagtctgttaggactcattggtttggaatctctctcggtggtggaaagaggcagccagatctctggaggtgggggtgcaagcagggcgtgtccccactgtctgcaggagaaacctggggcttccttctgtgtgtgtgtgtatgaggctatgaagaaatttgggaccccactgagctgaagaaatacggagtccaggacagatgtgggaagagtctgtgtgtgtgtgtctgtgtgtgtatctgtgtctgtgtgtctgtgtgtgtgtgtctgtgtgtgtgtgtctgtgtgtgtgtgtgtgtgtgtgtgtgtgtgtgtgtgtggaggggcagtaggggtctcttaggtaggtgccccgtctttctaagggggacattttcagattctggggaccctgagagtccatgctgtctctgcagggtccaggtagggaatgggtcctgccaggg

SEQ ID NO: 36544 - DNA, 2031 bp, Artificial sequence
  DNA replication origin
atctggctgcctctttccaccaccgagagagattccaaaccaatgagtcctaacagactcactcccaagacccatggggccctaagaattgggcctccaaccctgaggtcctcccatactcgcctccgagacaaatggccctgtagacagatgggaccccagacccatgactcccccaaacagatgacccccacaccctctccatggacagcacccctcttccccctcccttcacacagccgtcgctgcctcagccacgcgagcttcccccaggtcgcctgcccaacgggcttgagctgcccgagcggacacctcggccggaccggccccgggcgcgggaccggcccaagccgcgacggcggccgcggcccagagagggtggtgagggcgggggaagccggcgctcgcgctccgccccggcccagggcggctccgcccccgcgcctccgccaccgcccactcacacagtgcagcacgagggcttcctactgcgcaagcgcgagctcgacgctaaccgcaagtcgtccaaccggtgagcgtgtgggcggggctttggaaggcgggtctcaggctcagggtgaccattgcgtggagcggtgggactgaggagggggtgtggctcaacttcaggccctccagcaggtggcggtagtaggtggggccagagctggggggtggtggtggcttaaatcaagaaagccaaccaatgagcaggagggggtgtggtttaacgtcaggccctccaacccgtgggggtagtaggtggggccagatgaggggtggggctcaactttgatgattccaaccaatgaacaggaaggggcaggacctaaggttagtgcatctaatggatgatgggtagagcttaggtgggaacagaaggaaaatgttctgaaagtgagtaaattggaacctaacctcttagcaaccaacccaggagttgatcagctaaatagcaaagagggaggcatctagttgagaaggtttcaatggcttgtcgtggagcttggagaggtcactcaaccaatgagtggggtgggtctacccttgaagtttcaaattgggggagggtccgaaaacgggcagagcccaaactaatgagggtaggggttgggaagggggagtcatctcttacaggtttccaaatgagggtctagccatgatgtgcctgctcttggggagtccagctcctgcttgtccaccctctttttgtccaactgagaggcagaatctggggacaagtggagccaaaaaggggtatcaccggccagtaatggagtgagtcccaagatatgaagtgggcaggacagattcagattttgctagtggaatctgtaggtggtctttcttcctcgtacctaatgccaaggtaggaataaacaagggcacctagtatgttttgctttgggagggattcctccaggatcgaggctttggatgactggagagacaggaattctttattccagacagtagaccaatagactttccttgagaaagctccatgagtggggaggattgagtggagcaaaggcttatggaggagacagcttaagacttaccttcaggaaattcagtatgggaggggataaggaagggaaatctcagcctgggcaaaggcttgatactgagagacttaaatgctcccctcagggcagcaacagccttaaggaagagcattttaggtccaactagggcgcaactagggcgcaaaggtccagaggtaggaaggctcagacatattcagaccttgaggatgttaatgaagagttattaggcagagtgctgcggctctgccttgagccccatcttgtcgctccaggtcgtgggtgagcctgtactgtgtgcttagtaagggggaactgggcttctacaaggactccaagggcccggcatccgggagcacacacggtggggaaccgctgctcagcctgcacaaggccaccagcgaggtggctagtgactacaagaaaaagaagcatgtcttcaagctccagtgagccccccaatgggcaggagggagggatccaa

SEQ ID NO: 36545 - DNA, 1157 bp, Artificial sequence
  DNA replication origin
ggttttctatacaatgaggatgatagctgggggctcccacttacccagaggagtgagcccatagaactgggcttcatggaggaggctggaaccgtggacacccctgggtagtagaattgactagaggtcagggtctaggtgtgggggtgaacagagaatgctgagagggtaattttcaaaactgcacagagaatgtcaaggggtagaaagttttgatggaataaagatgctaaggagtgatgatatgggtggaggaaatgttgagtgtgtgtgtgtgtgtgtgtgtgtgtgtgtgtgtgtgtgtgtgtagggagaaatcgaaggacataaaattttaacatgatcaagattctcatgaagttttgcctgtttgcttttttagagaaggggtctcgctatgttgcccaggctagtctccaaatcctgggctcaagtgatcctcccacctcggcctcccaaagtgttgggattacaggcgtgagcaatcccggcgcgcccggcctgtgatcaaggttctgaatgagaattctaatagaatggagctcacgtggacattcagaggaggtgaaagaactcctcagggactgaagacagtgagggactccctcccctttttccatgccaacctgggatccaactctttggtgcgcaggaagttgaggatgggggcgaagactgtagggtccctgtcgatgaagatctgcgggaaaggggggcagaggatggatggggtaaaaggcaggactgagtggggtcctgcccctcttcctaccaacccctcccccccatcccatttcagttcttgtccgactcactgctccggtctcatctttcagcgtcgagatgcgtccgctcagaagactgcagggaagggacaccgagcaggcgtcacgggccgggggagtggatattaggtctcccacgccctctccatccctcctaccctcgccccaaactcgctctcccgatcacctggagaagaaggagtctgggatccaggtgagagtctggcgagaggtactgaatctgggcggggaaggtaaacggacgcaagagatgaagaggagcgggtgaggaatgcgtccccctcccgcaggatccagggttccctccccttccccctcccccggcgtttttccagaatctcgcgcctccaa

SEQ ID NO: 36546 - DNA, 1087 bp, Artificial sequence
  DNA replication origin
tccagcctaggcaacagagcgagactccatctcaaaaataaatagataaaaatgcaaatcaggctgggcactgtggctcatgcctataatcccagcactttgggaggccaaggtgggaggattgcttgaggctaggagtgtgagaccaacctggacaacaaagtgagacattgtttctacaaaaaatttttaaaaaattagccaagtatggtggcatgcacctggggtcccagcttcttgggaggctgaggtggagggatcacttgagcccaagagtcaggggctgcaatcagctatgattgcacccctgcactccagcccaggcaacaaagcaagactctatctcataaaatattaataaaataatctaaatcaacaccaggcaatgataagggctatgaataaacatgaagctgtgtgtggctagagagtgtcaagtcgctggagaggggtcattcagggaaggcctgaggaaggacctttgagcagaaataacagaatgagcagtgcagattggtagggacaagcattcaggccgagggaacaggcattgcaaaggctctgaggtgagaggatgcctgaggaagtgcagggagccacttgtgcctggaacagagtaaatgagggggagaatgggaggagatgagggtatggaggtgacaagggcaggagccacagagggctccgagcaggggagggacatgactagcttcaggtgttcacaggctccacctggctgcccgtgggagcacactactgggataggacaggagcagggacctctgggaggggcgtgctgatacggtccaggcaggtgacgaaatggaccaggaccggtgtggggcagaggatagggcaaggtgagatcaggctctggaacagttttggaggcagaggcaacagggtttttaacatttggaattctggggaggaaaggattctctgaaagggaagaactcagcaagggctgaccctcctgaaacggggctgtcctgaggctctggacgggcaggcagcattgatgcctgcaccaggcctgacttcctgctctccttgtgcccctcagtctgtgccgacaacaaccacg

SEQ ID NO: 36547 - DNA, 1191 bp, Artificial sequence
  DNA replication origin
ccaggcccctacggtgagcgggacgaccagcaagtgttcatccagaaggtggtgcccagtgccagccagctcttcgtgcgtctctcatctactgggcagcggtgaggacagtcctgtccaacagggagggaggacagtcctgtccaacagggagggaggtcaggggagaaggcaagatgctagccagatcactgaggccagaaaggggtcccagccaaggagcattgaaggagcaaaggctgggagggaggacaggcctggtaggtttgtcttctggtatcaaaggtgtgacaggtgttggtgggactgacctggcgcagtgccagcccagtgcaggcagggccaggttgaaggcacagggggtggggtcagggtgggatggggggcccaggcggagggggaggggtgggatgggggcccagggggagaggtcggggtgggatggggggaccagggggaggggttggggtgggatagggggaccaggggcaggggtcgggatgggatggaggagacccagggagctgtaggagccttgcttcagctgggaaaggggcctcggaggatgttctggatgaagggactctgagcagagacctagaggacaagtaggaaggagcagaagaaagaaggcaggggaagggggccccagcctgagggaactgtatgtgcagaggctgagaagggccaaatagggtcacatgggaaggacacgtgggctcctgggctggagcacagaacaggaggtgaggatggggtgcagatgcgggcgggccttgtcaggctgtggaagggctgaggctttgtcctgtgcggggagccgtggccactgcatgggggatgaaaggaggcttgatgggaggccaggagcccagggaggaggccaggaggctgataggaggtgggggagcagctgggacgggcctcaggtcttccctgcagtgggagcagggaagagcagaagctctgggagactccctgggtgtttggggctgcggtgtccaagagctgctggacccttgggactggaactcaaaagcaggctagggatggataaagattgggatggcccctggagaggcaggaactgcagccacagtggtggggactgggacgaggaagggtgagaaagcgagggtgaccacctcccccactgcaccccccagggtgtgctccgtgcgctccgtggac

SEQ ID NO: 36548 - DNA, 816 bp, Artificial sequence
  DNA replication origin
atggcagctgcgttgttcaaaaggaagtttcattgagcttcatcttgggaggtgtgaggggagtgccgagaccgctggagggccacggggctggtgtgggtggccgtcggaggtctggcccactccgcaccagttcctggcagcgttccacaaagctgcccccaccacggcgccgggcctcagcctgcggggggcttgggctcccacggtggccagacaaggaggtgttgctggaggctgagtggaggctgaggaagtaaggacagtaagtgcacgtcatcacggggcagctgggccactctgtccccgggaacaccatgctgtcccctctcccctcattgcacagaaggggcagtggagttgtggctacctggtgagggagatgcggggtgaggggctggggagacagccccatgagggagctgaaggagccggcggggccagctcacagtgttccagctgttccatcagctcttgctccgtcaggccacctgctggggggcacggaagcagggtcagggggcaagacaggggtcatagggcaagggcctgggttgcattgcagtgcaagcaccgagggtcaggacaggagagaggaagcagagatcaatgcatgggggccagaggctgagacaggggttgaaaaacaagggcaggaagggatggggagcagagagggggtcaaaggaaaaggggtcagagggcaagggcctgggagagagatcaagcagttggcagtggagagtggttctgggtgaggctgtggggcttgggacgggattggggtggggcagggagtaccaggggcctggccga

SEQ ID NO: 36549 - DNA, 1142 bp, Artificial sequence
  DNA replication origin
gctgaaatgctggtcattctattcttatttcatgtttaaatttttattattttctttatttcttttttttgagacagggtctttctctgttgcccgggttggagtgcagtggtgtgatctcagctcacctcaacctctgcctcccgggttcaagtgatcctcccaccttagcctcttgagtagccgggattacaggcgtgcgccaccatgcctggataatttttgtattcttagtagagacagggtttcactgtgttggccaggctggcctgaaactcctgacctcaagtgatctgccctcccacctcggcctcccaaagtgctgggattacagacgtgagccggccttattctgggggagggggtggggggggagagagagagagggagagagagaggagaatttgggatgttagcaaatctagaacactgaagagctgggttttttaaatgctagagatagtattatcctagtatagtattaactctgtgtgtttttgtgcgtgagagggcatggggggaggggtggaagattctggaatgcggggggactagaactctgagggattctgaagggttgagatgagttaggattcaagaggtgacatagacacgatcctgggagatagtgacactgatgggagggatggggagctggggactccaaattctagggggaggggaggctaacgccggaagttgcagtggtgagccagaggatgttgcctagcaacaagcattgaagatgcgctggatcccggacagaagggagaaatttcagcagcgcccccagcaaatgctccagccacagggtaggaggtggtgaggggggaagcgggtagggatatgctgtcctgcagggtcatgtgagcaggggtcttgggggttatacaaaaacagggtcatggagtacagtcatggggcagagccgggctctgggacagcccacgaatagctgtgaatggagtgtgagtgccgtcgtcacctgccccagggactgtgtgtccctggacggtgctggacccagatttctgggtgtcagtgtgggatggaggcatggattgctgtaggtggcagtaatggtgtgtagccgtgtgagtcagcctgtgtgtctcacagtgagcgggggtgaagggcttccc

SEQ ID NO: 36550 - DNA, 920 bp, Artificial sequence
  DNA replication origin
gcagcgcccccagcaaatgctccagccacagggtaggaggtggtgaggggggaagcgggtagggatatgctgtcctgcagggtcatgtgagcaggggtcttgggggttatacaaaaacagggtcatggagtacagtcatggggcagagccgggctctgggacagcccacgaatagctgtgaatggagtgtgagtgccgtcgtcacctgccccagggactgtgtgtccctggacggtgctggacccagatttctgggtgtcagtgtgggatggaggcatggattgctgtaggtggcagtaatggtgtgtagccgtgtgagtcagcctgtgtgtctcacagtgagcgggggtgaagggcttccccgtcagtcctgcacaccctcctggattggaagaaggagcaggagtggggggtggggggtgcaactggatcagttgccattcttggtctggggtgggctctgtggtcacggcgtgtggcctagtaccctgtgtgggtggagcctgggatccacgaggtgggggcggggctaacgctacagaactgggaagcttaagaatccaactgctttgggatatggggcctggaaccccaaagcgaagcaaacatgaaaggggtgggcttgggatcctacatgtggtcacgtcccagttttctgtgggaaagggtgtggcctgaaactctggaaaaagaggtgattaggggcagagtgaagctctgagggtggtgccttagggagagaaggggcttgtatttcagagaatatagggtggagccttgaatttataatgatcttctcaaagaattgatcccttctcaaggccctaggcttcaggggttccaggctcaccatctgcaaaagcttgctccccgaagctctgtccctcagtgaacccagccaggctctgcccctgacccac

SEQ ID NO: 36551 - DNA, 1249 bp, Artificial sequence
  DNA replication origin
gtgcagtgcagtggtgccatctcaactcactgcagcctccacttaccaggctcaagtgatcctcctacctcatcctcccgagtagctgggactactggctcatgccaccatacccggctaatttttggatttttttttttttttttttttttttttttttttgagacagagtcttgctctgtcgcccaggctagagtgcagtggtgtgatcttggctcactgcaacctccacctcctgggttcaaacgattctcctgcctcagcctcccgagtcgctgggattacaggcgcccaccactgcacccagctaatttttgtattttttagtagagatggggtttcaccatcttggccaggctggtctcgaactcctgacctcatgatccacccgcctcggcctcccaaagtgctgggattacaggcatgagccaccgcgcccggcctaatttttggatttttaatagagatggggtcctatgttgtactatgttgctcaggctcacctcaaactcctggactcaagcgatccacctcggccttccaaagtgctgggattacaggcccgcgccagggcacctagccggaactgggaactctctaaggagaaagtctgcaattctgggtggtgggaggctgctcttgggagcattcaaagactcaggcaaggaagggggtctgataccctctgggggcggcgataagtggggtgcaggagggggcagagccaggagcaccctgggagcagagtttgtggatcaggggcagagcctggctgggttcactgagggacagagcttcggggagcaagcttttgcagatggtgagcctggaatccctgaagcccagggtcttgagaagagatcaattctttgagaagatccaatgtgaacttgggaccctcagaggggcaggacctgggggctggtgcagggttggtgctccatttgcagaatcctcagtctctctcgtggaaaggggtacccgtggggggcttccagcttctacgccagcgagggagctaaattctgaccgaattctcccagaactgggagcagagagctgaggactgccagatggagtccagcttaggggaccctgcccccaaccccgctcccgtatccctcccatttttaagcacccctacgcctgggacctctgttccacgagaaggttcacggagccagtatccgagtcctaatttccccccaccgcgtggggaactcgaggtcccccgcgcccctagtccggc

SEQ ID NO: 36552 - DNA, 1170 bp, Artificial sequence
  DNA replication origin
gaaggttcacggagccagtatccgagtcctaatttccccccaccgcgtggggaactcgaggtcccccgcgcccctagtccggcacctgtccctgctgcctcctgattggccgcgcggcgagcgctggcggcgccgggctgtgattggcgggaagttcgcagcccgtggctggactgtggagaaagtgagtcggcctcgggcgggggcgggggcgggggcaggggcggggccggggctagcctgacccgctggacagaccgcccgcccggagcgggactcggcgcccgacacgatgccgaggcctggcaccagcggccgccgccccctcctgctggtgctgttgctgccgctcttcgcagccgccacctccgccgccagccccagccccagccccagccaggtcgtcgaggtcccgggggtccccagccgcccggccaggtaagccccctgcttccttgtgccccttccacccaataagtctggtggtccaggaggaccacggctttcggattcaggggaaactcgaacccactgcttcgatgtggagatgcaaagagggcccttggatttattaggcgccctcaatttgtaggggttagattcggggagtactgagatttttaggggaaagagtcccctttattgtggtggagaaggctaagtctccagagaatcctggggttagttcggggaaaggtctctagtttattggggcagggggtggggggctgagctctcctagaatgatagagacgtgtggggtcttcgagctaggatggagcgccccaagtttcttgggcgcgtaaggaggaaaggtgttgggggattctggagggactttatgaggccgctgagttgtcctggttttctaggatttgggggctctgtgttcatgaaaagcgacctttgggtttttcgaattggtcaggaagacatagactcttgcgttgatggtggaggggcttgtggggagtggggtcgggtgggggagtcctcaggcttcagaacggttggggatgctcaagtttcctagaattagaggactctgggattgaatgaggctccagtgatttcaccgcgagagatccaggattccctatagatctgggggctataggcgcccttcctgtctgcgggtgacgggactgaaggaagccgtctgcccagcac

SEQ ID NO: 36553 - DNA, 1552 bp, Artificial sequence
  DNA replication origin
gggaaacaggaggaggcctttggcccccagccgccccacaatcttgagcatttggtgcccaggcaggcgccaacccgcacaatcgcttttgttgtctgggctggttcggcggagctttctaacgggccagcgccctccctcttcggccgcggggagcccggacgcctggcttcccggccccacccccgcgggtcagtgcctctggcctgtgtctggtcctgtcccgggctcacctcgcacggccggacgctggggtccctagagggggcctcgtcctgggggtgggtgctgagctacaacggggggcgggtaggcggcggctggaccgtgggaaccagacggctttatctggcccggaacccccctcgccccaggcggaggaaaggcggatgtgcttacccggggccttgccagcgggggcacgctgtgggggcctccttctcagtagtccccggccccctggcccccggggccgccgccgcttcagtagagctctggcctcctggagcctgggtgggagaggacggaaaagctgctgtcaccgggttaaactgacctccccaccaaagggcctccatgccaggaaaatgtctttcagtagcggctctgcccaaccctccccccacaacacctatttatggggaccaggcctctagtgggagagaaacaaagaccctgagagaaagagagatgatgggggttgggggagagaaagagagaaggggcagagagacttagacatagaggcaggcagtgagacacagggagaaagagagagaggaaaagagacaggtaactagaaagaaacagaaagagacagaaataatgcagagatgggaagagcctgagataggcaggcaagggatgaaatagaaacggacagacaggctgatagcaaaagaaagagccggggagggaggggggagagagagggagaggggaagggaggaggagcggaaacgggggcaaagctaggagttcctgagggaggatttggtaggggagggactgcccactcacgtcagtggctgccagttgagggacacctgtctcttcctcacgctggggctgggactgggcactgcaggcactgggttcaggcaccgctgggggcctgcacactttttgggctggcagcttcggaccctgcagaaggcttcggagacagccagggactaagtggggaaggaggggaccaagtacttctctaccaaatgcatccagctctcccactgggatgaggggagggatggggagctccctgcccctctcctcctattcccttttgccccctactcatactccatcttccagaacccacctcggatgcagcggctcctcctagacgtctggcccgggcagcagcgacaaacagcaacgctataaatagtggagtggaagtcactcaggcccctagcaccccagaactctgcaaaggagggcaatcggggaggggaaaccaagacgcatcctgagggggcttgaaacaggtatatgactaacgaggttcttctccccacgcctcagtttctccatctgtacaatgggaggc

SEQ ID NO: 36554 - DNA, 1128 bp, Artificial sequence
  DNA replication origin
cgggagcgccgctgtccacgctggtggcgttgcggggcgcgcaggtcggggtacagcgggagccggtcggcccatggacgcagcgcaggccgcacacgaccggggtgaagcgcacgcggagacgctctccgagccggcccagtccaggctgcggccctagctgcgccagcagcaccaatagcgacacccagagcagccgcacgccgcccgccatggctgcagcgccgcgctccgccgcgccgccgccccagcccgcccgaggggcccggccgcacccgcccgcccgcccgcgggggaggtcgcccgcgcccccgctcaggccccccctcctcaccactccctccccggcggccgcgcgggggcgcgtggggctgggcgcttagccagaggctcgcaggctgggcgctagactcgcaggggtgagcggggcgccccctctgtccccatccgcgcaccaacaagtggaccgggcctgtaggggagcggcggggaagggaacaggtgggggcgggcgggtttccccccagacagagctgaatccataaagaggaaatccattaagagtagtgggggccacatttggggagacagctaagagttgatcctcttctgcccggggcacagagaaaggggcttcatcttgatagggggctatcatggtacatctggacagccaggtgggacatctgagggatgggagaagggtcgctacacctgggcacataaaggaattgggcgtctagatcctgggcaggaggctggaggtgggggggatacatgtgaagatgtagccacatctggccagaacgccacacctggcgggagaagtcacaatggataaagggaggctgtgggcgggggtactaacatctggcccgaggctcacatctggaagactttagggggaggggtcacatctgggctgaaggctacagcaagaggagggttttgagggtgtttgagatgaggggtgttctagactaggggtcaagagctggagcgggaggagggcagggggaagattcgggaaacaggaggaggcctttggcccccagccgccccacaatcttgagcatttggtgcccaggcaggcgccaacccgcacaatcgcttttgttgtctgggctg

SEQ ID NO: 36555 - DNA, 1206 bp, Artificial sequence
  DNA replication origin
ccgcgggcgggcgggcgggtgcggccgggcccctcgggcgggctggggcggcggcgcggcggagcgcggcgctgcagccatggcgggcggcgtgcggctgctctgggtgtcgctattggtgctgctggcgcagctagggccgcagcctggactgggccggctcggagagcgtctccgcgtgcgcttcaccccggtcgtgtgcggcctgcgctgcgtccatgggccgaccggctcccgctgtaccccgacctgcgcgccccgcaacgccaccagcgtggacagcggcgctcccggcggggcggccccggggggacccggcttccgcgcctgtgagtgcggggtggtggtcccgagagagcggctccgggggggaggaggatccctggggatggaggagacagtcctccagggagagggagcccagattccatatgcaatagtgcaagggaatatcaggggctatttgaggaagggggccccaaattcctggcttttggggttgggtcctgagggttccgattttgcaagcaatgagggttcttagaggcctgtgatgtcccacgtgagggaattggcgccagctttcatgctttgcgtcaaaatggggatctcagaattgaggggcctgagaacttttgggaggggggctcgaattctgagacgctgagtaaggagtccccggggaccaagcaagagtctcaggaccgcatgggggacgtctcagtttctgtgtgtttgggtgggaaggttctgtatgggaatgcctgtgaggtggggtactagagagaagaaagttaatccgaagaactaagagggagaggggacagagacgggggttgtgtgtgtgtgtgtgtgtgtgtgtgtgtgtgtgtgtggcggcgggggtggggtgggggtgtctccgcaggacctgagttgcaggggtcccacgtgcgacagaaatccagataagagggcttacggaaggggcgccccctgggggcggaggggacaggaggtgtatgcaccaggcactcctagagatggggagccttgggggttcaggtgaggtgggggagggcgcaccacctgttgttccaggatgcaaaagtgggcagactctctgggatcgggccttcctgccccctaccccgcagaccctatggagtggggagtgggggcccctggagcggagaactcgcccagcctggcccccagccagcccag

SEQ ID NO: 36556 - DNA, 1415 bp, Artificial sequence
  DNA replication origin
cctgctgcctctagcccctcccaccttcctttccgcactctgattcgcccggctcacttgttcacgcccctcccaccccacctccaggctgtccgggtgccctagttccgcccaccgcgctgtgtctccgcccaacttctttctggctggggctttagagttctagctcggccttacagcctccagtagcaccggggcggagccacgagcgggaacgcgcctccactcccctctgcgcgccctcgctgggccccaggccacctctgggcggggcactgccagctgtgcggcggggtaaacaaagagagaggtgcggcgggggcagggcggaggctccacattccggacccttggggagccccgggacctttgagccaaaggaggccgggctgtcctgcgagggcaccccctccctctctctcccggggctgcagagaacagctggagacagctgtgcggaggggagggaggaggcaggcggccgggggaggcgcgtgtgggattctgagccacaactgtagagaggaaaggacgcagagagccacctccgtttagaaggataaagggactggagtcctgggaggagatcgactaaagggcagtcctctcgagttcaaagacggctggaggtttctgggatggaggaacctagctcagaggaaactgaggcgtcctttcagcaggagtccttttgtggacagttacctagaaaacaggactctagtgccgcctaggagacaaccagtttgacggtgctgaaaacagggtttagatagtgaagtggaattcctggaagtcatcagcacttaagaggctcaattggccgagtccctctgtggaatcccctcccctcccagctaaggattaagtgccaaaggctttttattaatggctgcctgtaaggagcacaatgtctggagtcctcttgcgagaacccacttatcaagaccaaccctggggttctctgaagataaatgggatcagaagttcctggggaagggggtgagctagaagaacaggacttctggacaatactacagagttatctggggaaaggcacagtttgggaggtgggagggaagaatgagagggaatttcactggaggagtggtctctaaagtctgttgccatggttggagagcgggtctagggcctggagcaaaaactcagctcccttaggtaggagtgtggggccatgactccagggtggtctaatgggggcttttaattgagtagtggggcctaggagaggcttaactaggaatcaaaattgcagaatggtaagggtctctgatggagggggtgggaaaccagccaggtctgagggtatttcccaggctccagaggcatttctctgccttctcttggcctgaatgcaggcccgcaggccagctccctgggggtgcctacaccca

SEQ ID NO: 36557 - DNA, 1786 bp, Artificial sequence
  DNA replication origin
tgaactcgagaggactgccctttagtcgatctcctcccaggactccagtccctttatccttctaaacggaggtggctctctgcgtcctttcctctctacagttgtggctcagaatcccacacgcgcctcccccggccgcctgcctcctccctcccctccgcacagctgtctccagctgttctctgcagccccgggagagagagggagggggtgccctcgcaggacagcccggcctcctttggctcaaaggtcccggggctccccaagggtccggaatgtggagcctccgccctgcccccgccgcacctctctctttgtttaccccgccgcacagctggcagtgccccgcccagaggtggcctggggcccagcgagggcgcgcagaggggagtggaggcgcgttcccgctcgtggctccgccccggtgctactggaggctgtaaggccgagctagaactctaaagccccagccagaaagaagttgggcggagacacagcgcggtgggcggaactagggcacccggacagcctggaggtggggtgggaggggcgtgaacaagtgagccgggcgaatcagagtgcggaaaggaaggtgggaggggctagaggcagcaggttaagctcctggataggcggggtttagaatcccgcgggtagaaggtaatgtgagaggggctacaaagggggcacagccagggggcggaggtaggacttcgtggaccaagcagagggagtgtgggcgggcatagaatgcgaaggagacagagttgggcggggagttatgccagggagtggttaaaatgtggtttgagtcaatggaagggatcagcattgggtcggaggggctggaacagcaaagggttccgtcggactacggaatgggcggggtcagcgccgtctgggctggtctggaactccgtggactcagccagaaattgggatccgagaggttgacatgaaagtgaataaacagcctgagggctggctgggctcacgcctgtaatcccagcactttgggagactgaggcagaaggattgcctgagcccaggagttcaagaccagcctggccaacatagtgagaccccgcctctaccaaatttttaaaaaacgtagcccgatgtggtgcacgcctgtcgtctcagctacttaggaggctcagatgggaggatcacttcagcttaggaggtcgaggctgcagagccataatcacgctactgcattccagcctgggcaatagagcgagatcctgccgacttagtgggtgggaccgtacctctgatggctgaacaactggactgggccaatgctgatgccagaattggggcggggccacatgacagctaagggcggagcgacttagaaatgaatgataccttgagggagtagggaccccaggagaacctgccaggaatggtggcgcccctgagtgtcctcgttctcctcccagtcctgtgtcccttgatctgtcacaatggcggtgtgtgcgtgaagcctgaccgctgcctctgtcccccggacttcgctggcaagttctgccagttgcactcctcgggcgcccggcccccggccccggctgtaccaggcctcacccgctccgtgtacactatgccactggccaaccaccgcgacgacgagcacggtgaggaaagggtggccagagtcccctccgacccctgtcaagcatttcactttgcccctgaccctcatatttcccgccttcccgagcacctttgcccagctcgccctccccgccttgtctagccccaccccgtaagaacccgtgta

SEQ ID NO: 36558 - DNA, 1089 bp, Artificial sequence
  DNA replication origin
ggtgcccgcctgtagttctagctactcgggaggccgaggcaggagaatcacttgaaaccaggaggcagagattgcagtgagccgagatcgcgccactgcactccagcctgggcgacagagcgagactccatctccaaaaaaaaaagtctgggagtctggagggatctggatccaaaaggcttgaaaggtctaaaggtggtccagggatgctgaagctgtataagaatctgagaagttctgagggggctctaaggctgacagaggaacccgggagtctgggggggtccgagggaattaaaggccccaggatgctctgggacttctgagggcagggagggcgggacccagcctcagctccctgctggttgctcacagatgcagctgctgcgggacgagtcgagcagaaagccgtcggggcacacacacgtgtacccgccgcgcgtgtttgcacactcgccgtgctggcagcgcccgccagtcgcgcactcatccacatctgccagggttggggaggtcaccgtggagtcaggaacttgatccctgcaaatcccgcccccagaaccaagcccctcccacccctgccccgttgcaccttcgcaggacccattaactctttcaaagccggttggacaaggtccatctggggcgctcactctttcggagttccctgtggcgagaggagaggggtgggccagggacaggtgggcagagcgagaatggagtgggcagagacgaagacggggtgggagggactaaaagatgttggctgtagtttaagtgcagggacagccttaggttggcagttgaaatggcaacattggagactcccaaagtatatggtggggggccaaggcacaaaggcagggtgagaacagagtggccaaagtcagaaaatggggtgggtggtcccagagcggtatgaaaagctcaggactggaagtcgcctccacaatggggtaggcgtggctacaatttgtgaactgggtttatctagggcagagtaggaggaacggtgaggttgtcaccactccccagctccgagcacttcggggacgtcctggggcttacccaggcgctcggagcacagct

SEQ ID NO: 36559 - DNA, 863 bp, Artificial sequence
  DNA replication origin
tggctacgaatggaggggtggctgtggctacagatggaggtggagccatggatgctgtccagtctgaggcctgcgggtctcagaggctgctgcgtggccaaggctggagcccagccagtcaggttggggcagtgaactcagggttggagggtggggcgtagaatgagcgccacatgtgttgcgcgtagggctaggcactgccgcaggggctcacctgagccgaagggtgggcagagctggcagccccggccccaggccttgcctacgcggctgcagcagcagatctgtttagtgatgttccgcagaatgggcagcgaacagccgccgtcgcggagcacgcggaagcagggccctttggcctctgagatcacgtgttgggctgcgaggagcagggaggaaatccttcagggcggggctgggaatgctgtagcactgagggatttgggagagaggggaatggttctggggttgggggtggggggttggtgggtgcgaggggcatttgggagaggtctgagagggtctgaaggagagcagtgggctctggaggtctgagaagggcttggagcctcaatggggtgtcagtggtgaatgagagactctgagaaggatctcaagatctgaagatagtcgagtcgttgagggggacgagaggatttgggggtctgagaaggattccagaaagtctgggagagctgggcgcagtggcttacgcctgtaatcccagcactttgggaggctgaggtgggcagatcacttgaagccaggggtttgaggccagcctggccaacgtggcgaaaccctgtctctaccaaaaatacaaaaaaatttagccgggcatggtggtgcccgcctgtagttct

SEQ ID NO: 36560 - DNA, 1108 bp, Artificial sequence
  DNA replication origin
agttaatttttgtagttttagtagagacagggtttcgccatgttggccaggctggtctcgaactcctgacctggtgatccaccctcctcagcctcccaaaatgctgggattacaggcgtgagccactgctgcaggcccaatgccctcagttctttctagcaaacctgattcaggaatctcaggaccagtccaggcagggatgctgggcaagggaagctcagggccgggccggggatcgggccggggttcaggccggggctccaggcgatgggtgggcagaaagcctgataaagaaggggtatcaacgagtggagcccaaatcctctcttgcctcctttcactatggggctggggcagccccttgaagatggcacccacttctgccagagccagctcacctgcagatggccgagaggtggctggcagggtacgaggctggctgagtgacactcggggtggctcctggcccaggggtctggtgttgtagcggaggtcggaggccgagtagtggtaaccaggaccagccgggcagatctcccggaaaccctctgggaataggtaagagagacagagagaggacaagagagcgggaagaaaacgatggccagcccagactctggccttggctaggggcagggcttggctggagagtgtcaggggtttgagctggaggctgggatggggtggtgtcctggccaaagagtagaatgtcttagaggctacaggtggggccaagagcgttttcccacatttgggatggtggtaggaacagggttgagggcagggtccggttgggtctacagggacagagttggaggctaggaaatagctcccttgtgagatttagttttaagcagaagatagaatgccagggaggtgtctcagggaggggcatgcctggggtggggctaagctgaaggcagtgtctcagaagccaaggacttggtcaaagttcagggacagggtgggactgggcgttgacgctcaggagacaaaaactaacttgggagctccggggtagctgtggctacgaatggaggggtggctgtggctacagatggaggtggagccatggatgctgtccagtctgaggcctgcgggtctcaga

SEQ ID NO: 36561 - DNA, 956 bp, Artificial sequence
  DNA replication origin
cccatgagaaggcctccttctcccctttcctccataactctgctccccttacccgattactgacatctccatccctcctcattctgcttctccatctttcatgactcagcctttctgtttcccatcacttggcctctgcatcccaggtctctctctactgccatcaggccacacgtctgctcgagagcctggcctctgtctccaaatcaactcgctttgccctattgttcagtctctctggccctcatcactgcgctctacccaaccgctcacaccccttcccagctgcccctcccaggccctcaccctggcagctggctccgtgcggtgcagcctggtacccggcggggcacacgcacaggaagctgcctggcgtgttctcgcagcgcccgaggtcacacggcggcggcacgcggtggcactcgtccacatctgtaggcacagaccaggcggctgggactggggcagacagccccgggagaagcgacgcaaggaggcaggggtagagggaagcgggagcgggaccaagcttgggccagagccaggatggggacccggccaggacagccggagaggggcacagtgagagaggcaattgtggagggcagggtttggtagcgcaagggcagaaaggagagctttggggaccaagctaagggaaggtggggtaggggctagagaagaaaggagcagtttggggatagggctctggtgtggcagggttggaatcggggtcgcggtcaggagattggttgccgcagttgcaggacagtggcggggcctgggggagggagttagtcagggaggggcgtggccaataagggcggggcctgggcgtgggggcggagcaatacgagttgcgaccaggccccgatagaaactggcagtttgggagctgggtaggggtggggtcaaagggaggctggagctgggtggaggcgggtcagggaagggca

SEQ ID NO: 36562 - DNA, 933 bp, Artificial sequence
  DNA replication origin
tgcggcaaccaatctcctgaccgcgaccccgattccaaccctgccacaccagagccctatccccaaactgctcctttcttctctagcccctaccccaccttcccttagcttggtccccaaagctctcctttctgcccttgcgctaccaaaccctgccctccacaattgcctctctcactgtgcccctctccggctgtcctggccgggtccccatcctggctctggcccaagcttggtcccgctcccgcttccctctacccctgcctccttgcgtcgcttctcccggggctgtctgccccagtcccagccgcctggtctgtgcctacagatgtggacgagtgccaccgcgtgccgccgccgtgtgacctcgggcgctgcgagaacacgccaggcagcttcctgtgcgtgtgccccgccgggtaccaggctgcaccgcacggagccagctgccagggtgagggcctgggaggggcagctgggaaggggtgtgagcggttgggtagagcgcagtgatgagggccagagagactgaacaatagggcaaagcgagttgatttggagacagaggccaggctctcgagcagacgtgtggcctgatggcagtagagagagacctgggatgcagaggccaagtgatgggaaacagaaaggctgagtcatgaaagatggagaagcagaatgaggagggatggagatgtcagtaatcgggtaaggggagcagagttatggaggaaaggggagaaggaggccttctcatggggactacagagacagaaccagccaggcagcttagtagggattggtggaggatgcagagtcagatgatggtgacaaggaggaatagagatggggtcacggggacagaatgttggagggtggaaagccaaagtgacagaggtcagggaggcagaggggaacaagtgaccccgggcc

SEQ ID NO: 36563 - DNA, 1295 bp, Artificial sequence
  DNA replication origin
ccaggggcacaagtacaggcaaaggagccgtcagtgttgaggcactcgccgtgagggaagcagaaatcgccctccaggcactcgttcacgtctagggtacgcgggagattgggcggagtcacgggacccggcctcccagacaagctccgcccacatcgcagtaaccccgcccccaccaatgccaggtttctaagctcctcccacagcgccttggtcccgcctccacctttccagccggctttgccctggaacccaggccctactcccagactctctggcgggtccctatgctgctcacctgcgcagggcccgggccgacccgacggcgcccggtagcctggcgcgcagctgcagcggaaggagccttcggtgttagtgcagtggccgtggggaccacagggaggggcacccgaactgcattcgtccacatctgtggggggtgggggtgttcagaaagggtccagtctcgggacacacccgaccaatccccttggagtagggtgtctgggggaggtggtgggaagtctcatgagttggaggctgggggagggctctatggcagaggtgggtagggctgaccaaggttctcgggttccggggaccatggttgcaagtcctgtgggtctaggtttctaggaactacctgtgccaggattttggagtcaggagagggatcagacagggatcagaaatcaactagggcaagggaccagtcaagtattataaactaggatcattggatgggattcggctgagccatgggtcagagttagtgactggaatctgaatccagttaggatcagaagttatagtcagggtccagaattctgcctcaagtcaggggccagggtcagggattatgaacccaaccaggttccagagaagggattctgagaagaggcaggggctgtgaaagagataggaccaagagtcacacagtcaaggttatggtcagtgctatggttagtggttatgattagggtcaaatgtcacagtcaaattcaggagttataggtcacattcagggccagagtcatgagggtcacaattgctatcagggtatgggcagggactatcatcaagggtgatggttagggtcaaatgttactgtcaagttgggtctcaggagtcacattcagggtcaagagttgtggtccaggtcagggtcaggagtcacaggctctggggactgagggactgaggtccaggtcaggaggttacggccaggtcatagttgtgatctgggtcaagggtcgggggtcatgatgcaggcccaaggtcacagccagggcctg

SEQ ID NO: 36564 - DNA, 1564 bp, Artificial sequence
  DNA replication origin
ctggaagtaggactggtggagggcgcggaaagggcacgtccaaacttctgttaggaagagaaggggcctgaagagggggttttaatccagaggccgattggaaggggcggggcctaacagttttggggcggtgtcttactgggggcatagcctaaaatgtggaccgggcttcagctgcagagggggaatggactgcggctggaagggaggcttggccgtgatcctgacacaagaaaatacatggacacggtggcggcttatttccactacagagatacggtgagagggtgttctttccctccgcctaagtctgggaagcagggcgcccctcctcagtccccaagggagcagcctccagcaccgcgttgcaagcgctagcgaaggcgggtgggggcaggctcaccgtcacaggtgccctcggggcccgcgtggtacccaggatcgcagtcccggacacagcggtaggagccgggagagttctcacagcgctgcgacccgcacagggctgggcctcgctcgcgacattcgtccacgtctgaggagagaggtcgggtggtcggatgtgggaagcagggaggcaagatgggggatacaaagaggggagaggagagtcagaagggggaggccggggaagcagaggagagggcaggagaagattggggtagaggagagttggggaggctaggagaggaggcgggggaaagaggtaaggggaggggagaagcggaggaggaaagacagaggtgggaggccaatcggcgagtcggggagtcgaagggaggagggatcaggccggggcggggcctctcaccgaggcaggaggcgaggtccgggccagcgcggtgtcccggaggacagatgcactcgaaggagccgtcggtgttggtacagatgccgctctggcaaaggtcctcctcgctgcactcgtcaacgtctgcgggacagggcgtccgaaggcccggcccacctcccgctccgcctaacattctaggccacacccctccaccgcccctcggctctcctaggcctctcacgccttccccaacctgcctcacgctacttccctccctgcaaacaccgccccccgacgggtttagaacagcttctttacaatcacggtccaaatacccagactcggccctttcatctccacgccccgccccccctcactgcctcgagactcccaccagctgccccctgatcctgctggaataccccggctaaaaactcgttttccccttttcgccctcttctccccgtcccgccttttcctgccctaagcccaccctttccggggccaggatcagcccgggtacgaaccgaggcaagaggctccgcggggtccgggtcggtagccaggggcacaagtacaggcaaaggagccgtcagtgttgaggcactcgccgtgagggaagcagaaatcgccctccaggcactcgttcacgtctagggtacgcgggagattgggcggagtcacgggacccggcctcccagacaagctccgcccacatcgcagtaaccccgcccccaccaatgccaggtttctaagctcctcccacagcgc

SEQ ID NO: 36565 - DNA, 931 bp, Artificial sequence
  DNA replication origin
atttattaccccacaataactccaggaaggcaggggtttttatatgacttatttcctgttgctcttattaccttttccagacgctggcatagagtaggtgcttagtgaattcttgtggaattaatgaatgagatcttatgaagctagatttccatgagtcagaggtctagcagagtcaacggcagcccacagatgttttgtttcatgtgttccacaagatgcggactcacacaccatcaccgcccccccccccccgccgacacaaaaaaatatatactgtatggaagattagccccaccctcctgcctcgctggagcctgacccgggaggggtgaaagagcggggcgggagggaaggcctggaaagtaagaaaaggcaaggggcgggtctgtgggcggagcaaagataggaagggagggcctaagtgttcgagagactggagccatccgagcgaatggaaagccctgtctagagagaccaaggaagggcagagcttaaacgggcgggggccaatgctaggagaatttcaccttgggaatttctcattgggaaagaatggggcctagggccaccgggattgggcctctttggagggaaggctggaagtaggactggtggagggcgcggaaagggcacgtccaaacttctgttaggaagagaaggggcctgaagagggggttttaatccagaggccgattggaaggggcggggcctaacagttttggggcggtgtcttactgggggcatagcctaaaatgtggaccgggcttcagctgcagagggggaatggactgcggctggaagggaggcttggccgtgatcctgacacaagaaaatacatggacacggtggcggcttatttccactacagagatacggtgagagggtgttctttccctccgcctaagtctgggaagcagggcgcccctcc

SEQ ID NO: 36566 - DNA, 879 bp, Artificial sequence
  DNA replication origin
ctcagagagacagacagtgggacagagactgagtgagggctcagtggggcgtggtcgagccaggagcatggggcgtggccttcggagggcgtggccgtcgcaaaggtgtggcccgggtgcgggtgtgaggccgagccaagggaaggagggcctggatggcgtgggcggggttaccgaggctctggctctcgttggagacgcagcggcgctgcgagccatccagcaccagtgggggctcgcaggtacagtgataagagcccacagtgttgacacagcggccgccctcacaggccggttcctcatcggcgcactcgtcattgtctagggagaggatgattaagaggcatccccttcaactctccccaccctttcccatttctcttcccagcacattggcagtgtgatggatggagtctagactccaggaaagacttcccgctggtggtggccacattccagaggggagctggcaaggctaggggttggagagagttgccgggggttgggggaggtggggcttgtaccgatgcactccagccgctgtgtgtggtagtagtagccgttgctgcaatagcatgagtagcccggggccgtgttcacacacacgccactcttgcacacctggtctcggaagagctgacattcgtccacgtctgtgcgaaaagcagagagagagatgggggcgggctggatgggtggagtgtgtgagggcatgacgtgggaagacagagacagagctggtgatagaccaagaagtagagacagggaaagaaagatggagaggccaggagcggtggctcatgcctgaaatcccagcacttcaggaggctaaggtgggcggatcacttgaggtcaggagttcgagaccaatctggccaa

SEQ ID NO: 36567 - DNA, 773 bp, Artificial sequence
  DNA replication origin
agattttgggatgggctgcgacataggggttggtctaggggacagagtttggatagagtctgggggttctgcgactggggatctgagggcctagatttggagcccatggggcaaggcctctgagttcagcctaggccagtgccagcacctgagtcctgcgcagggcagagggcgcagtccatgccccaggcctctccatacaggcagcagcactctgtgtaggtggcctgacggtccagccgagggtggctgcacacgaggtcagcccccacttcctgccagcacactcccagattgtcatctgtaggtggagacagcatgtgtcagagtgggcctggcactcaggtcctcccaggggctggacccttcccctgctgagcagcccaggcaccctctgcctatcagcaaatccttctcatcagctgtgatctaactctggaagttctctgaggtcactccagggttctggattgaggaacaaggagactgtcatataggaggagagggcagaagaaggtgtccaatgactgggaggtagggcctgagaggggtctacccaagtctggcctctggagggctgtgtggcctcggggcagttgctttgcttctctgagcattgtctgacatctcactgtatgggggtaagtgctgaaggcacaggaaatgagagaagagtggttgggacagtgggcaaaaagagaggtggcaagaagcacagagagagtgtgttggagcctgtaatcccagcactttgggaggctgaggtggggggg

SEQ ID NO: 36568 - DNA, 1629 bp, Artificial sequence
  DNA replication origin
gctccatctttctcgctgtaaactgtccatcccgctccagggctgtggcgggtgctgcggggccagtaagcttacctcattctctcgccagctttccctctgccaccttctctttctttgccgggctatagacacttctctgtccctttctgtggctctctccagttgcacctgtgttccgtctctcctcccgccttctgtttccctccctcctctctccgtgcacacctcacccctcatctcagtctcatcatgcgctggcagtgctcaccagcatagcttccaccttcaggaggctcctcgggctctgggaaggagcggcgggtgtcccgggaccgatagggccagcgggtgcccgggccaggtggcgcaggagcctcagattcgccataggggccaccatcgtcctcaaagtctggcatgtcgaagcggggtgccccataaggagcctcccggcgggcgaagggcccaggtggcggtgggtaggggtcgtagggtagcgcaggtggtgggtacaactcaggcccatatgggaggccctggtaaggtggacctaagtctgggccgtactcgtaggggagtccaaagccacctggtcgcggggggctatatgcgggggggcgtagcacattgcacagggcctcgaagtcatctgggaacaggagccaaggcaaacaatcagcccctgctggcccccacacccaccactcacataccccccttgggagaggaggcagaggactggatggggagggtcctgggtggccccggggtttctggagccagcgctgagaatctgaaggctgagactgggattcggacgtgctgagatcaagggtaatgaagcctgctaagaatcagggtctgagaggctggaattggagcgacccatgggagctaggactagggacctgaagaaattagatgggggtgttctgtggaccaggactggggaatcccagggattgctgctggggacctgagggggcaggatgcatgggagacagtctgaggcactgggacctggaggtctgaggacccaggactggggctttggaactgggttcctaagggctgaggactgagggactcagaggttgtagaaaccaagacttgggaatctctggggctgtgtgttggggtcttaggcacccggatgtggtgtgtaaggcaatgggacttggagggtgtctaaggcaatgggacttggaggtctgtggggctgtgaccagggggtctggggccaggatggtgaggtctgagcaactggcatttcaggtctaagggcccaggatttaggggaggacatctcataggctgtgtctggtggttctagagaccaggagctgagcatatgagagaccagacctcaggggcctgtgggtctggtactatgggatctgctgggtcaggccttgggatgtctgtggctgagacttggaagtctttggagtgtgaatcggggaccaagattttgggatgggctgcgacataggggttggtctaggggacagagtttggatagagtctgggggttctgcgactggggatctgagggcctagatttggagcccatggggcaaggcctctgagttcagcctaggccagtgccagcacctgagtcctgcg

SEQ ID NO: 36569 - DNA, 877 bp, Artificial sequence
  DNA replication origin
ccagaaaccccggggccacccaggaccctccccatccagtcctctgcctcctctcccaaggggggtatgtgagtggtgggtgtgggggccagcaggggctgattgtttgccttggctcctgttcccagatgacttcgaggccctgtgcaatgtgctacgcccccccgcatatagccccccgcgaccaggtggctttggactcccctacgagtacggcccagacttaggtccaccttaccagggcctcccatatgggcctgagttgtacccaccacctgcgctaccctacgacccctacccaccgccacctgggcccttcgcccgccgggaggctccttatggggcaccccgcttcgacatgccagactttgaggacgatggtggcccctatggcgaatctgaggctcctgcgccacctggcccgggcacccgctggccctatcggtcccgggacacccgccgctccttcccagagcccgaggagcctcctgaaggtggaagctatgctggtgagcactgccagcgcatgatgagactgagatgaggggtgaggtgtgcacggagagaggagggagggaaacagaaggcgggaggagagacggaacacaggtgcaactggagagagccacagaaagggacagagaagtgtctatagcccggcaaagaaagagaaggtggcagagggaaagctggcgagagaatgaggtaagcttactggccccgcagcacccgccacagccctggagcgggatggacagtttacagcgagaaagatggagccaaggacgcgcacccaccgttgtgggtaaggggtgaaggcagggacctcaagtcatagggtccccgcatttcccacaggttccctggctgagcccta

SEQ ID NO: 36570 - DNA, 1105 bp, Artificial sequence
  DNA replication origin
gaggagcgtctccgcccggcagccaccccgtccgggagggaggtgggggtcagccccccacccggccagccgccccgtccgggagggaggtgggggggtcagccccccgcccggccagccgccccgtccgggagggaggtgggggggtcagccccccacccggccagccgccccgtccgggaggtgaggggcgcctctgcccggccgcccctactgggaagtgaggagcccctctgcccggccagccgccccgtccgggagggaggtgggggggtcggccccccgcccggccagccgccccgtccgggaggtcaggggcgcctctgcccggccgcccctactgggaagtgaggagcccctctgcccggccagccgccccgtccgggagggaggtgggggggtcggccccccgcccggccagccgccccgtccgggaggtgaggggcgcctctgcccggccgcccctactgggaagtgaggagcccctctgcccggccaccaccccgtctgggaggtgtactcaacagctcattgagaacgggccatgatgacaatggcagttttgtggaatagaaaatggggaaaggtggagaaaagattgagaaatcggatggttgctgtgtctgtgtaggaagaggtagacatgggagacttttcattttgttctgtactaagaaaaattcttctgccttgggatcctgttgatctgtgaccttgcccccaaccctgtgctctctgaaacatgtgctgtgtccactcagggttgaatggattaagggcggtgcaagatgtgctttgttaaacagatgcttgaaggcagcatgctcgttaagagtcatcaccactccctaatctcaagtacccagggacacaaacactgcggaaggccgcagggtcctctgcctaggaaaaccagagacctttgttcacttgtttatctgctgaccttccctccactattgtcctgtgaccctgccaaatccccctctgcgagaaacacccaagaatgattaaaaaaataataaataaaaaaataaaaatacaaaaattagctgggcgtggtggcacatacctatagtcccagctactcgggaggctaaggcag

SEQ ID NO: 36571 - DNA, 1872 bp, Artificial sequence
  DNA replication origin
tcccagacggggtggtggccgggcagaggggctcctcacttcccagtaggggcggccgggcagaggcgcccctcacctcccggacggggcggctggccgggcggggggccgacccccccacctccctcccggacggggcggctggccgggcagaggggctcctcacttcccagtaggggcggccgggcagaggcgcccctgacctcccggacggggcggctggccgggcggggggccgacccccccacctccctcccggacggggcggctggccgggcagaggggctcctcacttcccagtaggggcggccgggcagaggcgcccctcacctcccggacggggcggctggccgggtggggggctgacccccccacctccctcccggacggggcggctggccgggcggggggctgacccccccacctccctcccggacggggcggctggccgggtggggggctgacccccacctccctcccggacggggtggctgccgggcggagacgctcctcacttcccagacggggtggctgccgggcaaaggggctcctcacttctcagacggtgtggctgccgggctgaggggctcctcacttctcagacggggcggttgccaggcagagggtctcctcacttctcagacggggtggccgggcagagacgctcctcacatcccagacggggcggcagggcagaggcgctccccacatctcagatgatgggcggcctggcagagatgctcctcacttcctagatgggatggcggccgggcagagatgctcctcactttccagactgggcagccaggcagagaggctcctcacatcccagacgatgggtggcccggcagagacgctcctcacttcccagacggggtggcggccgggcagaggctgcaatctcggcactttggggggccaaggcaggcagctgggaggtggaggttgtagcgagccgagatcacgccactgcactccagcctgggcaccattgagcactgagtgaacgcaactccgtctgccatcccggcacctcgggaggccgaggctggcggatcactcgcggttaggagctggagaccagcccagccaacacagcgaaaccccgtctccaccaaaaaaatacgaaaaccagtcaggcgtggcggcgcctgcaatcccaggtactcggcaggctgaggcaggagaatcaggcagggaggttgcagtgagccgagatggcagcagtacagtccagctttggctcagcatcagagggagaccgtggaaagagagggagagggaaaccgtggggagagggagagggagagcgagagcgcatcagagtattttaacagcagaattgatcaaacagaagaaagaattagtgagtttgaagacaggctatttgaaaatacacagtcaggccgggcccagtggttcatgcctataatcccagcattttgggaggctgaggtgggcggatcacctgaggtcaggagttcaagaccagcctggccaacatggcaaaaccccgtttctagtacaagtacaaaaattagccaggaaatggtggcatgtacctgtagtcccaactactcaggaggctgaggcacaagaatgacttgaacccaggaggcagaggttgcaatgagccgagtttgttccattgcactccagcctgggtgacagagtgaggctctttaaaaaaaaaaaaaaaaagtccaggcgcagtggctcatgcctgtaatcccagcactttgggaggcggaggcgggcaaatcacctgagatcgggagttcaagaccagcgtgaccaacatggagaaatcctgtctctactaaaaatataaaattagccgggcgtggtggcaaatgcctgtaatctcagcta

SEQ ID NO: 36572 - DNA, 920 bp, Artificial sequence
  DNA replication origin
cagactctgagttccctgaaggcagggcctgtgagtttcattgtgtaccctcagccctcaatagctgataaaaataaatattcagaaaatgcttgtaaaatgaagaagagaatatgtatgggacagaaagtagaccagtggttgcctggggctgggacagggaatagggagcgactgcaaatgggcagaagggatcttttcagagtgatggaaatgttcttgaattggctgtgatggctgcagaactgtaaaatcacccaaaatcagtaaatcacttataataggtgaattttatgacaggtagattatacctcagtaaagctgttaaaacaaaaccagtgttgagggaggaaataaatgttaccttggtaatactgaggactcagtagttatcaagacagctctcttccctgccctcatgaggttttctgtgcagggcggggacgccgacccattatagacagtgacagcctagagccatcacggcgggatggtggggaggggacaggcagaggggtgggaggccaggatgggggaagcccgggcagagaggttgggctggaatggggggcacaggcagaggggtcggggcggggactggtgaggtgcaggcagagggcaaaggggtcgaggtccagatgggagatgtacaggcagacggatccgggccagggcggggaggtacaggcccagttgaggagcataaggaaccataggagcccaaaggaggcgcccgaccagtcagggaggacttcccagaggggtgaatggctgagccagggcctgaagtataatgttcatgaatgcgacagcaatttttttttttttgagaccgagtctccctctatcactggagtgcagtggctcgatttcggctcactacaacctccacctaccgggttcaagcgattctcctgcct

SEQ ID NO: 36573 - DNA, 1644 bp, Artificial sequence
  DNA replication origin
ttaaacacttttcctgccttagcaaagtcttggaggggcggccgcccaggcgccgcgagcgcaagaccacgagggggcgctgcttcaccacgctagaggagcgctcccggcaaccacgtggccccacaggtgcgggaggtcggcgagcgcgcctggagggtggacggggtaggttacggccaggcagcccggggtggcgcgtggccctgcgcagggcagtggaagcagcgggccccagggagcatgagacgccgcgctccgtggggcggtcccagcgctgtgcagcgaggggccagggctgtccccggtcctgcgcggccggctcccggagaaactgtggcctcctgggggtggagctttaaaaaacaaaacaaaacaaaacaaaatcacccaacaggaagcggggtgggggcgcccggctctgtcacccgtggaatgcatcaaaatagcctgcgcggccgggggcggttccgggaaagggggcggccgcgaggggcggggctgcaacggagggcggagcttcccaaagaacgggagagaggagtgcagaaccggccccagggggacgtcctcctgttcccccaaaatgacctcgataggcgtttgtgtgggatggggttcctgggtagggcggggctttccagtgcgatgtccctggtctattcttagcgggctgaaacctggagaagtgggagtgggcggttgatccgggttccagggcctctttggagcgaaaagctccgtggagagccagagtctccatcctgggcgtgggagggaagatgggaaatgggccaagaggagcctgtgggaggtcctccccgggacggcccccttccatctgcatccgcgggaaccgttgtgggggcagctctgagaaaggctgctctgggcgcaaggaagggtggttgaacgaagagatcagtcagggacggggtgggggtgccttgactgtgtcccagatttgctgcgtgcttctgacctcagttccccatccttccagttgctcaaatcctctctgtcccagtcctaggccgtttctgcccctctcacttcctagtggtttgcagaggggaaacactgaggctgcctcttctgtgcctggccctgtgttggcacggggaagtgactgagacgccccagacccccttctccctcacagtccagtgaggcagacagacctgccaccagatagtgacagcccagaatgagtcattgagaggacgggggaggcacaggcagatgggtcagggctgggataggggaggagaggggcctgtaggatccaaggggagagtgggtgctgctgactcagtctgggggggttgaagagccgtctgaacttagaccaaaaaggtaggatggggccgggcgcctgttatcccagcactttgggaggcagagacaagaggatcgcttgaggccaggagttccagaccagattggacaacatagcgagacccccatctctacaaaataatttaaaaatcagttgggcatagtggtgtacgcctatagtcccagctactcaggaggctgaggtgggaagattggttgagcccaggaattcaaggctgcaatgagctatgattgccccactgcagtccagcccgggtgacagcgtgagacccctgcctccaaaat

SEQ ID NO: 36574 - DNA, 721 bp, Artificial sequence
  DNA replication origin
gacatgaggtaactgcgcatcttctcctcctcctccctccccgcctcctgggcccccaacttggccctagcccccatgagaccttggcccaaggaagacatgggccccaaagttggagggtgatggaggtgagtacagcattggcagtgaacgcagcgtgtgggcagagggcagcccttagcttgtgctgtgcatggggggaggagacgaccagatttggggtgggcactggtgtggggcccaggagagcccctaagcaagtgtcccccctccatcctgtccaacactggaaggtgggggtcaacagaaactgggaaatggagtgtgaaccaagggcattcagtgggattgtggccaacccctgtgtctggggttggggaagggggcattgccagcctaagtccggcagtgaaatggttcccttagccaggctgggtccgtccctgaattccatcctgttgcaacctgggcgtcacaatgttggttctgtagtggttgtcggggtggttgagggaggggggtgttgagagggtgttgaggggcgcagccccagggagcagggttaggggagaggttgtgcctccacccccaggcgtggggcacctggagatgatggagtgggtggggcggctcgggctacagttcaatctcgaatgtcttttgcaggtcgccagaaaaggggttggagggtttctctacagtggctttgccttctaatgcc

SEQ ID NO: 36575 - DNA, 2120 bp, Artificial sequence
  DNA replication origin
tttttttttgaaacagagtctgctctgtcgcccaggctggagtgcaatggcgctatctcggctcactgcaatctccgcctcccgggttcaagcgattctcctgtctcagcctccccagtagctgggactacaggcgcccgccaccacgcgaggctaatttgttgtatttctagtagagccggggtttcaccgtgatagccaggactgccggcctcacgctttttaacaccaacttcaaacgacttgggctggtgtcccagccaggccgcgcacccgcacagcacagcacagcggcccccgtccccctcgccccgccgcaccctgccgcgcccactcaccctgaccgggaagctgcacgtgcccttccgcaccgcgtcctcgtctgcctgccactggtgcgggcgcgacgcctcgggcacgtaggctggcttcctccgccgcaggctctgccgtaacttgttcatggtgcccgccccgtctggtgacacaggacagtgatgtgggtcaagggtgggggtcagaaggtatggagctcaacggggagggaccagtgctcagggagcatggggtcagataacaagataactggaagcggggttacagggtcagttggcagcgcacatgggatcagcagctcaagtcaggggacagtgaggaaaggagccaacagaagccaggggagtgcgaaagttgggcactggggattcagaaccatggggctaaggggctggaggtctggggtggggggtatggggcacaggcttcagggcattggagggcttcttgtccatgtggtggatgcttcctcattcccagggccgtgaggacacaaagggtgggaaatcagacgtaggagggcatgggggctagagggcatagaagtcaggggccgcacggtcaggggttttaggggtatgagagtcaggcagtggggtgatcagagggcagcagaggagttgggaattgcatgggtcaggggtgcaggagtcaggtgcatggggtatgggggatggtggcttgtctctggaactctgagacacagccattctgtgacaactgtgtctagtccccaggcaaggcttctggggccttgcactgatgactgtcagaggcagggctgtgggtgtgtggagtgggtgtggaggtggccagccactaggacagtcttcactgatcagccatcctgacagtcccaggactgggagcaccaacagcagagggggatgtgtgtgtgtgtgtgtgtgtaagcaagtgtgcaatggtatgttctggaacgctgtctatgaggggctctatatctgagcaggcaagtaatgtctgtgagtgtgtttctgaaggctgtctggaagaacgcatgtctgagaatggtgtaggatagtgtgcatctgtgaatgctgtccgtgagggatgcatccaaaagtgtggttgttgtctgtgagtctgaggccctgaaggttgttgctgaagggcatcgatgtctgagagtggttgtgagtgtgtgtctgctgtctatatccgagagtgccgttgttgtctatgagaacttgtggctcagtgcctgttgcctgtgagggtgtgtctgtgtttgagatgaggctgtcgtctttcaaagggtgtgtccatggctgttatccatgtagctatgtctctgtgtgaaggtgtggctattgtctgtgatgacattgcctcggagagtgcatctgagggatctacaagactgtctgtgtccaagagtgcagctgttggcggtgagcctgtgtgactgtggctgttgccttagagtgtgggtgtgtgggtattgcacagagggtgtatctgtgtgcagtggtgcatccgttagggtgtgtgggaacatgaggttgtctttgagagtgttttcatgagggttatttgtaagggtgtgactgttgcctgagagagtgctgggtgttctttgtgagactgtgtgcatgtttgtacacaaccgtagctccctgtgagagcctgggcccgcgggtgctgtctgtgaaagtgtggctgtcgtctgtagaaatgtgggtctgtgtgtgttgtcagactgtgcaagagtgtgtctcttttttttttttttgagacgaaattttgctcttgttgcgaatgaa

SEQ ID NO: 36576 - DNA, 1622 bp, Artificial sequence
  DNA replication origin
cctaagggggtctcagcacaacaactgcctaggtacggtctcgaggatggggtcactgggtacagcgttcccaccacgccaaggcctagggggactccaagcacagcctgcccccaggtctcagaggcaccctgggcacagcatccccccaatccttgggcggagtcccaggcacagccacttctcaaaacaaggtccctgtgcctgggactccaccccaccccagcctgaataaaataaggacaatttcaggcaacccccaatccctccaccccctggcttggtcatgggtcccagggcacaggatccctaggccaccccctttgtccccagggctgcccagctgtccaagagtggccccacccgcagacaatgcaccgcttccccctcctggacctggccctcaggctccaggatacaggctgggctgggggcggctccccagggaccgggtgcagccctgtctgtctgcagtgtctgcggtgacggtgacggcggctttgtgtgtggtacctggggggaaggggggaagcaagcgatggggaggtggctaggagtgtgccctgtgtttgtgtgactgtggctgtgtatgtgtgtgtgtgtgtgcacgcgtacgctgcagctggtgactgaggaatcctgtgtcgtgtgtgtgtgcttgtggtggtgtctatgattgtgtctgtgaccctagtatctgtgtgactgtgtatgtgtgtgtgacagctgctcactgtgcagaatcctgtactttttagtctgtctgtgtttggaggtgtgcatggttgtgactgtggttgtctgtgattgtgtcttttgtgaccctgtgtttgtatgcctcggtaactataactgggtatgtgacagtatgtgttgagtctgggggtgggcatgcgtgtgactgacaggacgtgggtggagttgtgactgtgtgtgagtggagttgtctatggctccatgtgcatgtgtgaccctcccagtgactgacaatgtttatagttgtgtctctacctgattttatatacgtgagtgacacacacctgtctgtgcaactctgcctgtgtgactgccattgtgtctgaagtcacattgtatctgtgtgactggggttgtgtgacagtattgtgtatgacagtggttgcgtatgcagaaccatgtctgagtgtgtgactgaggttgtattaatataaatgactgtatctagcagtgtgtgtgataacgagtgattgtgtgtatttctagccttgcatgtgtgatttgggttatgtatttgacttggtgtctgaaaccctggctatttagagggattatttgtgtgtgactaaagctgtggatgtgtctccgtgctggtgccaggaaattatgtttgtaggggtgtgtatatgattatggcttccatattattgtgtttgacctgcatgtctgaccctgggtgactatagatgtctgtgtctatgtcatcatctgtgagagtgtggggtctgtagctgtgtgcctgtttttgtctctgtgtgtatgtgctggactacctgtgttagaatgtgtgatttggtgatgagattggcccctgactgtgcacatggctccgtcaggacctgtgtcttctgtgtaaacccagctat

SEQ ID NO: 36577 - DNA, 951 bp, Artificial sequence
  DNA replication origin
tcagctcgggactggccaatgggcgtggcggggcggtggccgcgccggggaaggcgggatggtgtctgcgtgtgggcggggtcttcaggccaaggggcggggcggggcgggacctttctgcatatacggcaggcggcgggccaatgggcggggtcggggcggggagccgaggccgagggacgctcccccgcccccggaacggaatcctcccgggagccgaggaggctcgcgcgcgtgcatcccgcaccatcccccggccccgggccctggccggcgtcagaccgagctgccgccgccaccaccgcagcagcagcagtcggggagccaggcccagccagggccgcgggaggcgggggcgcccgggccctggatgtcccgcagcgcggcggccagcgtgagaagggcgggagaggggggctcgggtcgggggcggcgccgctgctgatgtggcggagggtgggaggcggccgcggcgcccggatggagagagggtgccaaggctggagagggtggtcccgggtgggggtccaggaacaggcccaacaagccaaagcccaggagaccggggtcttgggcacagacccctgggccatctcttgccaaggccctggaaatagggatcctggacacagaccccccacaaaaccaaggacaggggtacagagattctaggtacaactcctagaactagatggggatggagatggggtcggggacacagcccccgtatcaaaccaaggcctccaggacgcgattccagacacaatccctacctctccctgcctaagggggtctcagcacaacaactgcctaggtacggtctcgaggatggggtcactgggtacagcgttcccaccacgccaaggcctagggggactccaagcacagcctgcccccaggtctcagaggcaccctgggcacagcatccccccaatccttgggcggagtccc

SEQ ID NO: 36578 - DNA, 851 bp, Artificial sequence
  DNA replication origin
gggtctgtgcccaagaccccggtctcctgggctttggcttgttgggcctgttcctggacccccacccgggaccaccctctccagccttggcaccctctctccatccgggcgccgcggccgcctcccaccctccgccacatcagcagcggcgccgcccccgacccgagcccccctctcccgcccttctcacgctggccgccgcgctgcgggacatccagggcccgggcgcccccgcctcccgcggccctggctgggcctggctccccgactgctgctgctgcggtggtggcggcggcagctcggtctgacgccggccagggcccggggccgggggatggtgcgggatgcacgcgcgcgagcctcctcggctcccgggaggattccgttccgggggcgggggagcgtccctcggcctcggctccccgccccgaccccgcccattggcccgccgcctgccgtatatgcagaaaggtcccgccccgccccgccccttggcctgaagaccccgcccacacgcagacaccatcccgccttccccggcgcggccaccgccccgccacgcccattggccagtcccgagctgagcatgcctatgaacatcgccgagtcctttcccccggtccgtcctggcctgggctccctttccctccgtgacacctgacctcagatcccctccagctccgcgtccgaaagagttgcttctagaggcgccttgccgccccacacccccaaatcttcccgctaaccccatggttccccagcccggcgggggcgggcaggagcggtgacgaggcactttttgcaaggaaggggagggggtgtgaacagaccaaggcgtcctgatgcgcgat

SEQ ID NO: 36579 - DNA, 1227 bp, Artificial sequence
  DNA replication origin
gcctgaagaccccgcccacacgcagacaccatcccgccttccccggcgcggccaccgccccgccacgcccattggccagtcccgagctgagcatgcctatgaacatcgccgagtcctttcccccggtccgtcctggcctgggctccctttccctccgtgacacctgacctcagatcccctccagctccgcgtccgaaagagttgcttctagaggcgccttgccgccccacacccccaaatcttcccgctaaccccatggttccccagcccggcgggggcgggcaggagcggtgacgaggcactttttgcaaggaaggggagggggtgtgaacagaccaaggcgtcctgatgcgcgatcggttcggctttgggaacgggggcgccggggtgggaccagggcgcggttctggccgctacggcgcccccgccgccccctacgccaatcctgtgggtttggcaaagcagctggcagggacattagagcccattagtaaaggcgaggttgccaggagtgaggggagggagcccgcagccaagaggcactgtgtgtgtgggaggcctcagctgccacagcccttagagcaggtggtcagcacgtgggggggggtggggaaggcgagaaggaggttcccggcaacagatggcacaggcagggctgaggctttcagacaagggggtgcaggggggctggccatctgcacctggaggccgctggcgagctcctccccctctccccccaaccctagcgcagagaaaagagctgggggaaggggagggctgcttttattccgattgaagattcagctcccccccaccccgcacccctacctctccaacacactgagaggctggaacccgggagaaggcagctgttggaggagcgagggaggcagaggtgaggactgcctccaggaccatctcgccttccacgggaggcttgaggcagaggtgagggctccccctgatgagtctgatctgcataacgacatgcagcggcccaaggctccctcaaatgttggcaaagataagttaaccgcttccctggcttagttttcggatacccactttcgagtggggaggtgcaggatctagggcacgaagttgggagttccccagccccagggatcctgagctcctgggccaaggaggagagccaggcaagactgggaagcccaagggggctcctctgacccagggcagacggggaagggataagaggcactacag

SEQ ID NO: 36580 - DNA, 1080 bp, Artificial sequence
  DNA replication origin
gatgcagttctgggtcacgctcatacccgtccagttgagtgtttggactcaccagcagccctgacacttgtttcttgcactgtttcactgtggcagttcccgggcaggccccacattgccctctaggtgggcaggatccctaaccacctccactcccaggctctggaagagtctttaagggagtcacagacaggcaaagttgggagcaggaagcttccaggtgagggagggcccaggcagatgagaatggaggtgggtacatgggaggcccaggcttccagctcctcttctccagagcccccttgagccccggcctttgtccctctaactcccacccgtctccccaggtggtgaaggctgcagctgatggagacagagactgtgtcctgcagaagtccagggacctcaaattcctcacaggctttgaaaccaaggtggggagacactgggggagaaaggggctggtgtctgttggtggggtgcagtggggggctgcttatctccactgaggaactcgagtaggtgatggggcatgtcgatacccggggactgggggactctaggaggggcttgtctccactagggagaatggaggctgtgtgtctatacctggggagtgggtgactctaggagggatgcttatccatgctgggggctttggggaggagtggggggaggtggctgcctgacttctcaggaaccctgggaacatgggcaccgtggatctgttcaggaggggcgaaggccgcttctctgttgtagagagagtagagggctacttgtctgttggaggctctgcagggaagtaaggggtgcttactcggggaataggcagctgcttgtctagtccaggctctggaaggagtggaagctgctcactcttgggggagtcggggcttgtgttgatggtggagactggagggagtggaggctacacgttgtttctgggttatgcagagggctctatgtccacactggctgcctttgctctccccccacccccactcccaggcattctccgacgcccacgtggaggcagtgatgatcctgggggagcctttcgccacccagggcccttat

SEQ ID NO: 36581 - DNA, 800 bp, Artificial sequence
  DNA replication origin
gggaatgaactctgccacaatgatgatggctgtgaccactccccgcagagagttcttgaagaggagctcggcagggactggcaggccaaggtggcctccttggaggaggtgccctttgccgctgcctcaattgggcaggtgcaccagggcctgctgagggacgggacggaggtggccgtgaagatccaggtgagaggggaggctgggcagggtaggggcgggcaccctgctagcccagagaagtgactcccaccttctctccctcccttctccctttacagtaccccggcatagcccagagcattcagagcgatgtccagaacctgctggcggtactcaagatgagcgcggccctgcccgcgggtgaggcgcccacccactcctctgctgacctcccaaaggggctatgcccagagagagaaagcaggagggggagcccagaggagagcacgggcagggtgtgctggcgttgtgagcgggagtgtcagagacagaaaggacaccaaggcggggagagcccagggagcatgagcaggtgtgggaaaagccttatggattttaacagagccttagagagacgggagcccagggccaagatacagcagcagactctcagagggtgtgcatgcagggagcgggattgtaggtgcggcagagcagaaaaggacagtcctggggatggcacgtgaggaggcgcctagagaaaggagggtgggttgtgtttgtgtaagagacggagagggagagggaaagccaggcccagaagtgagattcagatgcagtgagcaacgtgagagtca

SEQ ID NO: 36582 - DNA, 1140 bp, Artificial sequence
  DNA replication origin
aaatgtttgctgggaagaatgtgtattcaaaggaattgtgttgagcctgccaggggtaaaaataagaaggggggttggcaagatattcgtgcagaagagaggcgtcaggtttgtaagggagactttgcaagaaagtgtagggaacagaagggtctgtcgcgtacaaggcactttgaggtgagtggaagggcagacagggcacgcttgcgctcccgcgatgcctcagcaatccccccagatgggcccccgatgcccaccttaattccaggctccatcgctagggcctctctctggccccttcccccgcgcacagatggagaaactccgtgccagtcagcgagttgctgccgcgccattggttggctggccgaagggggcgggcatacagaggctcccggaagcacaggagggccccagcaggttgcggactcggaggctgagagcagtgggtgcttagcaacggggggaggtgctcagtaacggggtggggatcgggcggggggacaccggaggaattgcgggtgcctacagggccaacagaggggaaggcggtgcatagcaacgaggggggtttcagagaagtggagaggtagcccctgaggaactgtgggtgtctagtaacgggggcggaccctagcaacggcgagggttgggagaggggggaaagtgggttttgggaggcctgcaggaagagctaagggttcctagcaaccaggggagaaccaggagaaactgtgggaatctattaatagtggaggaagtatttagtgggtgggaatgagagagggtggacacagaggaacatgggggcctggccaagaagccaggcaactcccacctgaataatccctcctcttctcctccaggcaatgtggctgaaggtggggggcctacttcgggggaccggtggacagctgggccagactgttggttggccttgtggggccctggggcctgggccccaccgctgggtaagaggctagggagcaggtccccaaggggaagaggctgagggagacttcagagggtaaaaggacaggaggggtccagaagggccaggtgatcccatgtcctcccctccttatcaaagtatatctcttgcagggaccatgtggaggttcttgggcccaaaagttttac

SEQ ID NO: 36583 - DNA, 929 bp, Artificial sequence
  DNA replication origin
tcacagaccaatgagagaaatcgaaggcaggagcccacctagtacctcatacaggttgggaaggagaagtccagagagggatgagggcttttctgaggtcacacagtacgggaatagagacaaagaggcctgattcccgacaagaggggttggggcagcggggttctgtgggggaagcatcggcatccctccctctcccagtggtgggaaagatgccccaaccagatgcctctattccagactgtgagaagtgggtgagtcagcctgttgtggggagagcaggctttccaacgcgcgcgcgcacacacacacacacacacacacacagagaaagaaagataggatgggaggtggttttctgggatgccaaggttcctgactcagcactgggaatcttggctgagtgtgttctgggaaatgtcaggcctacaggaagcagagggctcccagtcgcaccattccgcaggtgggcggggagcggagagaacagggtgtgtgagggaacagagactcagtgtgcaagtgggggggagggtatgtacacgagagagttgaaggcgtgagcgggaaacagttggcaagcaaggcaagggatttatatgcacaaggaaggaggttgggtgccagaatgtgggtgtttgtgcaaagtggaggggctccatgtgcaagggaaatgtttgctgggaagaatgtgtattcaaaggaattgtgttgagcctgccaggggtaaaaataagaaggggggttggcaagatattcgtgcagaagagaggcgtcaggtttgtaagggagactttgcaagaaagtgtagggaacagaagggtctgtcgcgtacaaggcactttgaggtgagtggaagggcagacagggcacgcttgcgctcccgcgatgcctcagcaatccccccagatgggcccccgatgcccacc

SEQ ID NO: 36584 - DNA, 1866 bp, Artificial sequence
  DNA replication origin
aaggcaggtctgtctctcacagctagggccacatgtgtgaacacgtccccaaggaaggcatgtggggtgaagcggggctcagggcagactccagccaggggccccagagcaaaaagaggcctcagcaggcaagctggcaagctgatggactccggactcggctcccagccccacggctcccagccccacgtgaggctctccagtttcacaccggcctctgctctgtcccgccctccctgaacctgcccggccggtcctcctgattcaccaggggagagccacacccaagctgggggtgacggtggacaaagtaaacaagagtgttcagggggctccttggggatgtaggggtcacaggggagaccaggtgggctcccggctaggccaaggatcctttggcgtttggggtcacacagcccttttgcgaatctgatgcaagctgggggaatcgctttgctccctagaaaaatgtacatacaaataggctaaggggtggtgaaggtttgtgaccctttaagacagccacaggccccagattaagaaatgtggggtagaaagtgcaccctgcctgtctccctatcccagtgttcttcagattccagaggattagacagatgtcagaccgtcgctgcaacaatgtatgtgaacacgcacggcaggctccttagtcctacaatttcaggggttcctgggccccataaagtcggtcagtggccctccattgtagacccccaggagtggagacagtgcaggaaggggaaaggagagaattaagaaggggtgcctggagtgaattagtaacctggctgtcagagggaggaggtcagtggatggaagaggttcccggagatgaaattgctggtgggcaactaacagtaaatgggtagagaacttcctaagcaaaggcggaggaataaggagttttgcgtgatgtggctcaagggcaggatgggtcccactcaccccagacctgtcctcgggatcgctggcacctccgcccccggccaccacgtcatcctcagactcgtcgaaagaagaggcagaggagaagccgccgctgcccccctcaacccgggaggggggtcccactggctgggcctcaggctcaggggtctcaggggtaatgatgaggcggggcacagggcacagggggctacacttcaggtgagagtacaggtgagtcagcaattctccaggctctggttcctctaatgggccatcctcaggctctcccaagaggcagtctgtcccaggtgctgtctgggaaccgtcagtgctaggttgtgtccaggagccatcagtatcctgttgtatttggaaaccaccagtgccaggctgtttcctggctgcttcagtatcctgttttttctgggagccatcagtatatggctctgtccagggaccttcaatatcctgttgtgtcctggagccatcagtatacaattctttccaggagccatcagcacttggctcttttgagggacaggctccttctgggtgagtctggaggctggaactgttctggtgggtccagaggttatcagcccaggacttgaccctctctggctgagtctgtgacccatgcgtttccagctctgtccagggcccatgaacccctggctgtgtccaggggctggcctcctcgggctgaaactggaggtcggacctgtgcggatcagtccaaaggccatctgtcccggtctccgtccaaagacaagtcgtctccagctctgaccagctccattctagatgcgtccggaggctggacctgtctggctccgtcttttgcttgggcctctcggtctctactccaaggccagctgccgcgggctcagtctgtccgtctgtccagaattctgcctgcgg

SEQ ID NO: 36585 - DNA, 1463 bp, Artificial sequence
  DNA replication origin
gggactacagttgcatgccaccacacctggctaatttttgtatttttaatagagatgcggtttcaccatattggtcaggcaggtctccaactcctgacctcaggtgatccacccgcctcggcctcccaaagtgctgggattacatgcatgagccaaagcacccggactggactgggcacttgtgaggacagctttcttcattgctggaggcacaccaccatggaagagatctaggtgggggacctaagtagtcagcctgtttgatcttgaggacacgggaaccccccccccaccccaagagatctgtgaagtgtctagggcagagcctgggtggtgggtggggcatggagaccctaccggtccttgtgtagtttcagaagcctcttcacatcttctctgcccttggggaccgggccggccttatcaaaggcctccttcaggagctggctcttctccaggccgaagacatgacggggagcaggccctgtggcagcgggtggaggaggcagtgggagcggtgggggaacaggggtctgctgactccagggaggggatggtaaagctgaaaagtccaggggacttgggggtagaggaggagatggaatgctgctggcttggggtacaggggtttttggaggagaaattggtggttttaggggaggagagcatggagaagtcattttggggtctacaggaggtgttgagaggttcagaaagcggggagggaaggatcctccaacggagaacggtctcagggatggagattttaaaggtttaagagctgagttccagaatctggggactgagcagtgggtgtgaaaggaccagggctaatatttgaaaccacgggagcaggaattgcgaggctgactcaagtcataaggcacctgacggttaacagggtggggtccttaaatccggaaccggatctgtggtaccggttgggttacctcgggagtcttaggtggagagttagtaggagttaactcattctttggggctggatgtggaaactcatgagtgagtttgggatatgaaggctcagatctagagtgaggtgccttaaggatgcgacttagggacccagggctaaagattcggagaacttaggttcagtaccccctcacatcccaggcccgagttcggaacctttgagctgacctttgagtcagaggtcaagaggtcaaaaaggacacctggcagggaaaatggcctagttgtggagaaggtcctggaaccagagcaacaaaaaacgtctgtgggttggagaagactcagagatcagaggccggtgggcgccgcgataaccactggaaaaaggaaaggagtcaggaagtaaagtgcacctcccactcccggaaaatggcggcccccgcacactgcctttcccatatcacgtggtattacacgcaacagttcccgcccattttgcgatcacgtgacagaaaacgcagctctggcgg

SEQ ID NO: 36586 - DNA, 901 bp, Artificial sequence
  DNA replication origin
tctcccactggactcagggctcttgtgctcaccgactcccctatacccccgcagctttctgagaatccaccgaatcacatcttgttcctcaccaacctgccagaggagaccaacgagctcatgctgtccatgcttttcaatcagtaagtggggcctgtggctgggtggtccctggagggtgatggccaggaggcatctccatggaaacaggcctcagaactctgccagcagagctctgagccaagtagggctttgcagaagggacagcgaccaaagatgtgaaaggaggaggctgtggctgggcccacggcctgtgggggacatgggggtgaggctggaaaggtctccatggccagggcttgccggcttttttcagccttgtttgagggctgagggagtccaggctctgggcctcattttcccagcccctaaaatgggggcatgcaaggcaaggtatgtgtaaaactgcattgagatgtccttgaacattggctaagactggcagaagtcagcgtgctcagaaacagcaagtgtgggagatggggatgcgtgaaactcttgtgcctggcgtcagggtggaggccggtgcagccgatgtgtagaggggctgttcaccattgttgagtgaagtcgtgggtgtgggtgagttcatctggtggttctgtttcaggggctgtgagtggggcattcgtcagtgtttgtggtggggagttggagggtgtctgggagaagggatggctacatgcagcatctcaccatgctgcactgcgtggcacttagaagaacagaaagcgcaactttataatagtgccgagagaagattgtgagaacctgaaaaatacagaaaaacaataccacatgtgcagcctgtccacaaagctgtatattttgtgagaatgcc

SEQ ID NO: 36587 - DNA, 1513 bp, Artificial sequence
  DNA replication origin
aatcctgcccgtgcccccttctttgcatttgtatcccctcccccaagtccgctccgatccaatccggagactcgactctgccccccgtactccagactaaatccgttcctcggctcagctaagcagctctgcacgtcccttcccacttgctcagccaatcgctgggctcggccccgcccctttgggcttggtccttctcacgccaccaatccgcgcctcttgtcccgccccctgcccgcgagtccgccaatcccgcccttcggaaagcgtcgcctggtatccagctgccggagcgggtcgcgccggaggggggcggaggcggaagtggcggtgccgggcccggggagtaggaaggagccggggctgtagccggagtggagcggctgccagccgaggagcaggcgcggccgcggcgccatattgcggccctcagcggccgcgaccgagtcatggctgagacctacggtgagggtggtggacgaagctggggtcctgggtctgggcccagggaggatgcggcctgtgggaatgggcggggctttgtagatcagggggcggggtctggtgtgatggaggcaggacctaagtggatgctgggaggggtttagtgggtctgaggctgagcttaatcgatttaggtggagcctgagggtctggtgcgtgggttaaatagatctggggcgggatttgagggagctggtcctgaggggttcagggaggccctgagggaagaggtgggccttaatggatctgggcggagcctgagtgaaggggcggggctgactgcatgaatggcaggagtcgggcttatgggctagagggaacactgaatggaagctcgggaccctggggctgatctggctggagagagctctggaatgggtttggggatgggctgtccttgagttaggggcaggacttagtggcaaagggtgggacttatgcatgagaatggagccgggttctgggcagagggagggaaggagaggtcgggaagtggaaaatcagtagggatgcaccataggaggtggtgattggaggcaggggaagtgcaggtttaggagtcagagggagccgcattcactcaacaaatatagaagagaagggagaagagtgcaaagaccctgaggtgagaaccagcttgtcattttcagggaatagactgaaggtcaggagctatagtggagtgaatgagtcagagggtggtaggaggtgaagaggaacaagggctatatcgtagtccttgtttaaatagctttcaagagactttagcgacaaaatagctaagatctgggactctggagcccttggcctaggtttgaatctcacttctgcccagctgtgtcactttgggcaagtcagttaacctttctggcctgttacctcatccggaaaatgggaataatttttagtctacctccctcatagagttttcctgaggatgatgtgagctgttgatgtgagtaaagacctttagaactgttcctggcccacaacaacacacaattgaccc

SEQ ID NO: 36588 - DNA, 2299 bp, Artificial sequence
  DNA replication origin
tgtgatgattaagggagattgtggaaagtccttagcacccgccacagagtgggtgctagattaatgttggccgctaaggtttcgcctaccgtcaggaggccgcacagggtattggttttttaaattaattattttatttattttttcctcctaccgcaccttcctgggtattggtttaatgtagagattgcaaccctagatggccctaggtgaaaggcacttttttttttttttttctgagacggagtcttgttctgttgcccaggctggagtatagtggcgcaatctcggctcactgcaacttctgcctcagcctcccgagtagctgggactacaggtgtgcgccacaacgcctggctaatttttatatttttagtagagacggggtttcaccatattggccaggctgatctcgaactcctgaccttgtgatccgactgcctcggcctcccaaagtactgggattacaggcgtgagacactgcgcccggtgaaaggcacatttttgaatacaggagatgggatggggtagatccttgagtaacaggtactggtgttaaggggagtgcagcatactgacaacccacaccaaaaggtttgcaagggccaaccacaatggctcacacctgtaatcccagcattttgggaggccaaggtaggagcatcacttgagatcaggagttttagaccagcctgtgtaacagagtgagaccctgcctctacaaaaaaaaaaaaaaaaaaaaagcctgggtgtggtggtatgtgcctgtggtctggggtactcaggaggttgaggcaggaggatcacttgtgcccagaagttcgaggctgcagtgatctgcaatcacaccactgcactccagcctgggggacagagagagactttgtctcaaagaaaaaaacaaaaaaggtttgcaagtataaactcatttgaaaacattgtgttggccaaaccacccacatctggtggcttgagatctgcctgtgttcccctgttttgcaacctccaggtttaaaggaggttttgccatcagagaggtgtgggtgtgaattcagctctgattttctgactgtggggccttgtcatgctgctgatgggtagactctggttggcctgttcctgtcctagatggtgctagagacacagtgttggagacagccctaggcccaaccttcatggagctcacagttcagtgggtgagggtggaaggacagacccacttccagacagtgacacctcaggaaggtcagggcttgatggtgaagcaccgggagacaggggtcagagccagcaggggagagccccagagggtcagggccagtactgggggggcaggcagagggatcggggtgggatggagaacacaggcagaggggtcagggctgggatagggcaggcagaggcagaggggtcagttgggatgaggggacacaggcagaggagttacatgggatggggggcaagggcagaggggttggggtgggatggggggcccaggtagaggggtcaaggccaagtttgggaggcacaggcagagcggttgcatgggatgggggagcatgggcagagggctcaggggtggaatggggcaggcctaggcagaagggtcaggggtggaatggggcaggtccaggcagaagggtcaggaaaggaatggggcaggcccaggcagaagggtcaggggtgggatggggacccaggcagagggttggggccaggatgaggaagcacaagcagtggggtcagggccaggatagggggccacaagaagctgtgggagccctaagtcggtacctgactcagcccaggaagtcagggaggacttcttggaggaggagctgtgtgagctgagctctgaaggaagagctgggtgggcatatcgggaagcggacattagtggcagggaaatggcatgcgcagaggcctgaggtgagggtaaggggggatggaacattggaggaacaggatgagagtcagcaggtgagagctcagtggagggtggggactaactggggccctgacctcagagtgtgtgcccctgcagagctgatgttcctggagaccagcgctctcacaggcgagaacgtggaggaggcgttcctcaagtgtgcccgcactatcctcaacaagattgactcaggtgaggccccgaccggcccgagtgggagcgaagggcaggcccgggggtctccaggcaaccaatgctgacctctccccttccccacaggcgagctagacccggagaggatgggctctggcattcagtacggggatgcgtccctccgccagcttcggcagc

SEQ ID NO: 36589 - DNA, 922 bp, Artificial sequence
  DNA replication origin
tgggtgggcatatcgggaagcggacattagtggcagggaaatggcatgcgcagaggcctgaggtgagggtaaggggggatggaacattggaggaacaggatgagagtcagcaggtgagagctcagtggagggtggggactaactggggccctgacctcagagtgtgtgcccctgcagagctgatgttcctggagaccagcgctctcacaggcgagaacgtggaggaggcgttcctcaagtgtgcccgcactatcctcaacaagattgactcaggtgaggccccgaccggcccgagtgggagcgaagggcaggcccgggggtctccaggcaaccaatgctgacctctccccttccccacaggcgagctagacccggagaggatgggctctggcattcagtacggggatgcgtccctccgccagcttcggcagcctcggagtgcccaggccgtggcccctcagccgtgtggctgctgagctctgtggagccaggtgggacactgggggctttagggaggcagggcggcctcttgggcatgggggagatggtgtggagatagacactgaacatgtgatgacaagagaaacagagtgagagaaagatgcaaaaacacacaagctaaaggaggcatctggctgggcgcagtggctcacgcctgtaatcttagcactttgggagtccgaggcgggcggaggcagttcattgggtgggggtggggagacagacccacttccagacagtgacagctcagaaaggtcagggccaggcctggctcggtggcttatgcctgtaatccctgtactttggaaggccgaggcgggcggatgacctgaggtcaggagttcgagaccagcctggccaacatggtgaagccccctctctactaaacatacaaaaattagctgggcgtggtggcaggtgc

SEQ ID NO: 36590 - DNA, 965 bp, Artificial sequence
  DNA replication origin
tctgcagcggccgcagctcaccaccatcctgcccgccaaaaccgtcccgaagagggctggcagtggtagaggtggctgtggctctgggggtcccactccctgccgaggcctcactaggcactcctggacagtggtaggaggggagcaggggacagggcaggtaactctccactcccatcctggcccggccaggctcaggctccaagggctctgacgaagaccctggtaactgagggagagcctgacttaggggctgcggctggcacgggctgtccatggcagcagtgtcttcatcccccgggcatggagggcaccgcccgggcccatggtgccaccctcctccgcctcctcctccgcctccacttgatgcagctgggggccaccgggcctggcgtggggcagggtgaggcagggcagacagcaagagctcttctcgtgccctgggggttgcttgctggtccccaagtcctctgcggtccctaagggcttgggaagggacccttcagggtggctagagaaaggaaaaaaaaaaagggatgtgagagaaactagagacaggcaggcaggggaaagccgggatggtatgggcaggagtggggaagacgaccaggacagacttgactatagaggccccccaaaacctgaggccaagtcggggagaggaccctgagaatctggaggtgcgggagtccgctgacagataagaggcagtgatagggagaggctggaggccaggggctgggtagatgaccctaagacagaggactgtggtgcaggttgtgggacgcggtaaccaaagacagaagaaggagggctggagtagaaaagggtggtgtggaggagtgggaaaggagggggtttggaaaataggagggacctgcctcggcgttccagaaagacaacgagaaacgtgggggttccagggagagtcagggtgggggcgggggggtcaaaagacagaggaa

SEQ ID NO: 36591 - DNA, 937 bp, Artificial sequence
  DNA replication origin
aaagttgctaagtaagacaggctgaggcagacacacaaaaaaagccagggggagccagggcacagctccactagggctgggggcggggtggagacgtcgggttggggaatccacggaatgagcagcccggagacgcccactcctcccacatcgggtctccgccccgctccacccctaagaccccttggaaatcaaatagaggtgaaggggtgcaggcgtggagaattgcaggcatgtcgcgggtatcgctgcgctgctgttgtggcttctggtgctggcgccggcgtggtgggggtagggtgggtgccgcgctcagatgcgggggtccctacctccccggcccaggccgctcccattgctggggaacttgcagctgcagtccggaggcctggaccgcgcactccattcccgacaggaatgggggaacggaattctggattcgtgaaggtggggctggggactagaactcctcctgaatgaagacagctgagggtttgtactctatgatcctgaggaaggacaggaaggatgagtgctccggactgctgagtactaggaaaggagaatagggagtggagagcctggggccgggacactgggtcgtaacgaaggagcccagagcaggaaatcaggttgtgggaagaggggagcagggggtctgttctggttcagggtgggcaggctgagtactgagggcccaggagacgactctgagggtgcaggaggctgggaagctggacttccaggtcctaagggaagaaggaagtgggggcctggactcctggatctcagggaggaaggagctggggatttgaattcctgggcctgaggaatgagggtctgagacgaggactcctgggtctgaaggaagagggagctgggggcaatggctccgatgaggaaccctatgggcacccgctgagcaccggctacccgt

SEQ ID NO: 36592 - DNA, 1224 bp, Artificial sequence
  DNA replication origin
acagaaaacagacacaaacagaggcagagactgagagaaaagagagagagatgggaagagacagaaagaggagagagagagatgaacacagaaacacagagactgagagtgagggaggctgggcgcgctggttcacaactatactcccagcagtttgggagaccaaggcagaaagattgcttgagcccaggagttggagaccagcctgggcaacacagtgacatcctgtctccttaaaaaatacaaaaattggccggacgtggtggtgtgtacctatggtcccagctacttgggaggccaaggtgggaggcttgtttgatcccaggaggttgaggctgcagtgagccatgatcgtaccactgcactccagcctgggggacagaagccaggctctgtctcaaaaaaaaaaaagaaaaaaggaagggagggagggagggagggagggagggagggagggagggagggacggacagagggagggagggagggagcaagcaagactgagagatgaaacaaagatacacagagaccctcccagagacaatgccagtcctaggctctgcacagtccaccccccgcccaccatctccccaggtctgggccctgtgccaggcacttggaggaaggctggatttggccaagcagggacaggcaggagggtggaccacattcctgaacagtctgttccaaatacagccccaacctcactgctcccaccaccgcagccctggcccatccaggccagagtctgccccctctagcccatgccctaggatgggggttgggggggatagatgagagaatgagggataagtttgtctgtcgtcatggcctggcctcagacagggacttgggggactggataccagggggttcagcagcatgggcacagaacatttgggggcatctgggagccagtgccttggggatagagatggtagattcagggcaggacataatatggaggtacaaggggatcaacatgcagaaaggcaccctgaagaactaaggagaggcacagaagtgccagactgatggacacccagaagccagggaaattgaaggcagatctggggaacaagcatagtacacagggtcctaagagtaatggaagtgacaagggctcaggtgtgagctcctaggaatcacaggcacagagcacaggaatgccaggggtgtctttagaagtgtatttgagccaggcgcagtggcctgtagtctcaa

SEQ ID NO: 36593 - DNA, 870 bp, Artificial sequence
  DNA replication origin
gtgagctgtgatggtgccactgcactccagcctgggcgacagaacaagacagacagaagggaagggaagagaagaagaaagggaaaagaggggaggggagggaagaaagaggctgggcatggtggcttatgcctgtgatcctagcactttaggaggctgaggcaggaggactgcttgagaccaagagttgaagaccaacctggccaacctaacaagaccctgtctctataaaaaaaaaaaaaaaaacaaagagaagtagcgaggaagaaaaattgggcattcattcaacaaacatttactaagtgcctactgctgtgctgggcactactttaagtgctgggatacagaagcgaacaagacaaaatccctgctctagaagagctgacattccagaggacagcccacccgagcaaaacggaggaagagtcaggagctggggagaaaccagaagccataataaacaggatccattaaagcctgtcacagagggtggggtagggctgggggaggatgcagcttactgtgccccaccacactcccgctgtcagtggagtcagcagctctgagcaggggtcctgccccacaacccctgtcagtcaccaggttccagaaaggctgacaggtaggaagacccaggataggggaggacagaatatggaggtacaagggggtaaacatgcggaaaggcacgctgaagaaataaggagaggcacagaagtgccaggctgagacaaagggaagcacagactaggggagatacagggaggggaagacacagacatactgaaaagagagacagaaaacagacacaaacagaggcagagactgagagaaaagagagagagatgggaagagacagaaagaggagag

SEQ ID NO: 36594 - DNA, 911 bp, Artificial sequence
  DNA replication origin
tgggattacaggtgtgagtaactgcccctggctgttaaattattatcattattttttttgagacagagtctcgctttgttgccgaggctggagtacaatggtgcaatctcggctcgccgcaacctccggctcccgggttcaagtgattttcctgtttctcctcaggagtagctgggactatgggcgcccaccaccacacccggctaatttttgtattttaagcagagacagggtttcaccatattggtcaggctggtctcgaactcctgacctcaggcgatccacccacctcagcctcccaaagtgctgggattacaggtgtgagtcaccatgcccagtcccaagttaaattattaatcaacctccccaccttgcttcacgaggattttagtcactacttgcctataggagcagagttgagaggaggaatgaatgtctctgtgcatccaaagctgagaatgggtggaaggaaggagtgagcggatttggcaagtggaattaggatgaggaatgtaggtagaaattgggccagaaagactctgattcctgccctcaccagctgagaagggcatgaaggctggactcttcttgaaggactgattggcatccaaaaaatgctcggggttgaactcctggggcgtcaggaactggctggggtcgtagtggacggtgttaaggagggtgatgacatcggtgccctgtgtgggtgaggaggtggacttagcagtgtaggagggctgggaggctcccaaactcctttccattgtattgggctgggtgtcctggggacttgataaggggtgggtataggtgggtataggactcaatcgggggccaaggaaatatgtgtgggtgtctagggttccaagtgatgggtgctatatgctgtattattggggactttggcaggg

SEQ ID NO: 36595 - DNA, 668 bp, Artificial sequence
  DNA replication origin
gtctctgtgccttatttcttttctcagtctcttgtcccacctgatgagaaatacccacaggtgtgaaggggctggcccccttcagagaccagcctgggcaacatggtgaaactccatctctaaaacaaaatagaaaaattagctgggcatggtggcgcacacctatggtcccagctactcaggaggctgaggcaggagaattgcttgaacctgggaggcggtggttgcagtgagccgggattgggccactgcactccagcctgggtgacagagcgagactccatctcaaaaaaaaaaaaaaggaaaaaaaaaaaagagttagccagggcctgggaggaagtgggtcagtgagggcgaaaggttggcttgtgcaagggcctgggcgttgggttgtgtgggtggggcttcagggagggaggcctggaatccaggacctgatgggatttcaggagcagtttcgggaccctacttgctggacggtggatcgagtgggtggactgtgtgggagggctggagatcagaggcagagcaggggttatacccagaggtggagcttggggaggtggagtagcagacagagctccgtgtgtgggccaggctgtgtgggaaaggtagggttccctggcaagtgggtggctggggctctggggcagagttctgggaggact

SEQ ID NO: 36596 - DNA, 1121 bp, Artificial sequence
  DNA replication origin
gtaatcctagcactttgggaggccaaggtggtggatcacttgagctcaggaattcgaaaccggcctgggcgacatggtgaaaccctgtatctacaaaaaatacaaaaactagaccaggcgcggtggctcatgcctataatcttagcactttgggaagccaaggtgggcacatcacttgaggtcaggagttcgagaccagtctggacaacatggtgaatccccatctctactaaaaatacaaaaaaattagccgggtgtgatctcagctcattgggaggctgaggcaggagaatctcttgaacctgggaggcagacgttgcagtgaactgagatcgtgccaccgcactccagcatgggcgacggagcgagatttcatctcgaaaaaaggaaagaaagaaatgtgttgttcagtatttactatggtctgttcagctgttggacggccagatgctacgtgttgtgttgagatatttctgggtgagattgtagagttgtcaggcactgcatgtgattttgcattgtgtcatctgctggctgccaacgttgttgcgttgctgcatagtgtgtcctttgttctgctgccttgactgtatgtgttgtgatgccacatcgtgtgttctgtgctgtctgctgggttgctgtgtactagcgtgtgttgtgtggcaggattatgtagcggtatgctggcattacgtgttggtgtgtggttaccgtgtcttgggatgtttccgggctggctattaggtcactgcgtgtcgtgtgttggcatgtactgtgatcgtatttgctgggtgttctgttgccctgtgttgttgtgttccgtgatgcctgatgattgccttgtgctatgtcgcgtgctgtgtgtgtgttgccaacctgttctgtggttgggcgttgttgctgtcgatgtgctgcaggaagctgtgggttcggtgctgtctgtggcattgacagatgcttttggggtgttgttaagcagcatgttgtgaccatgtgcccgtgtttgcaccgtaagacacgttgccatggttgagtcggatgttgtgcaaattaatggtgttgctgcatgaggtctggtgtgctgcacatcgcgtcttcctgacccattccattcttcaccc

SEQ ID NO: 36597 - DNA, 1136 bp, Artificial sequence
  DNA replication origin
atagatggggtgatccatgccaggtgtagcaatgggaggtttagatgtcctttcctgccaggtacacttgcaaatatgactgctgtgccgtcatctcctttttagggatctgaggaatctgctgtgtgaccctagagaaatacatctacggggaaagatgtttcctttcattttacctgggcgcaggtactgggtgcttggtagttaaggaagtatcagctgctggctcaagggtagattctaacaggaacttccaagctggagaaataccaggctacaccgcagagaggggaggagggtgagggaggcccctgctggtgtgagccgtggcctggcagcaaacagtggtctcttaccgatggaaaagggcacaaaagcatcactcttcttaaactgccccttctcattcaggaagtgctggggattgaagtcctgggggttggagaagaaactggggtctctcagcacagagcccagcatagggtacacttcggtgccctggtagggaggaggaagttgtgtgtgatgaggagggtcgggggattggtgaaagtacacaggggctggagggggaactagtgtgccccaggtaaggggaagtggcaggcatggaggagttggggtcctctgatggaggagctttgggggatagaaggttcacatctctgaaacaggaagtttgggagacatggggtccatgtccttctaggcaggagtttgggggacctgagatttctgtccctatgacaaaaggccgaatggaaagggggcttctgtttcttaagataggaagtttgggaacatgtgtttgattctcctgacacaaagagtctggagagatgcaggactcaggagtgtctaagtggaaaggtggaacggatgtggtggttggggaagtcttttttgactgattgagggagtgggacagggtctagaaagcttctaatgtgggtgggatgctggggacacagagaggggctggaagtccccgtagtctggggggtgggggcggatagcaccttagggaggaagaaatcccgaaacttggtgtcctttttgactctgcgggccaaactcatggggatcacgtctccaaatctttggatctcgtggatcactgcctccatgtagggcat

SEQ ID NO: 36598 - DNA, 1760 bp, Artificial sequence
  DNA replication origin
ggctcacttactttttaaacaattaattaattttttttgacacagggcctcattctgtcacccagactggagtgcaatgccgtgatcttggctcattgcaacctctgccccccttcgcgccaccatgcccaactaatttttggatttttagtagagacggggtttgaccatgttggccaggctggtctcgaactcctgacctcaggtgatccacctgcctcggcctcccaaagtgctgggattacaggctgttagccacggcacccagccaattgtgaggattattatgatgagggttaatttgaatgggcctgtgtcatctgcctgccccactcccagactgatttccctctgcctggctttgcatctccccgcagtggctgctggggtgtacctcctgcatgcggatgagaaaggagtcaatgaagtcccgtggggaattgggatccagcgtgcgctggttgtgctccaccttcttggctatgaagtcctccagcccttgcagcaactgaaaggcctgttgctgtggtcctggcaggtgtttcatcaccgaagagaacatctcatagagctggggttgcagagagaggatgggaagggaaggacagctgtcacggggcaggagctgatgggaatgggatttgtttcatagcaaggaaggaactgagttaaaggcatctgtctcgttgtttaggtatttcagtggggccggataggaacttatatctaagttttcaggaaggttaggtaccagggccacggtctagtaatttaggtgagaagaactgagacatatatccaggtttcaggtatttaaacgaggctggattggagcacacatctaggtgttcagatattcaagtgaagttgagttggaagacacctgtccaggtgtttagctcttcaggtggggctggtatgaggtgagtgtcacctgtctaggtatttaggcattcaagtaggcttggttggagacagctgtccagatacttactgggtctggattgggggcttttgttcaggtgctcaggtattaaagtggggctggtgaagatgttgaagtggaggggatacctgttgaggtgtttacctatccaagtgggatgcactgggagcacctctgtaaggtgtgtgattggaaagggttggggaacacttatttgtgtgtcagggaacaatctgtctagatatttatgtgtttaaggtgttggttagggcagctgtccatgttttcaggtatttaagtgggtgaagtagagggcgcttggccagatattccagtgggctaatctgggacatttgtgtagatgtgaaatgattatgatgggctggattttgcagcaccaggtgttcaggtatgcaggaggccggttgacgcagtcacttgtccaggtgttaaaatattcagaagaactgggtagggagcatctgttagaaattacggtaagttggggatgggaacacgtgcccaggtgagagagctgagctgagggtatgcatcctgccagcaggctctgttttggggagcatctgttgagctatccaggtgtccttggagacagggtattggacatccatcctgggttctggtgcaactgtccagttgtccaatatcggggactgattttgaggggacactgtctggagggcggtgggagtttggggcacctgtctccaggtaggggagcagttggcaggttgtggtaggggcgtcacgggccgggctgcagccagttacctgccccgtggaggttgacgtg

SEQ ID NO: 36599 - DNA, 1154 bp, Artificial sequence
  DNA replication origin
tgcgctcctcgatgcctcgcttgcccaccccgaagtcccgcagggtggcgatggagaagcgccggagctgcttggcgcgctccccgttgctgaataccacgcctggggaggtgaacgcgggaatggagacaggccagggggcggcaggggcaggagcggagcagctccaaggggctccccaagggtggaggagagagggagtagggtgggagagagatggattcagcgccattgcccagcagagctgcaaactcagtcagagaaacacgatgtcgaggtagagagagagagagagagagagagagagagagagagaagagagagaggagagagagagagagagagagagaagagagagaggagagagagagagaagagagagaggagagagagagagagagagagagagagagagagagagagagagaccaggtttaaagaataagacaatcagaaaagaaacagaaaggccagacagagagatgcacatagaaacagagggataaggggacactccatggaggaagggaaggaagtggggagagaaagagagtgatggaggaagaggatggagggaggggaagtgagatatggggagatctgggaggaggaaataaaaatggtgaaagattcttaagctgagctggagaagagagaaaaatattgagatagaaacagagagggtctggaaggaagagagactgttaccaggagatggaggctgaagatgtggaagtaggaataccctgaaatcctaagacagaggaagaagtgagaaagggatgcggagagatgagaaacacagagaagcccagaagctaagagggacaaaaagacaaatgaagacagagaaccagggctggaaaacagaaacccaggatgtccttagagatggagagagaggggaaagaggagactccagtgagagagaataaggaggtggggcagagagaggcagggaggaatcaggacagggacgctggagacaggtgagggatacacatggagaggccacaatgaagggagatggggagggaagaccagactggggactctgccttagcctccagttggcaggagagtcagggagaaggctgggaacactgagaccttcgtgtccacctggccaccttccccctcttgggcaccccctc

SEQ ID NO: 36600 - DNA, 2013 bp, Artificial sequence
  DNA replication origin
attaattttttttgagacagggtctcattctgtcacccaggctggagtgcagtgccgtgatcttggctcattgcaacctctgccccccttcgcgccaccacgtgcagctaatttttggatttttagtagagacagggtttgaccatgttggccaggctggtcttgaactcctgacctcaggtgatccacctgcctcggcctcccaaagtgctgggattacaggctgttagccacggcgcccagccaattgtgaggattattatgatgagggctaatttgaacgggtctgtgtcgtctgcccgccccactcccagtctgatttccctctgcctggctttgcacctccccgcactggctgctggggtgtacctcctgcatgtggatgagaaaggagtcgatgaagtcctgtggggaattgggatccagcgtgcgctggttgtgctccaccttcttggctatgaagtcctccagcccttgcagcaacttaaaggcctgttgctgtggtcctggcaggtgtttcatcaccgaagagaacatctcatagagctggggttgcagagagaggatgggaagggaaggacagctgtcacggggcaggagctgatgggaatgggatttgtttcatagcaaggaaggaactgagttaaaggcatctgtctcattgtttaggtatttcagtggggtcggataggaacttatatctaagttttcaggaaggttaggtaccagggccacggtctagtaatttaggtgagaagaactgaggcatatatccaggtttcaggtatgcaaatgaggctggattggagcacacatctaggtgttcagatattcaagtgaagttgagttggaagacacctgtccaggtgtttagctcttcaggtggggctggtatgaggtgagtgtcacctgtctaggtatttaggcattcaagtaggcttggttggagacagctgtccagatacttactgggtctggattgggggcttttgttcaggtgttcaggtattaaagtggggctggtgaagatgttgaagtgcaggggatacctgttgaggtgtttacctatccaagtgcgatgcacagggagcacctctgtaaggtgtgtgattggaaagggttggggaacacttatttgtgtgtcagggaacaatctgtctagatatttgtgtgtttaaggtgttggttagggcagctgtccatgttttcaggcatttaagtgggtgaagtagagggcgcttggccagatattccagtgggctaatctgggacatttgtgtagatgtgaaatgattatgatgggctggattttgcagcaccaggtgttcaggcatgcaggaggcgggttgacgcagtcatttgtccaggtgttaaaatattcagaagaactgggtagggagcatctgttagaaattacggtaagttggggatgggaacacgtgcccaggtgagagagctgagctgagggtatgtatcctaccagcaggctctgttttggggagcatctgttgagctatccaggtgtccttggagacaggcttctggtgcaactgtccagttgtccaatatcgggggctgattttgaggggacactgtctggagcggggtgggagtttggggcacctgtctccaggtaggggagcagttggcaggttgtggtaggggcgtcacgggccgggctgcagccagttacctgccccgtggaggttgacgtgaactggaagattcctagcatcatgctcagcagtgacaggaactctttgtcctcatagtcaaagcggtccccaaagacaatggagctgatgacattggagactgtgcggctcaggaagaaggtgggatcgatattggcgcctgcgggtgtggagggagaagggggttggggagagagtcaactcagaggtctgaggagaatcagaattccaggaggcagggccttgttgagccaaattcccagcgccagactccagggctggaagtgcgggcgcctttccccacctagtccccatccgc

SEQ ID NO: 36601 - DNA, 1238 bp, Artificial sequence
  DNA replication origin
ccccacctagtccccatccgcaggcagaacgcgcgcgggttcctcgtcctgggtgttttccttctcctgcccccgcactcggggaaccttactcaccgtgcgtgctccggatggcctcgatgaggaagcccgactcctcctggatgcgctcctcgatgcctcgcttgcccaccccgaagtccctcagggtggcgatggcaaagcgcaggagctgcttggcgcgctccccgttgctgaacgccacgcctggggaggtcaaggcgggggtggagagaggtcagggggcggcggtggcaggagcggaccagttccaaggggctccccaagggtggagcagaggggtagtggggtgggagagagatggattcagtgccagtgcccaggacaggtgcaaactcagtcagagaaacacgagggagagagagagagagagagagagagagagagagagagagagagagagagagagagagagagagaccgggtagaaagaataagagaatcagaagagaaacagaaaggccagatagagatgcgcagagaaacagagggataaggggatactccatggaggaagggtaggaagtggggagagaaagagagagatggaggaagaggatggagggaggggaagtgagatatggggagatctgggaggaggaaataaaaatggtgaaacattcttaagctgagctggagaagagagaaaaatactgagacagaaacagagagggtctggaaggaagagagactgttaccaggagatggaggctggagatgtggaagtaagaatagcatgaaatcctaagggagaggaaaaagtgagagagggaagtggagagaggagaaacatggagaagcacagaagctgagagcaacaaaaagacaaatgaagacagaggaccagggctggaaaacagaaacccaggatgtcctcagagatggagagagaggggaaagaggagactccagtgagagagaataaggaggtggggcagagagaggcagggaggaatcacgacagggacgctggagacaggtgagggatacacatggagaggccacagtgaagggagatggggagataagaccagaccgggggttctgccatagcctccagtgggcaggagagtcagggagaaggctggcaacactgagaccatcgtgtccgcctggccaccttccccatcttgggcaccccctcaccatagcctttgaagacccagtcgaaggtggct

SEQ ID NO: 36602 - DNA, 738 bp, Artificial sequence
  DNA replication origin
gtttgagctcttctctggcttcttgaaatactttcctggggcacacaggcaagtttacaaaaacctacaggaaatcaatgcttacattggccacagtgtggagaagcaccgtgaaaccctggaccccagcgcccccagggacctcatcgacacctacctgctccacatggaaaaagtggggtctgggagaggaaaaagggaagggaggggagggagggcaagatagagaggtgagaagagggagggaaaaggggtagggaaggggaagatggggagtgaagaacaaagattagggaggggagaatagtgaaaaggaggagagcagatgaggaaggaaagaaagatgaggtgaaaggaaggagaaaataggaggaactgagatggagagagagtggtggtgggaagtgggggagagagagagagggagagagaagactggctgaggaaggaatttggggcaagagacaaaaatacagcaacaggagaaaagactcacggaggtagaaagagactgggagacaaaaagagagaaacacatcaaaaagatgtggagagagatagaaacagagccaggcagagtaaaaagaggctgagagagatgagttagagatgtgcagctggacatgtagaggacagagaaaagcaaattgggccagataatgtcaaagaccttcaggcaaacggagggcagccagggagacaggcgtgtgcacagcaaggctacagcctctcctgacc

SEQ ID NO: 36603 - DNA, 1899 bp, Artificial sequence
  DNA replication origin
agctgagttgggagctccccaaagcctccactggcatcttgattccactgcttttcaccttttctggcagctgagggagagccctgaggcctgcctgtctcctttgggaagctccacctgactgcagcctgtctcccagcctgagcccctcaatccctctggttctgtacgattcattctctgaccttccctggggaagggaggcagtgatctgacctacccacccaattcagtagccatggagctgggggaggtgtctatgaggccaggttgatggataggtgagaagaaagaaagtattccttcctgatctcctcctcatccctcaccccaccctctggaataatgacaattacataatcacctccgccttactccttcccacaggcagagagccagaaggagaggtatgtgggcaaagagcatgggtaagaagagagaaagagacaaaggttccagggggacagaaagcaagagagagagagagcaccagggagagatgggggagacagagagagatggagagagagagagaagagagagaaagggagacaaaaacaccaaggagagatagacaggggaggagagagacagagagatggagagagagaaagagagattgagagcaccaaggagagatgcaggagagaaagagacagagagagatggagagagagagagaggaaagagagagacagatagaaaaagagacagatatcaccagggagagatgggagagagagagagagagaaagacagagacagagagggagagagagagaagacagacagagatggacagagagagaaagagagacaaggaaccccaaggagagatggagaggggaggagggagacagagagatggagagagagaaagagagattaagagcaccagtgagagatgggggggtgagagagatgaagagagagagagagacagacagagagcaccagggagagatggcaagagagagagacagagaaagagatgtagagagagagatggagagaaagagagacagatagcaccagggggagatgggagagaaagagagacagagaaagaaggacaaagagcaccaaggagagagggaggggaatggagagagacagagagactgagaaagagagagaccgagagcaccagggagacatggggtgttgagacagattaagagagagagagaagagagagagacagaaagacagaggacacaaagaagagatggagacagggagagatggggagaggaaagagagatggagagagagagagagcaccagggagagatggaaagaaagggagagacagaaagaaccagggagagacagagagagaaagaaagacaaagtgccagagagagagaagggggagaggaagggagggaaggaggggaaggagagggagggagggaagaaggtgggaagggatggagggaataactgggacccagtgaaacagggagaaggaatctgagaaagacacaggacactgctagagggagaagcagagagagatggaaagaggcacacacagagaaaggaagaggtggacagctagagagatgctcactccgaaaggtgtaaatgcagatacagacagacccagagccctggatagacttagacaagtgaaaaaaagagactcagaggagagagtcagagaagtacagagcgtcagaggcccagagctctttggctctgcctaatttattggtttacaagctctttgttcttagggcagatgggagggtgaggaagggatgaggaaaaggattaatcaatgaaggagaactcgtgagtcattcaataagatgaacagcagtggcgatttctgtgtatttccttgagcaaaggcgtgtctaaactacttaagatctttaacttatcagaact

SEQ ID NO: 36604 - DNA, 1265 bp, Artificial sequence
  DNA replication origin
cgcctcttcccggccgcccctactgggaagtgaggagcccctctgcccggccagccgccccgtccgggagggaggcggggggggggggtcggccagccgccctgtccgggagggaggtgggggggtcagccccccgcccggccggccgccccgtccgggaggtgaggggcgcctctgcccggccgcccctactgggaagtgaggactcctctgcccggccagccgccccgtccgggagggaggtggggggggtcagccccccgcccggccagccgccctatccaggaggtgaggggcgcctctgcccggccgcccctactgggaagtgaggagcccctctgcctggccagccgccccgtccgggagggtggtgggggggtcagccccccgcccggccagccgccccatccgggaggtgaggggcgcttctgcccggccgcccctactgggaagtgaggagcccctctgcccggccacgaccccgtctgggaggtgtgcccagcggctcattggggatgggccatgatgacaatggcggttttgtggaatagaaaggcgggaagggtggggaaaaaattgagaaatcggatggttgccgggtctgtgtggatagaagtagacatgggagacttttcattttgttctgtactaagaaaaattcttctgccttggaaaaaaaaaaaaaaaaaattataaaggggatatcaccaccaatcccacagaaacacaaactactatcggagaatactataaacacctctatgcaaataaactagaaaatctagaagaaatggataaattcctggacacatacaccctcccaagactaaaccaggaagaagtttactgaaacttatgtttactgaagcactattcacaatagcaaagacttggaaccaacccaaatgcccaccaatggtagactgggttaagaaaatgtggcacatatacaccatggaatactatgcagccataaaaaaggatgagttcatgtcctttgtagcgacatggatgaagctggaaaccatcgttctgagcaaactgtcacaaggacagaaaaccaaacaccacatgttgtcactcataagtgggaattgaacaatgagatcatttggacacaggacagggaacaacacacactggggcctgtcgtggggtgggggaatgagagagggatagtattaggagaaatacctaatgtaaatgatgtgttaatgggtggagcaaaccaacacaatgcatgtagatgtatctatcaaccctgc

SEQ ID NO: 36605 - DNA, 1353 bp, Artificial sequence
  DNA replication origin
gcggggggctgaccctcccacctccctcccggacggggcggctggcggggcagaggggctcctcacttcccagtaggggcggccgggcagaggcacccctcacctcccggacggggcggctggccaggcggggggctgatccccccacctccctcccggactgggcggctggccgggcggggggccgacccccccacctccctcccagacggggcggctggccgggaagaggggtcctcacttcccagtaggggcggccgggcagaggcacccctcacctcctggacggggcggccggccgggcggggggctgacccccccacctccctcctggacggggcgactggccgggcagaggggctcctcacttcccagtaggggcggccgggcagaggagcccctcacctcccggacggggcggctggccgggcagggggctgaccccccccccacctccctcccggacggggtggctgccgggcggagacgctcctcacttcccagacggggtggctgccggtcggagacgctcctcacttcccagacggggtggctgccggacggaggggctcctcacttctcagacggggcggttgccaggcagagggtttcctcacttctcagacggggcggccgggcagagacgctcctcacctcccagacagggttgcagcccagcagaggcgctcctcacatcccagacacggcggcagggcagaggtgctccccacatctcagacgatgggcggccgggcagagacgctcctcacttcctagatgggatggtggccgggaagaggcactcctcgcttcctagatgggatggcggccgggcagagacgctcctcactttccagactgggcagccaggcagagaggctcctcatatcccagacgatggggggccaggcagagacgctcctcacttcccagacagggtggcggccgggcagaggctgcaatctcggcactttgcggggccaaggcaggcggctgggaggtggaggttgtagtgagccgagatcacgccactgcactccagcctgggcaccattgagcactgagtgaacgagactccgtctgcaatcccggcacctcgggaggccgaggctggcggatcactcgcggttaggagctggagaccagcccagccaacacagcaaaaccccgtctccaccaaaaaaaaaaaaacaaaaaaaaaaaacgaaaaccagtcaggcgtggcgacgcgcgcctgcaatcgcaggcactcggcaggctgaggcaggagaatcaggcagggaggttgcagtgagccgagatggcagcagtaccgtccagctttggctcggcatcagagggagaccgtggagg

SEQ ID NO: 36606 - DNA, 999 bp, Artificial sequence
  DNA replication origin
tcagaggcagaggggagtggggaagtggggttcccatggagggattggggcccaggaggcgctctctccctgtgacctgctagctcagccctaggcaaacctcaccaccccttctttcttgcagctgtttgagctcttctctggcttcttgaaatactttcctggggcacacaggcaagtttacaaaaacctgcaggaaatcaatgcttacattggccacagtgtggagaagcaccgtgaaaccctggaccccagcgcccccaaggacctcatcgacacctacctgctccacatggaaaaagtggggtctgggagaggaaaaagggaagggaggggagggagggcaagatggagaggtgagaagagggagggaaaaggggtagggaaggggaagatggggagggaagaagaaagactagggaggggagaatagggaaagggaggagagaacatgaggaaggaaagaaagatgaggtgaaaggagggagaaaatagggaggaggaactgagacagggagagaggggaggtgggaagacagaatgaaagacagagggagagagagagaagactggctgaggaaggaattcggggcaagggacaaaaatacagcaacaagagaaaaaactcacagaggcagaaagagacggggacaaaaagagagaaacacatcaaagagatgtggagagagatagaaacagagttaggaagactaaagagaggctgagagagatgagttagagatacgcggttggatgtgtagaggacagagaaaagcaaactgggccagatagtgtcaaagacctttaggccaacggagggcagccagggagatgggcgtatacacagcaaggctacagcctcccctgaccctccccttccttccctactgtggacgcaggagaaatccaacgcacacagtgaattcagccaccagaacctcaacctcaacacgctctcgctcttctttgctggcactgagaccaccagcaccactctcc

SEQ ID NO: 36607 - DNA, 1237 bp, Artificial sequence
  DNA replication origin
actggttgtgctccactttcttggcaatgaagtcctccagcccttgcagctccttaaaggcctgttgctgtggtcctggcaggtgtttcatcaccgaagagaacatctcatagagctggggttgcagagagaggatgggaagggaaggaccgctgtcaggaggcaggaactgatgggaatgggacctgtgtcagagcaagaaaggcactgggttaaaggcacctacctgcccaggtgtttaggtatttcagtggggctggatgggaacatatatgtaagtcttcatgagggttaagtgagaaggctactgtccagaaatttaggtaacatggactgaggcacacatccaggtttcaatgaaggtggattggagcgcacagctaggtgttcagacattcaaggcaggatgtgttggaaaacacctgttcaactgtttagctactcagacggggctggtatgaggggagtgtcacctgtctaggtatgtaggcattcaggtgggcctggttgaagacaactaccgagatacttattgggtctggattgggggcttttgttcagatgttcaggtattaaagtggggctggtgaagatgttgaagaggaggggatacctgttgaggtgtttacctatccaagtgggatgcactgggggcacctctgtaaggtgtgtgattggaaagggttggggaacacttatttgggtgtctggggaataatctgtctagatatttatgtgtttagggtattggttagggcacctgtccatgttttcaggtatttaagtgggtgaagtagagggcgcttggccagatattccagtgggctaatctgggacatttgtgtagatgtgaaatgattatgatgggctggattttgcagcaccaggtgttcaggtatgcaggaggcgggttgaggcagtcacttgtccaggtgttaaaatattcagaagaactgggtagggagcatctgttagaaattatggtaagttggggatgggaacatgtgcccaggtgagagagctgagctgagggtatgcatcctgccttcaggctctgttttggggatcatctgttgagctatccaggtgtccttggagactgggtattgggcacccatcctgggttctggtgcaactttccggttgtccaatattgggggctgattttgaggggacactgtctggaggggggtgggagtttggggcacctgtccccatgtaggggagcagttggcag

SEQ ID NO: 36608 - DNA, 991 bp, Artificial sequence
  DNA replication origin
agcgcctgagcggcttggtgcgctcccaggtgcggcaggtcactcctgggagaggaacgcaggggtggggagaggtcaggccgtgggaacaggcacagaagcctcgcgcaggagaactgcaaactcagtcagagaaacacagagagaaacagagaccgaacaggaacaagaggatcagaaaagagacaggccagacagacagatgcacagcagaacagagggagacgggacactccatggagcatagggagggaaggagggagagaaaaagacagagatgggagaagatgatggaagggggggaagtgaggtatggggagatctgcgaggagaaaataaaaatggtgaaagagtcttttttgtttgtatgtttgtttatttgtttttgagacggattctcgctctgtcgcccaggctgaagtgcattgtcgccatcttggccgctcgctgcaacctccaccttccaggttcaagcgtaaaaatggtgaaagactcctaagctgagctggtgaagacagaaaactacggaaagagaaacagagacggtcgggaaggaggagagactgttatcaggagaggaggctggagatgtggaagtaggaataccgcgaaatcctaagacagaggaagaagaaggagaggtcagtggacagaggagaaactcagagaagcacagaagctgagaaggacaaaaagacaaatgaagacagagaaccagggttggaaaacagaaacccaggattgtcctcagagatggggaaagaggagactccagtgagagaggcagggagaaatctggacagggacagggacagggatgctggagacaggcaagagggagaggccgcaatgaagggagctggggagcgaaggccagacagggggctctgccgcagccttcagtgggcaggagagtcagggagaaggctggggacacggaggccatcgagtcggcctggccaccttccccctcttgggcaccccctcacca

SEQ ID NO: 36609 - DNA, 1190 bp, Artificial sequence
  DNA replication origin
ttccccacctagtccccatccccaggcagaaagcgcgggttcccgccctcgcactcggggtcccctactcaccgtgcgtgccccggagggcgtcgatgaggaagcccgcctcctcctggatgcgttcctcgatgccgcgcttgcccacgccaaaaccccttagggtggcgatggagaagcgccggagctgcttggcgcgctccccgttgctgaacgccacgcctggggaggtgaacgcgggggtggagagaggtcagggggcggcgggagcaggagcggaccagctccaaggggctccccaagggtggagcagagagggagtggggtgggagagagatggattcagcgcgagtgcccaggagagctgcaaactcagtcagagaaacacgagagcacgagagagagagagagagagagagagagagagagagagagagagagagagagagagagagagagagagaccgggtagaaagaataagagaatcagaagagaagcagaaaggccagacagacagatgcagagaaacagagggatacggggatactccatggaggaagggaaggaagtggggagagaaagagagagatggagggaggggaagtgagatatggggagatctgggaggaggaaataaaaatggtgaaagattcttaagctgaactggagaagagagaaaaatatggagacagaaacagagaggatcgggaaggaggacagacaattaccaggagttggaggctggagatgtggaagtaggaataccctgaaatcctaagacagaggaagaagtgggagagggaagcagagagaggagaaacacggagaagcacagaagccgagagcgacaaaaagacaaatgaagacagaggaccagggctggaaaacagaaacccaggatgtcctcagagatggagagagaggggaaagaggagactccagtgagagagaaggaggagacggggcagagagaggcagggaggaatcacgacagggacgctggagacaggtgagggacgcacagggagaggccacgatgaagggagatggggagagaagaccagacagggggctctgccatagcctccagtgggcaggagagtcagggagaaggctggggacacggagaccattgcatccacctggccaccttccccctcttgggcaccccctcaccatagcctttgaa

SEQ ID NO: 36610 - DNA, 983 bp, Artificial sequence
  DNA replication origin
cccccacccggccagccgccccgtccgggagggaggttggggggggtcagcccccctgcccggccagccaccccgtccgggaggtgaggggcgcctctgcccggccgcccctactgggaagtgaggagcccctctgcccggccagccgccccgtccgggagggaggtggggggggtcagccccccgcccagccagccgccccgtccgggagggaggtggggggggtcagcccccccgcccggccagccgccccgtccgggaggtgaggggcgcctctgcccggccgcccctactgggaagtgaggagcccctctgcccagccagccgccccgtccgggagggaggtgggggttcagccccccgcccggccagccgccccgtccgggagggaggtgggggggggtcagcccccctgcccggccagccgccccgtccgggaggtgaggggcgcctctgcccggccgcccctactgggaagtgaggaacccctctgcccggccaccgccccgtctgggaggtgtgcccagtagctcattgagaatgggccaggatgacaatggcggctttgtggaatagaaaggcgggaaaggtggggaaaagattgagagatcggatggttgccgtgtctgtgtggaatgaagtagacatgggagacttttcattttgttctgcactaagaaaaattcctctgccttgggatcctgttgatctgtgaccttacccccaaccctgtgctctctgaaacatgtgctgtgtccactcagggttaaatggattaagggcggtgcaagatgtgctttgttaaacagatgcttgaaggcagcatgctcgttaagagtcatcaccaatccctaatctcaagtaaccagggacacaaacactgcggaaggccgcagggtcctctgcctaggaaaaccagagacctttgttcacttgtttatctgctgaccttccctccactattgtcccatgaccctgccaaa

SEQ ID NO: 36611 - DNA, 1012 bp, Artificial sequence
  DNA replication origin
aggagggcagcttcctgctggcggagctgcggaaaactgaaggtcaggaattttttttaacaggctggatggcacgatcttttttttttttaacaggctggatggcagccttgacctcctgggcccaaaccatcctcccacctcaacctcccgaatagctggtacttcaggtgtgctccaccacacccagcttatttttaaattttttgtagagacagggtctcactatgttgcccaggccagtctcaaactcctgtgtgcaaatgatcctcttgcctctgcctcccagagtgctggaactataggcatacaccaccatgtctggccaggtctttgaatccagttcatccttataattcacatccattctacttttttttttttgagacagagtctcgctctgtcccccaggctggagtgcaatggtgtgatctcagctcattgcaacctccgcctcctgagttcaagcgattctgcttgctgactgctctgtcgcccaggctgggttgctgtgtactagcgtgtgttgtgtggcaggattatgtagctgtatgctggctttatgtgttggtgtgtggttaccgtgtcttgggatgtttccgggctggctgttaggtcactgcgtgtcgtgtgttggcatgtactgtgatcgtatttgctgggtgttctgttgccctgtgttgttgtgttccgtgatgcctgatgattgccttgtgctatgtcgcgtgctgtgtgttgtgttgccaagaatagcccgttctgtggttgggcgttgttgctgtcgatgtgctgcaggaagttgtgggttcggtgccgtctgtggcattgacagatgcttttggggtgtcgttaagcagcatgttgtgaccatgtccccgtgtttgcaccgtaagacacgttgccatggttgagtcggatgttgtacaaattaatggtgttgctgcatgaggtctggtgtgctgcacatcgcgtcttcctgatccattgcactccttaccctcaggcgagccct

SEQ ID NO: 36612 - DNA, 900 bp, Artificial sequence
  DNA replication origin
cgggctggagaggaagcgggaagcggggtcgagggtatcagcgggcgcgacagggcaaccaggctgataagaggtgtgtgcgtgtgtggggaggcgtctagtcaaagtctcccagcgcggggcgccactgctggggcgcacgtgagaattagctagagctggccgggcgcggtggctcacgcctgtaatcccagcacttgggaggcccaggcggacggatcgcttgagcccaggagtttgagaccatctgggcaacatggtgaaacccaatctccacaacaaaatagaaaaattagctgggcttggtggcgcacacctgtggtcccagctgcttgggaggctgaggcaggagaatcacttgaacccaggaggaggaggttgcagtgagctgggatcaggccactgcacttcagcctgggtgacagagcaagattccgtctcaaaaaaaaaaaaaaaaaaaaaaaaaaggggggggggaagaggaaaaaaaaaaaagaattagccagggtctgggaggaagtgggtcagtgagggcgaaagcttggcttgtgcaagggcctgagtgttgggttgtgtgggcagggcttcagggaggcctggaatccaggacctgatgggatttcaggagcagttttggggctctactggctggacggtaggtcgagtgggtggactgtgtgggagggctggagatcaggggcagagcaggggatacacccagagatggagcttggggaggtggagcagcagacagagctgtgtgtgtgggccaggctgcatgggagaggtagggttccctggcaggcacatggctggggctccagggcagggctctgaagccggaggtggacgcatgtggtggttgacgcactcggcacaaagcaagactaagcgggtgga

SEQ ID NO: 36613 - DNA, 1168 bp, Artificial sequence
  DNA replication origin
aaagaaagagagaaacagagaaatccagtctaattacaaagagatagaaacaccaaggcgggaggatcacttgagcccaggagtttgagaccagcctgggcaacataacgagacctggtctctataaatattttaaaaattagctaggcatggtggcacgcacctctagtcccagctacttgggaggctcaggtgggaggatcacttgagcccaggcagtcatggctgcagtgagctgtgatggtgccactgcactccagcctgggcaacagaacaagacagatggaagggaagggaagagaagagagaagaagaaagggaaaagaggggaggggagggaagaaagaggctgggcacggtggctcacgactgtgatcctagcactttaggaggctgaggcaggaggattgcttgagaccaagagttgaagaccaacctggccaacttaacaagaccccatctctataaaaaaacaaagagaggtagggaggaagaaaaattgggcattcattcaacaaacatttactaagtgcctactgctgtgctgagcgctattttaagtgctgggatacagaagcaaacaagacaaaatccttgctctggaagagctgacattccagaggacagcccacccgagcaaaatggaggaagagtcaggagctggggagaaaccagaggccataataaagaggatccattaaagcctgtcacagagggtggggtagggctgggggaggatgcagcttactgtgccccaccacactcccgctgtcagtggagtcagcagctctgagcaggggccctgccagacaacccatgtcagtcaccaggttccagaaaggctgacaggtaggaagacccaggacagggcaggacagaatatggaggtacaagggggtcaacatgcagaaaggcaccctgaagaaataaggagaggcacagaagtgccaggctgagacaaagggaagcacagactgggggagatacagggagaggaagacacagacatactgaaaagagagacagaaaacagacacaaacagaggcagagactgagagaaaggagagagagatgggaaaagatggaaagaggagagagagagagatgaacacagaaacatagagactgagcgtgagggaggctgggcacgctggttcatgcctatac

SEQ ID NO: 36614 - DNA, 992 bp, Artificial sequence
  DNA replication origin
caggagggtgcacctgttggccaggtgtgttgacatgaaaatgctggtgtacgaaagatgttaagtggggcaggctgaggcaggcacaaaaaaaaaagccaggaggagccagggcacagttccaccagggctgggggtgggctggagacgtcgggctggggaatccatggaatgagcagccctgagatgcccactcctcccacatcgggtctctgcccctgctccacccaagaccccttggaaatcaaatagaggtgcaggcgtggagaattgcaggcatgatgatcgcgggtatcgctgcgctgctgttgtggcttctggtgctggtgccggcgtggtgggggtagggtgggtgccgcgctcagatgcgggggtccctacctccccggcccaggctgctcccattgctggggaacttgcagctgcagtccggaggcctggaccgcgcgctccattcccgacaggaatgggggaacggaattctggattcgtggaggtggggctggggactagaactcctcctgaacgaagacagctgagggcttgtactctatgatcttgaggaaggacaggaaggatgagtgctccggactgctgagtactaggaaaggagaatagggagtggagagcctggggccgggacactgggtcgtaaggaaggagcccagagcaggaaatcaggttgtgggaagaggggagcagggggtctgttctcctggttcagggtggggaggtactgagggcccaggagacactctgagggtacaggaggttgggaatctggacttctaggtcccaagggaagaaggaagtgggggcctggactcccgcatctcagggaggaaggagctggggatctgaattcctggacctgaggaatgagggtctgagacgaggactcctgggtctgaaggaagagggagctgggggcaatggctccgatgaggaaccctatgggcacccgctgagcaccggctacccgtagctctccg

SEQ ID NO: 36615 - DNA, 1752 bp, Artificial sequence
  DNA replication origin
ctgggtcgtaaggaaggagcccagagcaggaaatcaggttgtgggaagaggggagcagggggtctgttctcctggttcagggtggggaggtactgagggcccaggagacactctgagggtacaggaggttgggaatctggacttctaggtcccaagggaagaaggaagtgggggcctggactcccgcatctcagggaggaaggagctggggatctgaattcctggacctgaggaatgagggtctgagacgaggactcctgggtctgaaggaagagggagctgggggcaatggctccgatgaggaaccctatgggcacccgctgagcaccggctacccgtagctctccggccgctggggccgggtgttcacagtgcggctgggcccgcgccctgcggtggtgctgtgcggctacgcagcgctgcgggacgcgttagtgctacaggcggatgcggtctccggccgcgggtccatggcagtcttcgaacgcttcacacgcggaaacagtgaggccccggcgctggacttgccggtccggacgctccaggctgggcgggtaaatggtagaggcgggcaaatgggggcggggcctaatagagactccagctaatgaggtgcaaacggccgagagagggcggggcggcgctaaagcgtaaggttagaatggaggttcatcctgcagccaacaggagaaaagagcctaagattcaaagtcccagagccagcctaggtcagggatggagcccagcaaaggcggggccaatgtgtggatagggcacttggaggtctggtaaggcagcaaaacgaacgaagccggccgcaggagtcggaggccccgaaagggatgtagccagtgacccggcgcttcctggatggggcgtggccggttcccgggcccgcctcctttcccgtccccaccacaggaatcttgttttctaaccggccgtgctggtggacactgcgcaattttgcacttggagcgccgaagaagttcgggttggatacgcggaccatcgaggcgcgtgtcctggatgaggcggcttgtctgctagacgaatttcaagccaccattgcttcggcctggccgggagagcggaagggcctggtgtgggagagtcccttgcactgccaagacggggccactggaaggtatttgggtggaagaaagccagtaagcccatggggctggctgggggcaggaccacgcgttatgaccaccgtcctgttcctacccccaggagccccgtttgaccccgtgcggctactgggtaatgctgtatccagtgttacctgttcttgtcttcgggaaccgctatggctacggggacccggagttcctgaggtcctgaacctcctaagtgacaacttccgcatcatgagttccaaatggggcgaggtgagagggccggccacaatctctcccttgtgcgtccagccttatgccaaatcccgagtacacagacgtacctacaatgggacagttagattcttggaagagttctagaacctccaatatcaaagtccctgtagggaaactaaggcctagtgggcatgtccagggcccttgttgagaccctgtctctccagatgtacatttgcctgtctctcatggactggctcccgggcccgcaccaccaaatcttccaaaacttttcagagctgcaggtcttcatctctgagcaaatccaacaacactggcacatgaggcagccggcggagccccgcgatttcatcgattgcttggccagatgggt

SEQ ID NO: 36616 - DNA, 1124 bp, Artificial sequence
  DNA replication origin
cccagacggggcggctggccgggcggggggctgacccccccacctccctcctggacagggcggctggccgggcagggggctgacccccccacctccctcccggacggggcggctggccgggtggggggctgactcccccacctccctcctggacggggtggctggccaggcagaggggctcctcacttcccagtaggggcggctgggcagaggcgcccctcacctcccggacggggcggctggccgggaggggggctgaccccccacctccctcccggacggggcggctggccgggcggggggctgacccccccacctccctcccggatggggcggctggccgggcggggggctgaccgcccccacctccctcccggacggggggctgacccccccacctccctcccggacggggcggctggccgggcggggggctgacccccccacctccctcccggccggggcggctgccgggcggagacgctcctcacttcccagactgggtggctgccgggcagagggactcctcacttctcagacggggcggctgccgggcggaggggctcctcacttctcagatggggcggatgctgggcggagggtctcctcacttctcagacggggcggccgggcagagacgctcctcacctcccagacggggcggcggggcagaggcgctccccacatctcagacgatgggcggccgggcagagacgctcctcacttcccagatgggatggctgccgggaagaggcgctcctcacttcctagatgggatggcggccggtcagagacgctcctcactttccagactgggcagccaggcagaggggctcctcacgtcccagacgatgggcggccaggcagagacgctcctcacttcccagacggggtggtggccgggcagaggctgcaatctcggcactttgggaggccaaggcaggcggctgggagatggaggttgtagcgagctgagatcacgccactgcactccagcctgggcaccattgagcgctgagtgaaccagactccgtctgcaatcccggcacctcgggaggccaaggctggcggatcactcgcggttaggagctggagaccggccccattttttttattcttaatag

SEQ ID NO: 36617 - DNA, 1098 bp, Artificial sequence
  DNA replication origin
tcagccccccgcccggccagccgccccgtctgggagggaggtggggtcagccccccgcccggccagccgccccgtccgggaggtgaggggcacctctgcccagccgcccctactgggaagtgaggagcccctctgcctggccagccaccccgtccaggagggaggtgggggagtcagccccccacccggccagccgccccgtccgggagggaggtggggggctcagccccccgcccggccagccgacccgtccgggagggaggtggggggatcagcaccccgcccggccagccgccccgtccgggagggaggtgggggggacagcccccgcccggccagccagcccgtccgggagggaggtgggggggtcagccccccgcccggccagccgccccgtccgggagggaggtgggggggtcagccccccgcccggccagacgccccgtccgggaggtgaggggcgcctctgcccggccgcccctactaggaagtgaggagcccctctcccagccaccacctcgtctgggaggtgtacccaacagctcattgagaacgggccgggatgacaatggcggttttgtggaatagaaaggggggaaaggtggggaaaagattgagaaatcggatggttgccgggtctgtgtagaaagaagtagacatgggagacttttcattttgttctgtactaagataaattcttctgccttgggatcctgttgatcggtgaccttacccccaaccctgtgctctctgaaacatgtgctgtgtccactcagggttaaatggattaagggcggtgcaagatgtgctttgttaaacagatgcttgaaggcagcatgctcgttaagagtcatcaccactccttaatctcaagtacccagggacacaaacactgcggaaggccgcagggtcctctgcctaggaaaaccagagacctttgttcacttgtttatctgccaaccttccctccactattgtcctatgaccctgccaaatccccctctgcgagaaacacccaagaatgatcaataaaaaaaaattaaaaaaaaaaaaaaaaaaaaaaagaataaaaaaaattagttgggcatggtggcaggc

SEQ ID NO: 36618 - DNA, 1038 bp, Artificial sequence
  DNA replication origin
ccgaaaagcccctcaccctggcactcgggtttctctcccaggaatcctcccacccctagccaggacgtccccagagccccttacccgcatgagccctgaatacagcgccccgggccgtagctgcaggaggtttcccagcagtggtagcggcgtgggcccggggggcaggtggcctcgggccctggtcccggacagcgccagcgtcagcagcaggagcagcgccagcgccagcagcagcgcccaggtgccggtcgcctccatctcggcaggtcggctccttctcctctcccaggcgctccgcgcggctgggctagttaggggcgggagccgggcgtctccctccccaacgaagtcaggcgcggggcggggcagctagcccagccccctgcctcctgggcaggcttatctccccgccgccgggtttctcccggaccaccgccgccgcctgatgtcgggaactcatgctccaacggatgtctccgaggtcacccaggtttacgcggggcttgggcggcggagacagcgccttgggcccccggatagggagtaagcaaacagaagaacctggaagtcagagactttggccgcctggaggttgccacaccccgcatctggcggtgaccccgcgccactctccccagctcctacctcgctcattgttcggatgtgggttcctgtgtgcgtgcgtgtatggggtgtctttgagtcaattttctccagcatcttacatcttcacgaactgagaggaaggacttgacctttaaggataaacaatctgaagtccagggagataaatcggttggccccaggtcaacttggctgagtggcagagttaatattttgacttgggccagttagaatgattgagtcattcattcattcgtttagaggcagtttgcagagcggttaggaccgtgatggctgaagccagactgcttgaattcacagcctaattcctctgtgcctctgttagccttgtaaaatggggctagttttcaggattaaatagtacatctgtgcacaccatttaaagcagac

SEQ ID NO: 36619 - DNA, 1957 bp, Artificial sequence
  DNA replication origin
ggggcccaaggcgctgtctccgccgcccaagccccgcgtaaacctgggtgacctcggagacatccgttggagcatgagttcccgacatcaggcggcggcggtggtccgggagaaacccggcggcggggagataagcctgcccaggaggcagggggctgggctagctgccccgccccgcgcctgacttcgttggggagggagacgcccggctcccgcccctaactagcccagccgcgcggagcgcctgggagaggagaaggagccgacctgccgagatggaggcgaccggcacctgggcgctgctgctggcgctggcgctgctcctgctgctgacgctggcgctgtccgggaccagggcccgaggccacctgccccccgggcccacgccgctaccactgctgggaaacctcctgcagctacggcccggggcgctgtattcagggctcatgcgggtaaggggctctggggacgtcctggctaggggtgggaggattcctgggagagaaacccgagtgccagggtgaggggcttttcgggtatcctagggaggaggcaggggcaggggtcccaaggcaaaggggctgctgctgtcctggggttgggggcaggagcaggttgtccagggctgagaaggggagaggtgcccgggagagaggatcgtggggtgggggaccagggctaggaggggcagagacctctgcctacagaatcctgggaaggtgatgggcagggaccgaggctgaaagagacaggagtcctccagccgaggagaagctgatgcagctgggcttgtcccagagggagaggtagctggagccatacaggtggggcatgctgaagagggcacaaagaagaaaagggggaggcgtccctgcggggagttggaggcagagaagaggctggagggttgcaggctcagagagggggtcccgctgaaggaatctgccagcagagaatgcaggatgggaggatgggtggagctcagttgggagttcctgggactggggaggaaggagagcaagaaagaaggcagaggcagccccagccttaggggatagcaggtgggagtgggcagaggcctgaagtttcccattcaaaaggattctgggtgacttcaaggacgtagaaaaaagggtggggtcttgggggagagatggggcggatactcagcagtgtctgctccagaatttcagggttttgtggtgactgaaaggggtggctggatatttggggggcagggagggccctaaggaattaagggagacccaaactgcttctggattgcccagcgtcagaggttagggttcagcaggaagcaagggaacgacaggaagttgggggatgccactgaaggatgtactgggggaggaggcccgggagcctagtgcaaaaagagaactgagcctcagctatttctgctgggatgggggcaggttcctggtagagggcgtagaagctagacccggtggctcctcaagtgacaggggccatgatggagacaccttggatcgaagaggtcacagcaccctcctctttcttcctccctacccccagctgagtaagaagtacggaccggtgttcaccatctacctgggaccctggcggcctgtggtggtcctggttgggcaggaggctgtgcgggaggccctgggaggtcaggctgaggagttcagcggccggggaaccgtagcgatgctggaagggacttttgatggccatggtaagtcaagggctgctaggccctccgctcacagcctgccaccacttactggtgtgtgacctttgcacatggcttagtccctctgttgcctcatctgtcaaatggagtgataacagtgcccatcagccgggtgcagtggctagtgcctgaaatcccaacactttgggaggcggaggtgggtggatcacttgaggtcaggagttcgagaccagcctggccaacatggtgaaaccctgt

SEQ ID NO: 36620 - DNA, 751 bp, Artificial sequence
  DNA replication origin
tgacaggggccatgatggagacaccttggatcgaagaggtcacagcaccctcctctttcttcctccctacccccagctgagtaagaagtacggaccggtgttcaccatctacctgggaccctggcggcctgtggtggtcctggttgggcaggaggctgtgcgggaggccctgggaggtcaggctgaggagttcagcggccggggaaccgtagcgatgctggaagggacttttgatggccatggtaagtcaagggctgctaggccctccgctcacagcctgccaccacttactggtgtgtgacctttgcacatggcttagtccctctgttgcctcatctgtcaaatggagtgataacagtgcccatcagccgggtgcagtggctagtgcctgaaatcccaacactttgggaggcggaggtgggtggatcacttgaggtcaggagttcgagaccagcctggccaacatggtgaaaccctgtctctactaaaaatataaaaattagctgggcatggtggtgcgtacctgtaatcccagatacttgggaggttgaggcaggagaatcgcttgaacccgggaggcagatgttgcagtgaaccaagactgtgccactgcactccagtctgggcaacagagtgagcctccatctcaaacaaacaaacaaaaagcagtgcccatcatgtaggattgagtgattgagtgaggactgagccttgtgcaaagtgagcactcactaatcaccaggttgtagta

SEQ ID NO: 36621 - DNA, 1052 bp, Artificial sequence
  DNA replication origin
ccggcatgtttggtgagggagcttcaggaagtcttcctggaagagaggctgtcggagctgagactcataagatgagtggggagggtgttccaggcagaaagaccagcacctacaaaagcatgactttgagagaagcattcatccattcaactgatgaattttcagactgggcacgctggctcatgcctgtaatcccagcactttggaaggctgaatggggaggatgacttgagcctaggcatttgtgacaagcctgggcaacatggtgagaccctgcctccacaaaacaaacaaacaaacaaaaaatcattatacctggtaccatgggtaccaggtacatagaaatgactcaggcagatatggtgtcctctcctactgtgggagaggcgggcttatactgcagtaagacaatagagggagggaatataatcctaaaatgagaggtacagatttgagagcaaacacagggcacaggcatatgtacgagggtaaagagggaatcagggaaggcttctcagagaaggtgacatttaagccgggacatgaaggatgaacgagttagttcaccaaggatgggatggaaaggggtgagagtgatggaggcagagggaactgcaggatcataggcctagacaggggatcctgacgcccttgaggaagtgagagaagaccagcgcagtcgtagtgggttaagtaacaaagctgagaagccagggaaatccctggtcatgcagggcctgtgagtcacgtcagagtgtttgggcttttgtttttcctgggagcagtcgattttaagcagggaacagctgtattcagagttgggaagatcctgtggttgctgcctgaaggggatgaaactggaggctaggagcccagggtgatagggaggatccagggtgatggggaggctgggaggtccgcggtgatggaccagggctggggccaggggatggggaggaaggagtaattgggagaggcctggggctctggccgaggaatggatggtgggctgaaacagggagaggagagatgcttaggccactttggaacac

SEQ ID NO: 36622 - DNA, 844 bp, Artificial sequence
  DNA replication origin
tggtttgagattgggaagaagccttctgactgttgagtgggagacaggttggaaggagcaacagaagccagcagcccatggccgggcacagtgacccacgcctgtaatcccagccctttgggaggccgaggcgggcagatcacgagttcaggagttccagaccagcctggccaacatggtgaaaccccgtctctaccaaaaatacaaaaattaacctggcatggtggtgcacacctgtaatcccagcaactcaggaagctgaggtgggaggatcacttgaacccaggagatggaggttgcagtgagccgagatcgagccattgcactccagcctgggcaacaaagcaagactgggtctcaaaaaaaaaaaaaaaaaaaaagacacagcccagggagacaacggtgaagggccctaagtggccagtgacaaggagctgggagcttgccctgagggcagcaggaggccatgggcaagcagagaagggacagggtaggatttgactttcagaaacagtcctctggttgctaaatgggagaaaggagtgacagtagaggcaggagaaggcaggatcagacgggggtgctgggaaggggcaggtagaagagacatcaggaggccaaacagataggactttatgatgcaccgtaggtataccagtacccaaacacaggtggccaagagcagagggatagacgcccagcctcctcctcacagacatccaggcatgcagagccctccacgtgccaaacacacagggccgaggaatggaagtgcagcagagccgatacgcaggcagcagatctgcaataaccaggacacacagtcccaccagaaggagagagc

SEQ ID NO: 36623 - DNA, 992 bp, Artificial sequence
  DNA replication origin
ccttgcctgcccaccggcggccaggaccccgccaggcccttaggccgacatagttgcagagtgacctcagagtggggtggagggcggaggctctgagaggaggacgggagccctcccaagggactgggatctagcgtccatcccgtcgggaaggaggctcgggatctggcagcctcccacgccctgcactgcctggcagggccagcccctgccccctccgtcctctcttaggtctctagagacttaacaggtcgcgctggtgctggtggatggaggggaagaatcaggggttgggggagagagataagggtggtggtggggggagataagggtggtggcggagggagaagccagagaaaggcaggggagatgagacagagaggagcacagatacaaggcaagacagaaaaaatgaagaaacagccctcaagagagaagaaaaggtgggggcggaggggggatacagtcacagagggaggctgagaagagagagagagactcagagagcagggagagataaaggcagagactgtgaaagagagagaaacagagacccacagagatagcagagctggaggcagagacagagagacaaagtgagagcctcctccccagagatggagtggactggtggggtagggacaagtggcgggtcaggggggtggtgttggcagggagaagcgttttcccccagggctccagagccctcctcatcccactgcctgactcggtgccccttcggaaagatttcttccttcctggcgaccctcagctcagcccctctccccatggcccccttctcaggtccagcccccacccctgccctcagcttctccttgtctgtctgtctctccgggtcctctcttctgtcccccctgcccttcagttcctctctcagtctttctctccctctgccgcacttggtgtctctgagtctgtgtctccctcccttgaagtcccttttctgtggtcccaaggaaactccctaagcc

SEQ ID NO: 36624 - DNA, 1063 bp, Artificial sequence
  DNA replication origin
caagactctgtctcaaaacgaaaaacaaaacaaaatgaaagacaggacagggaagttggagtgacagaaaccctctccttcttggggaccattcccttctgcaccatgcagacgaggaaggaccgagctcagggttatgcagtggtcaggggcatcactgggggaccctggattcagggggttctccctactgaaggaggaaagacagaggagcagatggcagaggctctgtaaaggaaggaggctgcagcctggagggcatcagcttcccgcactcccaacctgctgcctctctctgctggaatgaggaggggccttctgactgggggtctccagggtggagggaggagctcacattctcagcattcctgggaccctgagttgcaaggaagacctggtgagcatgctgaccccagaggagtgactcaggcccatggctcgagtggctgagtagggaccagggttggggatcgggcatgagtcagcctggcaggtcccatgagaaggggaggggagggagagaaatgggggctgcacaggtgtgaggatctgtgcatgtctgtgtggtggtggtggggtgtctggatatctgtgtgttctggatctgagtgttagtgtatccgtcagcacaacctctgtgtgagggtgtgccttggcgagggtggacttctgtggatgtcccatgtgtggtgtgtgtgtgtgtgtgtgtgactaaatatatttccttcagcttggattctgtcccaatatgtgtttggatctttatagcatgtctctctctctacgtttcttaggggttgcccgtgtgtgggtgtctgtgtgtgtgcgcatgatggagtgtaccagtgtcagcctgtgtctgtccctcttttttgtgtttgtgtgttcacagctgggactcactgtatgaaagtaaagtgtgcctggagggtagtgggtttggggctatggtgcacacctctctgtatggaggtggtagtgtcagcccacaggtgtgcagctatgggtgtgagagtgtcctagtgagagcttgtgttcccttgcagaatcagaacgtgtccat

SEQ ID NO: 36625 - DNA, 702 bp, Artificial sequence
  DNA replication origin
cctgaaggccccgcgcccgcagcccccgcgccgcccggaggagaaacagtacagtcccgggcgggcggcccgagtgggggcggggagcctgggtcgggtccagccacctggcacgtggggccccgccagggtcagcgcgcgggagctggcgccgccggccggagaagccctggggctggaggtgggttctggagccgggtcccgttccgaccgcagcattcctgcccccgcgtgagtcaccgggggcacctccccaccccagcgcttccggccggcttcgggggcgcggagccagagccgggatcccccttcccaggccccaacggccgcaccttgagtgaaggggacaggaggaactgggaccccttcccctccagaaggttcttgctttaccgcaagacgacaggagcaggccgattccagatgtgctttccagatgtcctgaccatccccccacaacccctgctctccgccccagcttttccagagaatgagagggatggaaggaggaggggcacgccctgagtcagatagagggacagacgcacacaaacggacgaaattccttcacacagcaaacccccccacacacacactcacaatgaatcacacttaaacacacaggggctgttattagcacagaagacgcagcgcttggtaagttaacggcacacagatatgcaagggctgatgtcacaaaca

SEQ ID NO: 36626 - DNA, 1244 bp, Artificial sequence
  DNA replication origin
aaagcacatctggaatcggcctgctcctgtcgtcttgcggtaaagcaagaaccttctggaggggaaggggtcccagttcctcctgtccccttcactcaaggtgcggccgttggggcctgggaagggggatcccggctctggctccgcgcccccgaagccggccggaagcgctggggtggggaggtgcccccggtgactcacgcgggggcaggaatgctgcggtcggaacgggacccggctccagaacccacctccagccccagggcttctccggccggcggcgccagctcccgcgcgctgaccctggcggggccccacgtgccaggtggctggacccgacccaggctccccgcccccactcgggccgcccgcccgggactgtactgtttctcctccgggcggcgcgggggctgcgggcgcggggccttcagggcgcggaggctgcgggagcgggcacctgaccttgtctgggaacggccacctaggaagccgcgactgaggagctcccctaccctcccctttccggcctctgcagactttgcaccattccactccctccgctgacggagaaaaggaaactttgtgtctgcggatggagagcctcccttgccaacgcggtgggaacagaggcgtacacgcacggagcaaacacgagagacacgtacacagatactcaacacatgcacgtacacaccatccacagatacacgcagggtcacaaacataccagctcagaaacacaaacacagatgcacaagcacacgcgtaaacaacacgcagaactgcagtcgcacttacaagacttggtcccagggccgggcaccgagtggctctgcctgcgatccagcactttgggaggccgaggcgggaggatcgcttggggccagaagtttgagagcagcctgggcaacgtggtgagactctcctcttctctacaaaaaaaaattgaaaagttagccaagtgtggtggccgcctgtagtcccagctgcttgggaggatgagacaggaggatcgcttgagccctggaggtcaaggcagcagtgagccgtgattgtgccactgtactgcagcctgggagatagagcaagaacctgtctcaaaaaacaaaacgaaaaacttggtccttcttacatcctagcgcagacattgtgtgtgtgtgctgggggaggggggtgtctatgtttctacgtgtatctgtgttgggggattccccttattcaccaggatacgttctctaagagcc

SEQ ID NO: 36627 - DNA, 819 bp, Artificial sequence
  DNA replication origin
agttcttggagtggaaacatgcttcatgtatgtgttccagagacactggaggccagtgtggccggagaagagcgtgtgacagggagagtgggagaggggttggtaggaggcgagcttagagatgaacagacatgtctccattgatgtacagccatgggccagtttccctaagtgtgtctagcaggtgtgtgtgctcatacttgtgtccttgtgagttagtgagggtgcctgtgtttgtgcatgtgagtgtgtgcatgtttgtgtgtctccttgtgtgtgtgtgtctgtgtatgcttttgtgtgtctatgtgtgagtatgtatatatgtgtctatgtccatatatatgagcacgtgtatttctgtgtgtgtctatatatgtgtatatgagtatgtgagtatctaggtgtacgaatctgtgtgtgtgagacacagtgtgtgtgtgtggctgtgtctgtttctgtgtctgtgtctgtgtctgtgtgtgagcatatgtgtttatatgtgtgtgtatgagtatgtgtctctggggtgtaagaatgtgtgtgtgtgcctgtgtgtgactgtgtgtgagtctgtgtgagcatgtgtgtgtatgagtatgtatctctctctggggtgtaagaatgtgtgtgtgtgtgtgtatgcgcctgtgcctgtgtgtgtgtctgagcatatgtgtctatgtgtgtgtatgagtgtgtgtctctatctggggtgtaagagtgagtgtgcctgtgactgtgtgtggttgtgtgtcttcatgtgtgtttgtgtatgtgtgtttttgtgtgtgtatgcctgtgcctgtgtgtggctgt

SEQ ID NO: 36628 - DNA, 2012 bp, Artificial sequence
  DNA replication origin
cccccttcgcctcctgacaggaaaggtttaagggggacagagccctgggaggccgggccgggctcgggggccaccccgggggcccgggccatggatgtgcgccgtctgaaggtgaacgaacttcgcgaggagctgcagcgccgcggcctggacactcgaggcctcaaggccgagcttgctgagcggctgcaggcggcgttggaggccgaggagcctgacgacgagcgggagctcgacgccgacgacgaaccggggcgacccgggcacatcaacgaggaggtcgagaccgaggggggctccgagctggaggggaccgcgcagccaccgccgcccgggctgcagccgcacgcggagcccggcggctactcggggccggacggacattgtgagagtgcgcggggcgggggccggggagcccggagcctgggccgaggaaagggctgtgggacgcgggagtccagcgcctgaggtcggggagacgacctgaggatcgggggatcccgctacccgccgccgaaaaggatctggggaccagggccccagcacgaccggagggtggatcctgacactcagtgcaggggggacactgggggaggggcctctgggtttcggaggtgagggacgggggtggcggggaggattccgtaccgtagggatcggagaccggaaactgctttctggagccgaagagagtcggaagaacaagaggttttccgtttgggttggggagggtctcgaaaatggggatcctagggtacggagctccgtgggcttggcggtcgtgctagcccagcgtgtgggctggggggtggggagccgtgtttccagggtggggaaggaatgtccaggtgtgcggggctgcgagagttctgaggaaggaggatcctggaatatgccgctggatgcgatcctgggcgttctcctatttgggtacgggggtgggtgggagaggtggaggcgctggtgtctgtggctggggagggtcctaatggactcagtgctttggagtttggctagtgagcatttaggggctgcgggagattgaactagggggcacccccatctctcttccggggctggaaggccacccttgaagcaggcacagcctggacattaggtgctgggagatctggggactttctggttggcttctagaagaggtatagggagccctggtgtccagaggctggcgggggagaggatgctttcctggacaaaggatctgggggtctagagctaagaaaactgagggcaaataactcttgaggctgctgctgactggtctggagctaactgtggggtttttggagaacagagggtagctgggggtgggatgggggcagatgagttggtaacattccaagtggatgaaatatgtggcgggagacagaggatcctgtgtccagcacaggagtacgtatctggcttagcgaatatggggaggggggaggccgtagggagcaaagagaaagaaacctgttgacttcactggaggcctcagagtggagtgtggggaatgtttctggacctgagcgtctccaggagaaatctcgacggttcccagaagcagttatttgtgtacccagggagtgggggccctcggggagcagcacggaactcttcatcagccaggagctgtgactctgggaatgggttcgggtagacctgcggttgtctgaggagaggaaaacctgatatgggacggcgtgaatcttcagttagaaaaaaagcagctttcgggccgagtgcagtggctcacgcctgttattccagcactttgggaggccgaggcgggcggatcacgaggtcaggagttcaagaccagtctggccagcatagtgaaaccctgtctctactaaaaatacaaatattaaccggatctggtggtgtgcgcctgtagtcccagctactcgggaggctgaggcaggagaatcgcttgaacttgggagggggaggttgcagtcagccgagattacgccattgcactccagcctgggcaacaaaagtgaaac

SEQ ID NO: 36629 - DNA, 1083 bp, Artificial sequence
  DNA replication origin
gatatgggacggcgtgaatcttcagttagaaaaaaagcagctttcgggccgagtgcagtggctcacgcctgttattccagcactttgggaggccgaggcgggcggatcacgaggtcaggagttcaagaccagtctggccagcatagtgaaaccctgtctctactaaaaatacaaatattaaccggatctggtggtgtgcgcctgtagtcccagctactcgggaggctgaggcaggagaatcgcttgaacttgggagggggaggttgcagtcagccgagattacgccattgcactccagcctgggcaacaaaagtgaaactccgtctcaaaaaagaaaaaagcagctttctttctcttttttttaaatacagatggggggtctcgctatgttgcccagggtggtcttgaactcctgggttcaggtgatctcacctcggcctcctgaagtgctgggattacaggcgtgaatcactgcaccaggcctcagggcagctttctagtaggactgggaaatggggggactggaaaggttaaggagtaagtagaagggattctggcgtaagagtttgtggagtttttctgaaaagagggcaccctgggacttggggctaaggggataaggagagaaatgaggtaacagaagagacaggatttggggttggaattggatacttgttcataagagaatttcccggagggaggagtgtggatttggggtaggcagtggcctagagattatcgaggacccaggtgctggaaagaggacttcccattgcagagacttgtgaagaaaggagtgggcctgtgtgtgtgtctagagcaggagggatcgtggcaggaatgcctagcaagaaagggtagtgggttagtagtgacctggtggtctgggcagagagtcatctctgagaggaaagcgaattaggtgctttggagcgtagactctagactaagacagacttcgtttcaaatctggcttaaagatattggcaagtcacttcacctctgtgggcctggtttccttaatgtgtaaaatggggttaatcaacaaatagtgtgttcacagcccctccaacccctgagggg

SEQ ID NO: 36630 - DNA, 1110 bp, Artificial sequence
  DNA replication origin
cccaactcttgttctaagaaatattctagttagctgggcctgggaaccatccattggtctcctggcagctgattccaggcccggcatgaggaaagtgcttgggaaatggctgtgcgataactgaaaacctctctggtttacaggagcctgtgcataccagagccagggcactggctttccaagaatgggaactgagcctggagctgctcaggattgaagctctctgtgcagagggcaagtcctcagcaaccttagtgccctggttattatgtccaaaagacaaagaggtcagccagcctgggcaaggggtgactccagtcaagtgctttcttggggatttagtgaggttagtgacactagccaagaataatgtacttgctggagggatcagtgcttacagcccatccccttgagggtggtgggagaagagcaggttctgggaaggtctacatttactcctgggtttggaggggatctgggaatgtgtagggtccatctgagtcaagatcacggccagggagaaagaagggcaggctagaggttagagtgaagaccagtagctggggcatgtgttgatttccccagatccgcctccacctaacttgctcaggttcaaaagcacacgtgcgatcactacatacaaacacacactcattctctcacctgtggagggctgtagctgctgacggtgggggtgctggtattggcgcttgagccagggatgttgctgttcttattgtaggtgctggcccctggggggttccgagcagggctgtagctgggtggtggcggtggctgctggggtggtggctgtggtggcggaggctgctgtggtggcggctgttgctggggagcccggttgtagctgcctctgttgttggagttgttgttatcccggttgttgttaccccagcggttctggctatagccaccacctccgctgcggttgaaacctgtgttggagaaatccagatgaaaggcgccatcattcccaaatggcaaccccagggaactgggttgtcttggtgactactgtgagccggcatggccaggcgcagagcaagaactcaaggtgaacaacaaagcatgtcctctgggattctctagacc

SEQ ID NO: 36631 - DNA, 855 bp, Artificial sequence
  DNA replication origin
caccacacaggtaggcagttagggactgaagcccaggtctcagcttgtcaacccagtgccttttgggtatagctagatatcatagtcaaaagatttagtaacaggtatgggggcctgggcaccaacctgcagcaggatttggagccccctgtctatggtgctgaaagaggactctgaggcccctggtacttaggccagcccttccccttcacttgctagactgtggagggggctaggataccaattacctagcaaccagtgcagaagtgttgaccaaatggaatggctgcaccagatgaacgccaggccgaggccagcaggctgtctttttagggataagcagggacttaagtctgggaatacacacccaggaggggcccatggaagtctctccatccagttggcccccagtctggcacctacctgctgatactggttatagctgggctgagggtaggtctgtgcagtggggggtggcggtggggtatagggggccgggttgtaaccgccgtagctcccatagttgtaggcaggtggtggtggaggtggaggcggtggggctgtgtagccctggctgtaacctccctggttgtagggtggctggctgtaactcggctggaaagtggagggaaaaaagccaaagctctgtgaaatagaggaaatctgcagatgtgaaatgctgggatggaaaaagggcctttttaagtggttggcccacaggggcccttcccttgcctagtggacattgtttgtgggctgagaaggaggagagccagctccatgccatggtagggcaggatgaagggcaagccccagggctgtgatgtggactctaaccccagctctgagaccccc

SEQ ID NO: 36632 - DNA, 723 bp, Artificial sequence
  DNA replication origin
tgtctgctgggggagcaggagccgggtgtgggggcatgggaaggcgggacgcctgggttcccacaggcccggtggctgagtcaccaggcggccatctggctcccattagcccagggcggcagggggctccatggggcgggccctgcggccagctgggggcagggacgctggggcaggctgtgtgtgggatgactcaggacccatgataacagcctgtgcgcatttggggagtgtaaacaggagagggagaggaaggcggaggaagggaaaattgtggttgggcagaggggggctggtggggctgagaagggtagagtcccccctccctctacactcaagctggcaggccccgtgatccacagcctgggtcctggggagagaagagagctgcccccatcctccctgcctggggtctcctccctcccctggggctgtattactcagtggtcagggttctgctgcctatagcagccaggtttgagggaagggggaagaaggggcccagagcctggagtgggggatcaaaacccagagataaaggctgagagacagacagagagggacagtgagagcagaggcctagagaggtggaaatgtacaagtagaaagaagaggcccagagtgaggcagaaggagagatgggaacctaacagaagcaaggaggctctgagtgtgagacacagcgcagacataaacagagagggggagacagacagcacggga

SEQ ID NO: 36633 - DNA, 935 bp, Artificial sequence
  DNA replication origin
catggagccgcctgcatcatgagcggccagtgcctgttggcctccatacccagcgcaggctgtgtctgcggcgcgtccccttgccggctggtgccacgctggctcggagctggctgtggcagcaggcaaggcagggcagggcaggggctgtggtgggcactggacccacgcccagcctcggtataaatatcccaggctgccggcggctgtgtttgctgtgtttactcggcctcagccccggccgggggcggcagcagcccagcaggtcctgggggcgggggtgaccaggccacagcacagacatttccttctggccagacaggccccgcaaccttgctgccccctcctgcgccctttctgggtgggcgagaggcgatgacccctcattctgggtttccagtggccgccagtgaggctccaacctggatatcccagccgggcttcccagagtgtgggagacagaggagatggggggcacggggggcgggccaagacacacagcagcgagagggaaagggcaaagtgaggagaggacagagccccccagagggagactccagcagagaaagggatggggaaacgaggtgacaggagctgagaacagagatggagaatggctggggacacggagtggaaaaggtggggaggagagggagggagggagggagggagaggcatgggaaaaacaagggaggagagagaggggagacggaaagtcacggggagacaccgacagccagaggtgtggagacagaacgagaagacagagcagtggcggtgagggaggaaggcagagggctggaaagaaacgcacagaagcagggagaagggacgggggacagagggacagagtgactggagctggagggggaagagtgcagggaggcagcttgctttggcaggacgcatggaggtgtcagacgtggggggcgggg

SEQ ID NO: 36634 - DNA, 906 bp, Artificial sequence
  DNA replication origin
attctgcaagtcggccatgtatctggggcatattgtgtgtctgatatttttctcaacatcttcactgttcttctgagtgtaaatttgtgcatttttaagtgtaagtttgacttgaaatgtggtgttttctgcatatgttaatcatctgtgggaatggtgtttctccaggagaggggagtgagtgtgtgtgtatatgtgtaagacggggtcttgctctgtcgcctgggctggagtgcaatggcgcgatcttgtctcactgcaagctccgcctcccaggctcaagcgattctcctgcctcagcctcccgagtagatgggattacaggcacccaccaccacacccgtctaatttttgtatttttagtagagatgggatttcaccatgttggccaggctggtctcgaactcctgaccttgtaatccacccaccttggtctcccaaagtgctgagacacaggcatgagccaccgcgcccggccgtgtgtgtttcttacatatgaggcagatgagttgagttgtttctgggttgcactgtgatcagtgcatgtgtcgctggtattctgagcatgtttgtctacgtggtgtgcatccagcatgcttcctgtggttctcagtgtttgtctgtgtgagggagggctgtacttcggggctgtgtgtccatctcagggactggtgttcccagcctgtgggtgctgtgagcaggtgctaaggtggtgtctgcatgctgtgttcccacatgtaggctggtgactgcagtgtgtggagttgtgtgggtctgttttgcatcatcgttgaggggatttcgcgttctcagcaggggtggatgtgtgtttgtgagcagctgcgagtgtgggtccacattgtgtgctggtgttttcaggggagggggacagggtgcgtccatgga

SEQ ID NO: 36635 - DNA, 1129 bp, Artificial sequence
  DNA replication origin
tggctgcacattcgcggtgtggtcggcctgcccaacacgccctcatgacacaccccgcccacctgcccagggctgccggctgagctggcacagccccacagggcggggaggggaaactgtgggctcagcaccttcctctggccgcgtgcgcactgcccctgccctgccaccctggcacccaggcccgatgggtggctcagccccgtcgggacaagtctgcccccgcctgtggccgaccgcaggggcagggcagggggtttggggctccccgcttcctccccctgccccgcccctgcctctgcaggcggcccggggccacagagggaagtcgtggggggagcctgggttccggctggagccccagcttcctgtccagcccccgtggggcaggaagctgctgggggaggccagctcaggccttcctgccccctcccccgcccccaagacgggcctgggacccgggtcagcaagggggagtggggagattggtgggtgagagaaagccccttcccccttagtctctggacatgcagagtatttgaggttccagtgtggattcggatttgtgtgttcaggaacttattgtgtgcgtgattccaagctttgtggcgtgagctgcgtctggcatgggtgttctgggggcctgtgtgctgtttggtatggatggtcttgtctatgtgtgtccccagcacgtgttagctccgtgtgtttgtggctgcgctgcatttctggggtgtgcgtctgcattttgtatttctgctgggcaagctgttgtattttctgtgggttttatgctctggcactgtttgattctgcaagtcggccatgtatctggggcatattgtgtgtctgatatttttctcaacatcttcactgttcttctgagtgtaaatttgtgcatttttaagtgtaagtttgacttgaaatgtggtgttttctgcatatgttaatcatctgtgggaatggtgtttctccaggagaggggagtgagtgtgtgtgtatatgtgtaagacggggtcttgctctgtcgcctgggctggagtgcaatggcgcgatcttgtctcactgcaagctccgcctcccaggctcaagcgattctcctgcctcagcctcccgagtagatgggatt

SEQ ID NO: 36636 - DNA, 1133 bp, Artificial sequence
  DNA replication origin
gcccgtcttgggggcgggggagggggcaggaaggcctgagctggcctcccccagcagcttcctgccccacgggggctggacaggaagctggggctccagccggaacccaggctccccccacgacttccctctgtggccccgggccgcctgcagaggcaggggcggggcagggggaggaagcggggagccccaaaccccctgccctgcccctgcggtcggccacaggcgggggcagacttgtcccgacggggctgagccacccatcgggcctgggtgccagggtggcagggcaggggcagtgcgcacgcggccagaggaaggtgctgagcccacagtttcccctccccgccctgtggggctgtgccagctcagccggcagccctgggcaggtgggcggggtgtgtcatgagggcgtgttgggcaggccgaccacaccgcgaatgtgcagccagcacttgtcctcaggccgaggcacgagctggggctgggcatgtgagggccgcgtctgccaccctgggggtgtgtctgctccgtctgggaccctgggtgtgacagtgtgtctgggcgtgacgtgacggggtcgctgcaatctgtggggccctgtgggactccccaggctggaattgtgcgtgtgtggcggagggtgtgggatgtcagactgagtgggtaagaccgacctgctgtctgtgaggttgtgacgtgtcagacctctgtgtggggtgtgtctggtgggactgtgacaggtccgactgtggacatgcaccctggacctgtttgtgactgtgaacccatggaggaggaggtggctgttgagggatccatttcctgtccgggctctgatgccgtgatgcgtgtgcgtgcatgacactgtttgaatcagtgtctggtgtgcggtggttgcgaccatgaccctgtggaatatatttgtatatgactgtgttgtgccaggtccctattgaagtctctgctcgtgttgtgtcccagtgaggctccgaggctgggtggtgtttacgtgatgggctgacactttctctatttgtatctgtgtatatgtgggctgcagctgctgccaaatgacacagcccatgtgttacgggccctgcaggaatctctgtgtgtccacggcggctctg

SEQ ID NO: 36637 - DNA, 1226 bp, Artificial sequence
  DNA replication origin
taattattacattgctcttagcactggaggaagtgcttaatctgtgttagtgattatcatgactatttgtgttgttattaacacagtgggtgcaagggagacccagatggagatagggctgggggggcaacctagggtgacacacgcacctggggaggaggggcatgtggcttctatggtggtagcccctccctgcccctgacgcgtctctcctgcctgcagctccacggagaagaactgctgcgtgcggcagctgtacattgacttccgcaaggacctcggctggaagtggatccacgagcccaagggctaccatgccaacttctgcctcgggccctgcccctacatttggagcctggacacgcagtacagcaaggtacgtctggcccaccgggctacgagatgcgcttggggggagccaggacggaggaagaggagagagaaagagaagtaaagtcagagaggtgagttggcaggatggggagaaagagagggatggggtggggaggggaatgaataaagagatggggagagaggcaggaagctagagaggggctctgagcaggggccagagggagatgagctatgaagacccacagagtgaagtaacagagggatgggggtgaaggggagaagagagacagggagatggaaggaaaaacgcagaaatggagagacaaaatgagagagacagatacagacacagagttaggccaaggagagacaaagacagatacacaacaaggcaagaggcgaagatgaggagggacagagactgagaaagaaaatcaggcgggcgcggcggctcacgatggtaataccaacactttgggacgctgaagcaggaggatcgcttgagcccaggagttcgagagtagcccaggcagcagactgagatcccatctctaccaaaaaaaaaaaaaaaaaaaaaaaaaaagctaggagtggtggcgcttgcctgtggttggagctactccggaggctgaggcgggaggatggcttgcgctcaggaggttgaggctgcagcgagccatgatcgtgccactatactccagcctgggtggcagagcgagacccagtctcaaaacaaaaagaaaatcagacaggtggggagagacagaataagataggatgttagaagataagagagaccgaattggagatgggaagaggggatgcggggagagacgaagtgagagaggctggcgcggtagcgggtgggggat

SEQ ID NO: 36638 - DNA, 1223 bp, Artificial sequence
  DNA replication origin
aggcatgagccaccacacccacccagctagagactgtgctcttaacccctaagtgattcttctacttatttttattattagttttccacccttaactcccttccccagctggttagggaaagtgaagttcattctgggtaggaatggctgtagtggggagaaaaggaattaaggtgttttcttttctttttttttttttttttttgagatggagtttctgtcgcccaggctggagtgcagtggcgcgatcttggctcatagcaacctctgcctcccaggttcaagcgattctcctgcctcagcctcccaagtagctgggattacaggcgccgcccgccaccccgcccagctaatttttgtatttttagtagagaccgggtttcaccatgttggccaggctggtctccaactcctgacctcaggtggtccacccaccttggcctcccaaagtgctgggattacaggcgtgagccaccgcgcccagccaaggtattttctagtttaggaaaagtttggggatggggatgagggaacaggccatgaactgctggatcaactggggcaactgcttccagcctcccatagtgggggtgtgaaaagagactggtgagaaaggcagaggaaacccctcccctacggcccccttcgatcctcctcctcctccccagtctccctccccacccagccccagtaagccctattcttggcccggaggttactcagcaaaccccaaaggaaaggcagagccttggctggggaagacagatagggaggaagacagagaggagggagaggaagggttggagggtgatgcagagagggagaggcggggagatgtcagagacggagacgaggcaacaggaccgtggaggagaaaaatagaaagggagagaaaatagtcggagagacaaaaaccaggagacccatgcgtggacagaaagactaacggagacgaaaagaaagaggcagatggggagacacgtgcgagacgagacacatgtgcatttgttggggagaagaggattggaggtgtcagtgttaaaggaacctctacaacgaaggtgaagccacggaagataaggtaaggctgagacttgggtgcggagtgcgcgtcattgggctggagctgtaaactggcgcagaaatgggcagggaacccgcaagcccacaccgcccaagagtcagtgaaacctgagggatcttccccaaggctctgaaccacg

SEQ ID NO: 36639 - DNA, 1576 bp, Artificial sequence
  DNA replication origin
ccctcctaccttttgccgggagacccccagcccctgcaggggcggggcctccccaccacaccagccctgttcgcgctctcggcagtgccggggggcgccgcctcccccatgccgccctccgggctgcggctgctgccgctgctgctaccgctgctgtggctactggtgctgacgcctggccggccggccgcgggactatccacctgcaagactatcgacatggagctggtgaagcggaagcgcatcgaggccatccgcggccagatcctgtccaagctgcggctcgccagccccccgagccagggggaggtgccgcccggcccgctgcccgaggccgtgctcgccctgtacaacagcacccgcgaccgggtggccggggagagtgcagaaccggagcccgagcctgaggccgactactacgccaaggaggtcacccgcgtgctaatggtggaaacccacaacggtgagctcggaggggcaggggagccgggaggggggcccccagggggcgccggagtgccggggccacgggtaggaagtgactggcagaagaaactggctggaggaagaggacaccccggggcaaagggaacgtgtgatggtgggaggggggtgtccgaaagaggatggcactgagccccctaccacccaggtgtctggtcttggagaggaggagatagcgaagtggaccgcttctagagtgcgacagaaacatgcggggtcgtgggggcagtcccctagagggagacaagcaatagggggagggtagaaggctccctcttccaggacgcgttgaatgggggggggggtcgtggggtgccaggtgcagagaagggagcctggtgtgggagaagcgaagaccccagcatttgggaaaggagaggcgctggagaaagttgacccagagcttgggggtcctgaggtggaaagattcaagaaggacagaaaagctagatgaaggcaaccccagagggtgccaggaaagtgagagcggacccacttccagaggctgccaggaacacgcgggatgcgggggtgggggagagtcgtagaaagagaaacagaggtgcgtgtgataaatgtggggagaaagggacgggaggttattggaaggaggaggcaagcgggagaggagcggagactcgggagggcgcccgggatgcagaggtgtcctcggtgtttcacacagggacgtgagggacagagtggggagcccagcggaggaatcgagcttccagaagacctagagtcctgggtcatgggaagggctttaccgagaggggagacaggcgtgggaaaggtggtgtgagcggggaggaggagagatacccagcgccatccacgctgcattccccgcaggatgcaggggaatgggctgagcggagtccagccgcaggggaagtgctgggtggggggtgactctacaagaccgaggtgagaaaaccaagctgggaggagtgagaaagccccacgtgggtgccacgcgcggggggaggagcctgcgcttccaccaaggggcaggaggaccccgctgcgctaaacgctggcagtctggaccccaaagtcccagttcctc

SEQ ID NO: 36640 - DNA, 1007 bp, Artificial sequence
  DNA replication origin
gcgccccctgggggcccccctcccggctcccctgcccctccgagctcaccgttgtgggtttccaccattagcacgcgggtgacctccttggcgtagtagtcggcctcaggctcgggctccggttctgcactctccccggccacccggtcgcgggtgctgttgtacagggcgagcacggcctcgggcagcgggccgggcggcacctccccctggctcggggggctggcgagccgcagcttggacaggatctggccgcggatggcctcgatgcgcttccgcttcaccagctccatgtcgatagtcttgcaggtggatagtcccgcggccggccggccaggcgtcagcaccagtagccacagcagcggtagcagcagcggcagcagccgcagcccggagggcggcatgggggaggcggcgccccccggcactgccgagagcgcgaacagggctggtgtggtggggaggccccgcccctgcaggggctgggggtctcccggcaaaaggtaggagggcctcgagggaaagctgaggtcctcagggagaagggcgcagtggtggaggggaggcttggaccgggggtgtctcagtatcccacggaaataacctagatgggcgcgatctggtaccagaaggtgggtggtcttgaataggggatctgtggcaggtcggagagagatccgtctcctggaggagaaagggtctaggatgcgcgggggctcaggagacaggccggggatgaaggcggcgtgcagggggtgcgcccgaggtctggggaaaagtctttgcgggaggccgggtcggcgactcccgagggctggtccggaatgggggcgcctgagggacgccgtgtagggggcagggagggagcaagcgtccccggcggcaaagggaggcggtctggggtccccaagtcctgcctcctcgcggggcagcgtcgcgccaagaggtccccgcgcctccggctcccagcggcaacggaaaagtctcaaaagtttttttcctcttct

SEQ ID NO: 36641 - DNA, 1208 bp, Artificial sequence
  DNA replication origin
ttttcctcttctcccgaccagctcgtccctcctcccgctcctcctccccctcctccccgcagtggcgggggcggcggcggctcgtctcagactctggggcctcaggctgctcctcggcgactccttcctccgctccgggccgaggccggccccgcgggcggctcagagccgggggggtgccccggacggggcgtcccccctgcccccggccggggccctcgctgtctggctgctccgcggagggaggtgggagggagatggcccagggcgcgaagggcggcggcggcggggaccggctgggtcggcagggggttttgaagccgcccccggccccacccaggaagcgcacggggcgggagcgggggcggcccccagggggagggcatgggggggctgggccaccgtcctcatctcgcgtgggcgggctccgaggggggtcccttcagccctgggggaaagggggcgggcaccccggctccgccccgcaaacagggtgctgcctcctggcggccaagcgccaccaaagcgggtgatccagatgcgctgtggctttgcgggcggtgtgggtcaccagagaaagaggaccaggcggagaaggcttaatccgggggatgagacacaggggagccgaccagaggagggggacccagaacggaaggagagtcaggctgggaaacaaggtaggagaagagggtctgtcaacatgggggcctccggagggtgtcagtgggaggagggggcaacaggacacctgaaggatggaagggtcaggaggcagacacctgtaagaattgctctcctttactgagcacctcccatgtggctaagcagcctcctgtcactcaacaccctgcgaccccatacatttactgtccccaatttacagatagggaaactgggcccagagggaccccgaggtcctagaaaggacagaagcggtgccatgccttagctggggtcagctctgacagtctctagagtctgtgctcttgaccactgtgccatcctcccccatcactgggtgtccggggtgtggatggtggtgacgttggaggcagagtccctcagcactccacgccgtagcggtcgaagttgcggagcagcaggccgatctccaggtgcacggtgccaccagcagctgtgtgcaggcgatagcggtcggccccactgtagatggtgtccccatgcagcagctgcggcccaccacc

SEQ ID NO: 36642 - DNA, 1014 bp, Artificial sequence
  DNA replication origin
tccagccatactgtccccaccagacagtccccccccagggccttggcacttgctgttccctctggctaggagcactcttcctctagatggccacatggcctactcccttccttccttttagcatttgctcaaatgtcaccttcttaatgaagcttccttgatccccttcttgctaaagcggtatccccaccctcaccctacccagctctgttttccctcacagcaattaccaccatctgatctaccctataatttgcttatttactacattcgttgtctaggatatcagcttcacgggggcaggaatttttgtctgccatccatgttcatgtctgccgtgtccccagctagctagaacagagtctagcacaggagaagggatcagcatgagatgagatggggctggatctccaagggctttgactaccagactgaggagctgaactgtgttctgaggacatgggcaaagctatggaaggagagaaagatgcttccagatgccaggtggaaggtggattagagaggggcaagaaagaaggccctgggcccaaagagagcagggcagggacatgagggaaggcaggaggtgtccctgacaaggcccatgatggttacctggggactggaggagcaatgggctgccctgacatggggtcatggaggaggataacacagagaggaaattcagcagaggtctgattagaagggccttgaatgttgaagaggttggactttatactgagggcactggggagctatggaaggatccttagcaggggagtaacatggatttggaaagatcactttggctgctgtgtggggatagataagacggtgggagcctagaaaggaggctgggttggaaactctgggacagaaacccagagaggaaaagactgggcctggggtctccagtgagtatcagggagtggggaatcagcaggagtctggtccccacccatccctcctttcccctctctctcctttcctgcaggctggccccggctccatttc

SEQ ID NO: 36643 - DNA, 1104 bp, Artificial sequence
  DNA replication origin
ctgctgaatttcctctctgtgttatcctcctccatgaccccatgtcagggcagcccattgctcctccagtccccaggtaaccatcatgggccttgtcagggacacctcctgccttccctcatgtccctgccctgctctctttgggcccagggccttctttcttgcccctctctaatccaccttccacctggcatctggaagcatctttctctccttccatagctttgcccatgtcctcagaacacagttcagctcctcagtctggtagtcaaagcccttggagatccagccccatctcatctcatgctgatcccttctcctgtgctagactctgttctagctagctggggacacggcagacatgaacatggatggcagacaaaaattcctgcccccgtgaagctgatatcctagacaacgaatgtagtaaataagcaaattatagggtagatcagatggtggtaattgctgtgagggaaaacagagctgggtagggtgagggtggggataccgctttagcaagaaggggatcaaggaagcttcattaagaaggtgacatttgagcaaatgctaaaaggaaggaagggagtaggccatgtggccatctagaggaagagtgctcctagccagagggaacagcaagtgccaaggccctggggggggactgtctggtggggacagtatggctggagcccagacggagtgtgcctggtggggacagcatggctagagcagaatgaggtggggagacgggaaggaggtgccagcctggttgtggagagccttgtgatgcatgctaagactatggctttcaccctgagtgagatggggaccattggagggttctgagcagagcagagatgggacctgacttaggtgttcacagggtcccagctgcatgtggggtgcagaccaggggggttggggaaggggactccagagacaagattcttgtcatagtccatgtgagagaagaacttggacagatcaaggtgctgggcgagaaaagggtaagaagtgggatttaggatgtatttcaaaagtagaggcagtttaagatttcctgatggacaaaatgggggcttgagaaaagagaaagcaagg

SEQ ID NO: 36644 - DNA, 1397 bp, Artificial sequence
  DNA replication origin
tgctgaggaatacatgtgtatgtaagtttatttgcaaagcacttagaacagggcgcacggtccttgttgctgttattattattggctattattgcgcaaaggggaagggaggcggggccaagccaggaaggccctggagaatccggggtgccccctcctccggcagagcttgggcctgggctcacgaggaaggggctgcagttctccaaggattcccgcctgctcccagacccccgggagtcgtaggaacccgttcctggacgctgacgtcggctttcagggatccctcgccggacgccgcggagggacagagcctgggaagccgtcgccccgccccgtccccgcccccgcgcgcagcgggcccggggcgctgagacccgcgtagagcaaagcgcaaggtcccagcgccccttggatcctcggtggcagggtccgggcaagtgtcattgcgagggttcaggaagccccggcctgtgatcgtgagcggtgagtgagggacgtaggtgggtgggggtcacagtcccttccctgggtcctggagttggggatgagagggcaaagctttggcgaggaaatcggctcagtcaaggtttggaatgagcaggcaggaggcttggggaccttccagggggatcgtaggacgagaagaagaatattctttctggttgtgttgcgtgtgtacgtgtatgtgtgtgctggggttgagggtgtttatgggggcgaggtgtgcaaaggattctggagagctggtgcatgtgtgggagttgtgtggagtcataggtgtgtgggtggagtagggcaggggtgcctgggcctgatgagtggggcaggcatgccagaggtcatgagaataggagagagtgccggggtgcatgtgtgcgtgtgtgcacaggtgtctgtggtttgtgatgcagtggggagtagggttgtgcacggagtcaattgggataaatgtgtaagaaggttggggacctgaaaggggtgttttctgggagctgatgttttggggcaaatattcaaggagtcctttgggagatgaatgtgtggaggtggaggctgggcttgcctagatggggctgtgtggcaggggacttcggggggcaggtctaggggacagaggatggggaatgtagactagagtgcagttccaggcagcactgggggtaggggatgggtgtgtgtgtgactgggaggggtgcctgggcctggataggtggtcacgcggtatgaacctgggatggatattgggggtgtttgtggggcaggtaagtgtgtaaggcatggtgcaacaggtgctgcaacttattggggtaagtgtgatgggtatgtggcttttgcctgagagaaatgcccagaatttggctgggtgcggtggctcacgcctgtaatcccagcac

SEQ ID NO: 36645 - DNA, 1273 bp, Artificial sequence
  DNA replication origin
tcctccggggcctgtagcctgatctagggttggtctgggccctggcttctttgccctagggcagctgagatgcatgagtttgtgtctctccaggcctcagcactgtgcccagcacagcaggaggctccacaccccttagctcatagtgttcttttgttgaggaacaagaagcagtttgagcctcttaggtgggaggtgggcagggaagctttctcagaggagggggcatttagggggcatttgagctaaaggtaatagggtttccacaaggctggggcgtggccctaaccttccctctgggtccctgctaagtcacttcaaatacacgaagttcctgccatgtgccggtgccactccaagtgcagggaacaaaagcaacgcaaacctcagccctcctggtgctgccattgtggtgggggagacggacagtaacagagatggagagggaactcctggagtatatgagggtgggggtcctgtagggagcagccaagccagccgggtgtggtgcactgtaggggtggctggggtccgtcactggagtgacactgaagtatggaccagaggatgtgaggggggagctgtgtggtgtcttgaggcaggtgtgagcctggcgtgtttgaggagctgggaggagcccagaggggcaggtgtggagtgagcaggtgtggagtgagcgggtgtagggtgagcaggtgtggggtggttggaggtaaagtccaggaggtggtgggtgggggtgcagatggtgcaggttgggtggggcctcaaggcctttgcctgttgcagggatgtcgacttttactcaaagtgggacaggagccgtgggtggggaggagtctgctcttccttggcctggctcacctcttcatggaatccgcgggctgccctgtggataagggattgggcagtgtgtgaagggctagtaaggaggctgctcagtaacttgggcttgaccagggtggtgcagaggaggaggtaagaggggttaggttctgaaggtggagtagatgtggagaatggcgggaagtttggcttggagatgatactggactcttcagcctgagcagttggaagggtggagttgctttcagctgagcaagaggagacctgggtgggcagatgctggggggcatcaggagctgaggtgtttcctttccccttgaagcctggtgactgctggcctgagccacgcttgagccgtgggtcatgtgagtgtgaatgagtgtgagtgcatgtgagtctccgcccctgctcaccaccctctcatccc

SEQ ID NO: 36646 - DNA, 886 bp, Artificial sequence
  DNA replication origin
gttctgacttgacggccaacagcaggtaggggacatcagtatctgagcagctggagacttggctgccaccacctccaggcagccactgtgggaagctccggcaggctgctgacagcaagaagcggcggaggtccttggggtaggaggcgaagtcagggatctcggtggcggcggcggccccccaagcctggcagccccccgtttcagtgctgtccccactgggcagggaccccagccgccactgctgctggttccagtaagcaaagggcagcgggatagtctggcccaggcgggtggagaggttggcaggtagggtgggctcagggttggctggcgtggggcttggcggggtgccccgagggctggggtaggccttgctgagccgggactcggatgtccactcgatgtacactttgaggcccaggagtgtgagcagtgctgacaggcagagaaggcacttggggcagcgcatgacccggcccagggaaggggcggccgcgggagctacaagggagccacaggggagccacggaggccattggggtgtggggatgggcctccagagagggcccagccaggccccaggcagacagcttcacaatctcccatagtccccgccaacccccataacagattctctcggtcccagatcctaaacagctcccctgacccagggacctcgttggtccttattcctagacctaggagtcccccattccaatcccgtaccagcaccctgttcttcccactccgtccaaatgcttccaccttcctaaaagcccaagggtctacctcttccctgtctccatccaggacaagggaccttgccgtctatctcctccctctccctccatttattgccctcaccaggaaatcaggagcggga

SEQ ID NO: 36647 - DNA, 1185 bp, Artificial sequence
  DNA replication origin
ggaaatcaggagcgggattcctagctccctggggttagaaacccagcctgcctcccgcaacaccccaaccccagggactggggaaccagggatcccatgcttttttacctctgggtctggctcccgccagctccgggtgccggcctcaggtcaggcctccctcagctccctctgatctgcctgccccagcccctgtgttgtcgaccggcggggcccagccctgcccagccagtccagaggggcggggaggggagtggagcgggagcagggagggccccaggggccggggcggggctgaggcaggagagagggagggagggagggagggaggagggcaggaggccgacctgagagatggggctctggcgtgttagggctggtttctggtgagacagctgggaagggtgcagggggcagccacagaaacaagacgggggctttgtgaggcctgggaggggagaaccagggccagggggtgccagggagggtggggctgaaggctgggcctgggctggggagtgttagagtgaccagggcgaggcagggtcccactgaggcagagatggggaggctgagaggctggcgcccggctgcacccatggccaggaggcggcagtgaatgtgctgagtgggaagggatcggcgggcctgccagagggatgtttgttgttgctgcccagtcagggtgaggtggggggaacggggctggtgaggagaaggagagacagagacattgtggagagggaagagacggccagggagcagagagaggagaactggggtgagacaggcgatggagagagctgagggggagagagagagaagacgggcaagtgggaaggtggccaggagggagagggggagggaaatggagatggcgagaaagataaggggttgcggaagccctgtggggtgctcatggggaaagagaggttgagagaggcaggtggagggcagaggggagggactcaggcttccgagccagacccaggcagaggcggagagggagccaaggggaagaacaggagaggaaaagactggagcttcaagggcaatagagggtgacggggtggggcccacggggaaccccgggagctaagctgatcccctgtacctcctccatccctctcggcacccgggctgcctgcccagcagcgtgggaatctgttcctaccttacccccaa

SEQ ID NO: 36648 - DNA, 1083 bp, Artificial sequence
  DNA replication origin
tcacataaggacagtttgagaagagtctcctgacaaggtgagtgtggctctctgcggctactaacagcctgagcctttacctccccaggcctgaacaggggcatggaaagggctgcctgacagggtgacaggagctgtgacctttagccaagggcagccaggaataaatactgggaactcacgctctctcctgtgattggccagcaccactcccccaccctgacgttgagtgaagacaaatggaagccagaagtgtggtgagctaccagacattccatgcagcccgctgagaagccacgtgagtggggacagggctaaaggctaggcagggacagggctggctgtgtcccgaggctgctcctccggccctgacttcaggccctcagcccagtcgactcccacaacctcgcaattgggcagcatctcctccaccaatatctgagtgaggccagggttggacacggcagggaggtccgagatgtccagcctgcggaggttcctgaaaaggggtgagaaggacaggaagccagtgtaaggacagcatgtgtgtgtgtgtagggaggtacaggacagcgtgtgcgtgtgtgtgtgtgtataggcaggtaagccagtgtaaggacagcgtgtgtgtgtatagggaggtacaggacagtgtgtgcgtgtgtgtgtgtgtgtgtgtatagggaggtaagccagtgtaaggacagcatgtgtgtgtgtgtgtgtagggaggtacaggacagcgtgtgtgtgtgtgtgtgtgtgtgtatagggagataagccagtataaggacagcgtgtgtgtgtgtgtgtgtgtgtgtagggaggtacagacagcgtgtgcgtgtgtgtagggaggtacaggacagcgtgcgtgtgtgtgtgtgtgtgtgtgtgtgtgtgtgtgtagggaggtactggccccaaatttcaaccttacaggacagtgtgtgtgcgtgcgtgtgtgtgtgtgcgtgcgtgcatgcgtgcatgtgtgtgtgtatagggaggtactggccccaaatttcaaccttagcttcctaaaataaaatctttatagctgtccaggcacatgaagcccac

SEQ ID NO: 36649 - DNA, 1729 bp, Artificial sequence
  DNA replication origin
tttttcttcttaaaaaagacaaaagatggttgggaagatccctccagttcaccagttcgaggctgcagtgagctatgatagcgccgctgctctagcctgtctgtgaaaaacaaggggggcggggggcgggggggaagactggagatgtaaatctcccgcagggccctacccgtatccgcaacaggtctctaacaggaacagcctcaggcctgtgttggaacaaggtaggttacagaaatctggaagccagatctgtaacttcagggtaaggactggctctcagggctgatcccccgggctgggtgtcccagaggcacccgcccccgccccttccccaaggcaggccaggacaccttcactcctctccttaggctccccacccccttctcctccccactgtgcctcctggagtagcggtggcggtgccacaggggagcggggcggggcgggctctgagggcaagggggatgggccccgccggggtcactggcggccaccctggaaactcgacgcaggccggcccttctagtgaatcgtcccagccacagctggcctcccagccgcgcttggggcgcctcggggcgcgaatggtgcaggttggggagactcaccacgcaccgtcgggggtcggtccggttattcctcaccgctcggctccagtgggcgcgcgggcctctcctcctcagttcctgcgctgcagtccctccctcacccttcgcagcttgggaatccgactgtgtcattccgacggagcgccgtgaggacctccgagggtgttagcgccaagtgatctctgtccagcgctctgaatatccaagtaaaggagttcaatgaagggcgggtcaacggaggagaaaccgtgactctctcaagggagcccaaggcctccttgtctaattagtgacgcgccaatggatggaggctcttcccaccatctcttcccagcatccagtgacaccaccgccaagggacgggctcggcggaacctgcaggaaagaagcatcggctgagcctgactgcagcgctgtgaagagacaggggaggggatcagtagttggtcccgcgcccaccccctgtttccgcgaggggcggagttgactggccatgcaggcagagggcgaaatgtgaaattccactactcctaccgtttttccctgacccgatggggcggagtgtcgtcaggctaagttccctggcggtaaggtggggagattgaggcgcacacctgccgaacggtaacgcaggattagctaaggcgagctcaggacagaagcctcccgaggagcaggagggcaaaataataaataaataaataaataaataaataaataaataataaataactcactccttggtctttatttgcggcaggaattcagaaggtgaaagcggggccttaggatctttctgaccttttgggttttaagcaggaggtgtcagaaatgttaccacagggctagctggcttgtggccagcaagcgttcacaatgccctcgatttttcatccctgtctgtgggttctttttttcattgtaaggcagaatttctacgattgctcacccactcagagaacctgagctggtttagaccaggtgagacaggctaggtttaccctggtgatgatgtgttgttgccatggcgatcctgcccagtaccagaggccctgcagattcagatacttggtgcctgtgcttggctgaggggccaatgggtgaagctgccatctgcg

SEQ ID NO: 36650 - DNA, 1177 bp, Artificial sequence
  DNA replication origin
ttggcgcgtcactaattagacaaggaggccttgggctcccttgagagagtcacggtttctcctccgttgacccgcccttcattgaactcctttacttggatattcagagcgctggacagagatcacttggcgctaacaccctcggaggtcctcacggcgctccgtcggaatgacacagtcggattcccaagctgcgaagggtgagggagggactgcagcgcaggaactgaggaggagaggcccgcgcgcccactggagccgagcggtgaggaataaccggaccgacccccgacggtgcgtggtgagtctccccaacctgcaccattcgcgccccgaggcgccccaagcgcggctgggaggccagctgtggctgggacgattcactagaagggccggcctgcgtcgagtttccagggtggccgccagtgaccccggcggggcccatcccccttgccctcagagcccgccccgccccgctcccctgtggcaccgccaccgctactccaggaggcacagtggggaggagaagggggtggggagcctaaggagaggagtgaaggtgtcctggcctgccttggggaaggggcgggggcgggtgcctctgggacacccagcccgggggatcagccctgagagccagtccttaccctgaagttacagatctggcttccagatttctgtaacctaccttgttccaacacaggcctgaggctgttcctgttagagacctgttgcggatacgggtagggccctgcgggagatttacatctccagtcttcccccccgccccccgccccccttgtttttcacagacaggctagagcagcggcgctatcatagctcactgcagcctcgaactggtgaactggagggatcttcccaaccatcttttgtcttttttaagaagaaaaatacaaaagcttttatataggcttacacacagctacagagcaaatctttatcgtatatccaagattatcaaccacttgactgtacaaccaggaatcataacacatttgagaacaaccagtggcaaaataggaaaatgggccaatgaagaagataggtgactaataaataaaaatctgatatcaagtgtaggcaagttgtagggaaaatgggtgatgaacgaatagaacaaatgcctggggtaaacatcattcgaaagcccagaaag

SEQ ID NO: 36651 - DNA, 1613 bp, Artificial sequence
  DNA replication origin
acctttcttggcataattatttgagtactgcatgtgttcctgtgtcctattctttgcccacacatcatccatatttaccctcttaaccgtccatcctccaccttgtccctaagtgctgttgttaatagccctgtggtagaccagatgccaggagccctgagatatcctaagcagctccctctgccagtccttccaagagttctggttccacaggtgacacacctgaacacaggtaacccctgcaaaatctgtgattaccacgcaaggctgacagtgagtggtgggtgttctaggaggggccaccacctccatatgcagggtcagagaacactgagtggagcaggaggctgatgactttgaccacaaggtaggtggatgggtatgtttggctttatagggaagggaagggaagacaagggaagacgaagggataggggtggggaggggaaggggaggggaagggggaggggaaaagggaaggggaaggggaagggaaagtttgggcattgcaggcaacatcacaaaggttggaacctgcctctggggtacaagaacagcaaggaggccacccaggatgcagctgaggacggaagacatggggagcagtggatctaggggagaagcagactgtgattgaccttgggggctgggcggtgaacagaggtgtgttatgtgtgtctgtcccagtcacagatatgaggaggagtggggccgcaagtggcacctggttcggtgggatttcctaatacctgctgttcatcagagcctctccatgtagcatgtcagtatagatctgaggctgtgtctgggagggggagctggtggtccaaggcagcctgtggtgcttactgtccctaggggtgggaggagagggatgaggacacccctgcgcagtgaagcctcaggtgtgtggagccacaggtatctcacctggtgattcttgtcagacacgtgccttgggtgaggatgtcagggtgagagtcactgtcatttttcttaaaatgtacatggcatggacccaggtattcagggacccagagaacaaggcccctggtgagagagggttgcatggagctgagcagtttcatgtgctcagagtgggagggactcctgaaaagacaaagcctcaatcctacctgtcaggagccatgcctatttccaggagagatgacaagggtgacccaggacagacattgagtgtgaggacaggacagagaggaccctggtggcttctcaggtgtgggaatgtgaggtggggtttgttcccatccaaagcacagaagccctccattgtaccctgagtgctgtgtgtgactagcagggacactggatgggttggacctgtgcctcttgaaggcagggctggatctgtaggaccagagatgcctctgtgggtaagaggtgatgggaatgaggaagatgggggtgactgtgaacctattttagttccctggggatgtgtgctgaagaggaagtggcctagaacattccttttctgggtaaagtgaagcggggaagcagtgtggattctttttgttttgttttgtttttagatggagcctcactctatctcccaggctggagtgcagtggtgcgatctcagctcactgcaa

SEQ ID NO: 36652 - DNA, 935 bp, Artificial sequence
  DNA replication origin
gggggggtcagccctccgcccggccagccgccccgtctgggaggtgaggggcgcctctgcccagccgcccctactgggaagtgaggagcccctctgcccggccagccgccccgtccgggagggaggatgaggggggggtcagcccccccgcccagccagccgccctgtccgggaggtgaggggcgcctctgcccggccgcccctactgggaagtgaggagcccctctgcccggccagccgccccgtccgggagggaggtgggggggtcggccccccgcccagccagccgccccgtccgggagggaggtgggggggtcggccccccgcccggccagccgccccgtccgggagggaggtgggggggtcggccccccgcccggccagccgccccgtccgggaggtgaggggcgcctctgcccggccgcccctactgggaagtgaggagcccctctgcccggccaccaccccgtctgggaggtgtgcccaacagctcattgagaacgggccaggatgacaatggcggctttgtggaatagaaaggcgggaaaggtggggaaaagattgagaaatcggatggttgccgtgtctgtgtagaaagaagtagacatgggagacttttcattttgttctgcactaagaaaaattcctctgccttgggatcctgttgatctgtgaccttacccccaaccctgtgctctctgaaacatgtgctgtgtccactcagggttaaatggattaagggcggtgcaagatgtgctttgttaaacagatgcttgaaggcagcatgctcgttaagagtcatcaccaatccctaatctcaagtaatcagggacacaaacactgcggaaggccgcagggtcctctgcctaggaaaaccagagacctttgttcacttgtttatctgctgaccttccctccactattgtcccatgacc

SEQ ID NO: 36653 - DNA, 1390 bp, Artificial sequence
  DNA replication origin
agatcactgaccttggcctcagagacccaggttggaatctttaccccttcatttactagctgtccaatttgttgaactcagagcctactaccttctttataaaatgaagtataatacatctcatagggtcattgtgaagatcaataaaattattaccataagtattaggcaaatgctaagctctttataatcgttggttaccctgttcctctaccactatccctccctcccacacacacttcctctcactctctctccactacctaaaggatcaagttcaacctctttagctggcctttaagcctcccccgaccacaccccaccccaccccagataagcgccacccaacctttccaattttatctaggacagctcccctgcccagcagtccagctagaggtcacgtcggccacccttttctgcctgcaatgcctcagacacacatgctctgtaacccagaaatctgtggccaagaaaggtgccaagacccgcagaaaagctgggacacaggaaagagaaacgaaggctgacaacagatctcacgggggtgagggagattaggccaatcagagaagacagcacacgccagcctcagatgcagaacaactggacctggacctaacaagctgagtacaagtggagacgcaaccagaaaagattgaagtgaaatcctcaagcaaaaaaaaaaaaaaaaaaaaaaaaaaaaaggatggagcagtagtcagaggggatgccacccctacaaaagacaaacaaattgatggaatggaaccttgcagggagagagaggaccagcagagagagggaggcgtaggaaaatgaggagtggggcacaaaggtggggctctcagggagaagaggagtcgattttagagggggagaagaaaaggacacagagctggctgtacagagaaaaggggccaaggcagagaagatggcgggatggtgtgagacggagttcacagaaatacccagagaaggcgacgattacacagaggagcccccagaggggcgaactcttgaggaagatgaacgcggagggtggagccagccagaaattcagaaaaactagaggcgtccccggtagcgaaggaagccgggaaggggccaggctatcagggcatgaagcacgggagaaaatgggtccgaagagggagagcgtccgagagaaaaggaaaatcagagattaggaaaatcacaaccgacacaaagacaagaagagacacaaggaaaggggtgcaatctgaggaaggagggcccggtaagcaacccggtaatcacagcgctgggagagaacgcataaaagaagggtagctcaggagttgtggggcaccggaagagacataacagaaaacgcaggcctccactcagcaaaaacaagccacgcgcg

SEQ ID NO: 36654 - DNA, 833 bp, Artificial sequence
  DNA replication origin
ggctatcagggcatgaagcacgggagaaaatgggtccgaagagggagagcgtccgagagaaaaggaaaatcagagattaggaaaatcacaaccgacacaaagacaagaagagacacaaggaaaggggtgcaatctgaggaaggagggcccggtaagcaacccggtaatcacagcgctgggagagaacgcataaaagaagggtagctcaggagttgtggggcaccggaagagacataacagaaaacgcaggcctccactcagcaaaaacaagccacgcgcgaagtcgaggtacaaggcaagggaaggccagaaacgaggcaacccgtgcacagaccgggcttggtcaacgccccaggggcggggccaggcgggccgttcctggggggcggggccagcctcggtccaataaggggtactcgacgccccattggccacctgcctcgaaagggggaagacagtctgggcgggcaggacgtgcggagggagaggcagcggtggcgcgaggctcaactcgaagcgctattggtgggactgatagtcttgtgcgccaagaagctggcagaagggaaggggcgggacatcagttcaggatctcaaaccgcattggtcgtctgcctcggctgagagaggcgatgcttgaagttcattggtctttgtgagacagggtaagaaaagcagcgcgagcttggcggttcctctggccactttctcacagtgtctttgggcgtcttcttgactgaatctgactccattggaggctgtggtaaccgtgaactagctgcacgaacacggtccctcctgcctttccgtcctcctccctcttagccggactc

SEQ ID NO: 36655 - DNA, 1238 bp, Artificial sequence
  DNA replication origin
caccccaatcctttcgctccagcgcatcctaaaccgtggtaccccccgttacttcccacggccccttcaacgccgggctccggctcctgcgggtctgaaggagctcaccgacgcccacggcctctctggatcgcactaacagagcccggcccctgcgtgtgaggatcctgcgcgaccccactccccagccccgggactccggacgccccacgcaccccgccgctgccccccggggcccacgctcggttcccggacggcgctgaccgggcatgtccgggcctgccgctcgcacgtggccgcggctctagggggcgggacgggcccgcgccgggcgcctcggggccctcaggcacgcgctctgaggcttcggcgtccggccctgccgcctcgcgcccggtccagctcggagcccccgcttaccgtgcggcctccgcgctgccagccaggggaaagggaacgacggggtttcccgggcgcacaagtcgggcgtagggtctcgcgagagttccgaaagctcgcgagagcgagggtagacgctgaggctccgcctctctcagggcgaaagttcgtccccgcctagaggggagggtgtctagtgaggggtggagaggtaaaggggagggccaaggggtcgcgcgtggaggcctgggtttcctcccgcgtttccttctcccggagtgtaatagagagaggatagagagctcctgttcggagctgggggaacttggcttcgtttgcgtcgttcgtggctggaaggaacagtggtggagaatactatgatggcgaaagtacggggcaggatgggtgggccacagctggcgccccacggcggaacaaccccttttccgggtggaagtggctgttccctggccggaagtgggagtagtaagggcggaactgtgacagggaacctaggggaagggcgaggaagaaatgtggctatcatcttccgtccttcaccgccaggagtcgcgagagcgggagacggaagccccacccttctcagggcggaagttgcttcagcacggccggggcgagcgaaaagggaatgaggcgctggaggaggggagaagataagggcgggacaaagcggcagaggcgggaccttagcagaagttagttcagctctgccttctagtgtcggagtctgttcgctcagcccttactttgccaatttagatttacctgccccgctgacctgtgtagctttaggcagtccatttgccttctcagggctt

SEQ ID NO: 36656 - DNA, 1128 bp, Artificial sequence
  DNA replication origin
ccctcccctttacctctccacccctcactagacaccctcccctctaggcggggacgaactttcgccctgagagaggcggagcctcagcgtctaccctcgctctcgcgagctttcggaactctcgcgagaccctacgcccgacttgtgcgcccgggaaaccccgtcgttccctttcccctggctggcagcgcggaggccgcacggtaagcgggggctccgagctggaccgggcgcgaggcggcagggccggacgccgaagcctcagagcgcgtgcctgagggccccgaggcgcccggcgcgggcccgtcccgccccctagagccgcggccacgtgcgagcggcaggcccggacatgcccggtcagcgccgtccgggaaccgagcgtgggccccggggggcagcggcggggtgcgtggggcgtccggagtcccggggctggggagtggggtcgcgcaggatcctcacacgcaggggccgggctctgttagtgcgatccagagaggccgtgggcgtcggtgagctccttcagacccgcaggagccggagcccggcgttgaaggggccgtgggaagtaacggggggtaccacggtttaggatgcgctggagcgaaaggattggggtggggtccgtgctcttggcagtcgtctctgccaggcctgtgttcacatgcttgactttctccctcagatgcctggagttactgtaaaagacgtgaaccagcaggagttcgtcagagctctggcagccttcctcaaaaagtgagtttggggactgaggttcaaaacgggtggaggctgtcgccttggcctgcccatctgagccccagtgtttgccggtccctggcaggcgaggcttgtttggggcctccgtggctcctttcagcgtgaggcctggcttgtgttccggttccagcctctctttgtactctgggcacagcatagttgtgttgaggggagggcatttgggatatggggtagtttgtggagatgactgaatcgtgcttttcccactgttttggtcttaggtccgggaagctgaaagtccccgaatgggtggataccgtcaagctggccaagcacaaagagcttgctccctacgatgagaactggttctacacgcgagctggt

SEQ ID NO: 36657 - DNA, 1275 bp, Artificial sequence
  DNA replication origin
aagcaagaaggggacaagatcaagatggctgtggctaccaaattacttacacttttttttttttttttttttttgagacagagtctcactctgttgcccaggttggagtgctcactgcaacctctgcctcctgggttcaagcgattctcctgcctcagcctcccaagtagctgggattacaggcgcctgccaccatgcccagctaatttttgtatttttagtagaggcggggtttcaccatgttggccagactggtcttgaacctctgacctcaggtgatccacctaccttggcctcccaaagtgctgggattacaggcgcctgccaccacgcccggccgctttttttttttttttttttttttttgaggcagagtctgactctgtcgcccaggctggagtgcagtggcgcaatctcagcccacttcaacctccacctcaagcgattcttgtacctcaggctcccgagtagctgggatgacaggcatgtgctaccacacccagctaatttttgttttagtagagacagggtttcgccatgttggccgggctggtctcgaactcctgacctcaagtgatccaccatgcttcggcctcccaaagtgctgggattacaggcatgagccactttatgcgtatttaagccttggaaacacagggactatcttgtggattggggctagtacagaattcagactgcagccttttcccgatgcgttgacttacagaaggggcattttggagggtctgtggtcctaacctggggatagcagggagatcccggggcaatgacagagaggcacagagacacggatttcctgagaaagggagaggagagaggctgagacccagggatcatgaaggggacgagcaagggaaggaagagatgatgagaccctgggaatccgggagagagacagggacgtggagagaaagggacagagagagagcgagaaggaaaggaagagacagaagggagaaggggcaaccgaaaatgggcacgaagaggcccaggcacagcaacagctggggaaatgacagagactgagacggagatgcagaaagatacagagagagctggagagggtagagaagggctttcggggagaaagtgatggagggacagagaggagaggtggaggccaaggagggaaagaccccagtagagaaagacagagggacagagaaggggatgcagacgcaggcgggagcacacccacagaggcgaaggaagggcgcaagaccatgagaaccacagacgcggaaagccggggag

SEQ ID NO: 36658 - DNA, 1173 bp, Artificial sequence
  DNA replication origin
agatgcgagtcccgcggagcccgcgcccggcggacggaccgatggacaaagccggggagagctcgggcgcggccggggcgggggccggtgcccgcagggacccgggcgcagcggggaaaggaggggcgggcaagcggcgagaaggggaaggaagcggaggtgccgggcgggcgcggggcgcgggcaggaagcggggaggggcggcggggcgggggcctccggaaaaacgccccgacttcctgccccgccagagccaggaagcgggagccgggacccagggcccgggatcgccgagcccgacctcgggcgccccgccggtcacctccgcgcggacaccaggtactcggtccccggccccgcccggcctcctcccctcggctgttgggggaagtggggaggaggagggaggggctggggcgctgccggcagcggaggggcccccttcggaccccacggaaccagcggccgcccctccttgggcctcagttttcccatctgtcaaagggagcaaagaggggagaactcacacttgacgagtgccccataggtggggacgaacggtgcgaggccggggccaaggcctcccacctgctcagtggagaacggacgatcactaccattgtacgggtggggaaaccgaggcccggggagccaaaccgactcgtcccagggaacgcacatcgtgagaaagtgtggagttgggatttgaactcgcacgtgctttccgcaaagcgccatcctccaacccccgcatgctttagggccacctaaaaatgaaaaacaacaataacaacaacgacgagggtcgctgtgaagctgaaagttgcagagtgcatttgaaagagttttcggaaagctcttttctaggtcattaattataccgtgagagacaggtgtagggagagagctggaggccttctcccattgtacggatgggaagactgaggtctacagagaagtcattactttttgcagattacactgcatgtcagagggaaagttgtgctggaactcaagactattgcttttccggttccaaaggaaggggctgggggtgggagacggaggggattgatgtacgaggattggaaattcagcgggtcccctaagtggggagactaataggacggggagccccagtccgccgtccgagtgctcagcgctggggtgact

SEQ ID NO: 36659 - DNA, 941 bp, Artificial sequence
  DNA replication origin
gctggaggccttctcccattgtacggatgggaagactgaggtctacagagaagtcattactttttgcagattacactgcatgtcagagggaaagttgtgctggaactcaagactattgcttttccggttccaaaggaaggggctgggggtgggagacggaggggattgatgtacgaggattggaaattcagcgggtcccctaagtggggagactaataggacggggagccccagtccgccgtccgagtgctcagcgctggggtgactaggagatctccgatcgaactcgggaggagttggacccatctgcacctccgggcgcggggcggggcccggggagtgacgggggcagtcgagatacggaaacgctggccctccaagacaggccagagcggccctatctggcctgcgtggcgcagtacagcgctagagcggccggcgggaggagtagagtcgtcggggccggagcccggcaggagccgggctagagcggctggcaggaggagtggagctgggcgcaaaggtggactcagggcggctagagcgacgcggcggcaggggtggggagagtgcggagcccgagcgcggaggcttcggttccggtggcggcgatggcttctctttccacctggagcaggtgagggacgcggtccccagcgggtgtcagaccctgactctgcacgtcctccccggcatccctggccgtgcacactgccacgtcccccgtaggatttagggcccgcgtaagacccgccacgtccatgtaagatttgggtctcgtgtagacccgcctcattccgtataaagtcttacagaccctccaggttcctgccagccccccatggagaactggcttcttatagacgtggggtcctcatagaccagtggcatcccctagaatccggggctctatagaccatgggtctcgggacccaccacgc

SEQ ID NO: 36660 - DNA, 1021 bp, Artificial sequence
  DNA replication origin
gaggagggggctgagggcctggactcctgggtctgagggaggaggaggctggggggcctggacgcctgggtctgagggaggagggggctggggggcctagacgcctgggtctgagggaggagggggctggggggcctggacgcctgggtctgagggaggagggggctggggggcctggacgcctgggtctgagggaggagggggctggggtcctggacgcctgggtctgagggaggagggggctgggggcctggacgcctgggtctgagggaggagggggctgggggcctggactcctgggtctgagggaggaggaggctgggggcctggactcctgggtctgagggaggaaggggctggggggcctggacgtctgggtctgagggaggagggggctggggggcctggacgcctgggtctgagggaggagggggctggggggtctggactcctgggtctgagggaggagggggctgggggcctggactcctgggtctgagggaggaaggggctgggggcctggactcctgggtctgagggaggagggggctgggggcctggactcctgggtctgagggaggagggggctgggggcctggactcctgggtctgagggaggaggagcctggggcctggacacttgggtcctgggcattgggtaacagcccttgcccctgtccttttgaaccctctcatctctcctcagagtctcacaggaagtagttgtggggtcaggatgggaaggccgggcctctgcctctagggggagagagagagagtgtgtgtgtgagtgtgtgtgtgtgtgtgtgtgtgtgtgtgtgtctttgtgtgtgttgagccctcactgtcccttccctacagtgctgccgtggtcaacgccattggcctgtacatgcgccaccttggggtgcggaccaagagtggagacaagaagtcggggaggaacttcttccggaaaaaggtgcttccctcagtgccccgtcctgaccctttcctctccagagacgccctgggagcctca

SEQ ID NO: 36661 - DNA, 894 bp, Artificial sequence
  DNA replication origin
tctcacaggtgatggggaaccggcggtcggacgagcctgccaagaccaagaaggggctgagcagcatcctggatgccgcccgctggaaccggggagagccccagggtaaggcggctctggcctctgccctcccctgtcttccccagctgctcccactcactgtctcattctctctcgtttcagttccagattttcgacacctcaaagcagaggttgatggtaatgtacctgtagccatagcatccatactgggggcctgtgtgggagaggctaggacctggacgcctgggtctgagggaggaggggctgggacctggacgcctggttctgagggaggaggggatgggggcctggacacctgggtctgagggaggaggggctgggggagctcctgggtctgagggaggaagggctgggcctggacccctgggtctgagggaggagggactgggcctggacccctggctctgagggaggaggggctgggggagctcctgggtctgagggagggaggcctggggcctggacccctgggtccgaggtaggagggattgggcctggacccctgggtctgagggaggagcggctcagactcggactcttaggtctgaggaggaagggctgggcctagacccctgggtctgagggaggaggggctgggggagttcctgggtctgagggaggaaggcctggggcctggacctctgggtctgagggaggaggggctgggggcctggactcctgtgtctgagggaggaggggttgagggctcctgggtctgagggaggaaggggctccttgtcatggtggggaagggcctgagcacagcctcttgcatcccctggcggttgtggatttgagttactgttctcttatctccctctttctccctca

SEQ ID NO: 36662 - DNA, 1353 bp, Artificial sequence
  DNA replication origin
gaggagggggtaggtgagagaggaggggggaggtgagagaggatgggggaggtgagagaggagaggggaggtgagagaggagggggaaataaaggagatggaaggagtggtggagaggaagggaggaggagaaggattagtgaaaaaaggaaggagaggaaggagcagaggaaaaaggaaggataaaaggaaaggggggcaatgaggaagcaggagggagatgagaaaaggaaagaagaagggagaggaatggccagacccagagagcagcagaggagcatggggagcaagagcctgggacaggcaggcacagatggcagcggtgaccctgcacccacccaccagcgcccagtaagccacacctcccgcccctgcaccccagcctgggcacctctcggtttcggccccctcgtcggtactctctgggggcgccaaggactccaggctcattgggccctgcggggatgagtcccccagctccaggggggcgtcagcacctgtggggtggagggagcagggctggctggaaggcctctgcggccacgagacccacactctgggggcctggaattgcgggggctaaagctacccagtgcctggcagacaccacatggctgctctgtacttcagcacgggacggacagatgttaagacctctcagaacatggccactaggggcaggagcatgaagatgcaacagaagtgggtgcccctgtgtgtcctgggtggatggggaccccaggcctagcaaataggtcacaaacatctctcccacccaaccagactgcagccccctgaggtcgggagggccctggattctgtgctgcctccacgtccattcatcctccccaccctctcatactcctttagagaaaagcaaacggaggctaagaaaggggagtcatatccaagatactaaataaacacaagcagtcagcagagctggtgtgtgagccctggcctggccatgcagagatccaagggcctgaggccacagcagtgtaaggatggtgagggatgaagctcatggggctggcgggctccccacctagggggccagcaatgcagctcagagggtggactggtcatgtactcagggaaggttctggaaaaggaagggttgatggaaaacgtagtccaagggggtgggagacgcagcaccagcagagaggtcagagcctgggagcaaagctgtggaaagggcaaactgagggaaggggaaagttatgaatgacagtggtgaccaggagcagggagaagtggatgctgagagcaaaggggaggtgttgctggggaatggcttctatctgggggtgccaagggggcaggcagcacccccaccctggatcgccg

SEQ ID NO: 36663 - DNA, 903 bp, Artificial sequence
  DNA replication origin
ggggctagcccttcccccacccagggcccaggcacccacctcttccaccttctggggagagaggggcacagggtcagaggtgggcccagatggaacctgacccacctccccgcacccaccaaagggtccccaaagcagcggcacaaggacgggcaggaggcagagcctgccccccagctgtaagggggacagggcccccagggcacagagcagaggggtggggggttgagggacgggcaccaggaggcaggagcgaggcggggggtggggggcagggggcaggggggcttgaaagagaaggggaggaagggctgaaaaaatgaaaagtggcagggagatcggagggggatggaaggtggggaaagaaaacccaggtgagagaggagtggggaggaaagagaggagggggaaggtgagagaggaggggggaggtgagagaggaagagggaggtgagagaagagaggggaggtgagagaggagcggggaggtgagaggagggggtaggtgagagaggaggggggaggtgagagaggatgggggaggtgagagaggagaggggaggtgagagaggagggggaaataaaggagatggaaggagtggtggagaggaagggaggaggagaaggattagtgaaaaaaggaaggagaggaaggagcagaggaaaaaggaaggataaaaggaaaggggggcaatgaggaagcaggagggagatgagaaaaggaaagaagaagggagaggaatggccagacccagagagcagcagaggagcatggggagcaagagcctgggacaggcaggcacagatggcagcggtgaccctgcacccacccaccagcgcccagtaagccacacctcccgcccctgcaccccagcctgggcacctctcggtttcggccccctc

SEQ ID NO: 36664 - DNA, 1068 bp, Artificial sequence
  DNA replication origin
cgagaccccgtctctaaaaaaaaaaactaaaaaaattagctgggcatggtggtgtgcccttggggtcccagctacttggggagctgaggtgggaggatggtagatcctgggaggttgaggctgcagtgagctgtgatggtatcactgatgaaaatgagtgagaaaaaaaatgtaaaaaaaaaagaggagagccgaggcccagagatccaggcccgcggtacctgtgttctgcccgatgctctgcaggagcagggggtacttggtcagccgctgcatctccgtggggatcatgtccttcagctgcaggcggcggcaccgcgggcggctctcagcttcctgcgggaaacatgctggtgttgcgatggcccaggctttgggctcaccccagggcgcaggcacctaggagtctgggtctccaggcccctcctccctgggaagctggagtccagaccccacctcacctgcacgaaggcacagaaccgagggtccttgcgttgcttggctttgagctgctctaaggcaaatgactggcggctgcagaagcgggaggagattttctggaaccaggagccctcagcaccatcaaactacagcgagattcaggccaggcaggtgtctcagtggggatgggcaagaacagggactaaagtacgacaggctggaagcccagaccctgggactggagtagggtgggctcaggacccgtcccgggcctgaattccatgtgtctagctgggaggagcgggagggctgggcatctcacccgggccagcagcacgtctccgatctcctcgatgaggtagccactctcctgcctccgcttcatcaggcgatcgaggaacagggctgtgggggcaggaggaaagggatgctccaccagggtctggaagatgctgtgcggggcctgctgcggtgtggtgggggtagggctgcaggtgtgtctgtgtctgatcctcgggaccggatggcgtatctgcccccaccccatgtgaaccctggggttcccgagcaggttgaacccagggctagagcagagctgcccgtggggcagtggggtacacagaggga

SEQ ID NO: 36665 - DNA, 1250 bp, Artificial sequence
  DNA replication origin
ctgcccacctccacctacttctcaacctctttgctagaatgctggctccctggctctctagagggttctgctccccactccacaggcagctctgcccaaaaaagacaccctctgccctgggccatgcagtggctgcactcaccggtggccacctcgcgggtcatggcggaggtgagccgcagcacgggccgcagcatggtcttgccatcgggcgtgggcgtcagtgtccggctatgggacttgagcagcagccgctcgtcctggcgctggagcagcagcagcaggtcgtccagcagcagcacatgcacctctacggggcgagcagtgctcacacggcgtgcccccgcgcgaccccctccccgcccttggctcactgccccaacaccctgcactaggcagctgctctggcactcacccactgccttgtccttagtcacccgccacgtcagtgggccctcgtggaccaatttcttcttggtgatgtccaggttctggggcaggagggggtgatggtttgtgcaggttggcagggggtgattggggttggtggggaggggaagggcagggcagtggccggggatgaccacaggctggggatcatgggattggcatgaggtgggggacagagctctcgcttcctgggtgtattatgggatgggcaggacaggctgggggctgtatcacagaatcccctgggccaaggagtaggggggcgggggaggcaggagggtatggtcacaccttgaactcgctcagcatagggtcgctgctctgccgaaggtgggacaagtccaggcgccgctgatagtccttgagcctctggggcagagacgggagcattatggggacaagctaagtgctggggctgacctgcagtgacccacattggtaagatgagagccaagaccaacttctgatgcgggcaagctgagggttgggcctgacctccaatgaccctgagagggagatgctgagggccaagccaacccctggacacagtgacccttgagggagacaagccaaggggtggggtgtgacttctggacaggctgaggtagggtccaccccctgctctcacaccatccactgtcccgggtgtggggccagcccaggctcaccagcaggtcctccatgtcacgcacggcttggttgacgtggtgtagaatttcccggcagcactcggctgccagctccactttctcccgttctgtgggctcttctgcaggcaagggagagagcagctctggtga

SEQ ID NO: 36666 - DNA, 1305 bp, Artificial sequence
  DNA replication origin
atcccatgatccccagcctgtggtcatccccggccactgccctgcccttcccctccccaccaaccccaatcaccccctgccaacctgcacaaaccatcaccccctcctgccccagaacctggacatcaccaagaagaaattggtccacgagggcccactgacgtggcgggtgactaaggacaaggcagtgggtgagtgccagagcagctgcctagtgcagggtgttggggcagtgagccaagggcggggagggggtcgcgcgggggcacgccgtgtgagcactgctcgccccgtagaggtgcatgtgctgctgctggacgacctgctgctgctgctccagcgccaggacgagcggctgctgctcaagtcccatagccggacactgacgcccacgcccgatggcaagaccatgctgcggcccgtgctgcggctcacctccgccatgacccgcgaggtggccaccggtgagtgcagccactgcatggcccagggcagagggtgtcttttttgggcagagctgcctgtggagtggggagcagaaccctctagagagccagggagccagcattctagcaaagaggttgagaagtaggtggaggtgggcagggcggggccaggcctagagggtttataagtgaggtaggaactgctgcaggtgtttgcacagaggcgtgtcttgtgtaaacaaggagaagaaaggccaggagtccagtgaggagggatttgtaaacatactactaggaagttgcaccagggccacaaacactggaagcggctggagggtgggagtggctggaggggtttcgttaggtaagccagggtacatgcccgattccataaggaggtgtgagaggtggggctcaggaggacacatcgggccctggatattagcagacagtgagtggtgagttgagccatgggagccctgagagcgccaccactgtgggtgacttctccagcttgtgcttagggaggggcaggcactggggggacctgggctctgagccccatctccccctctccctgcagatcacaaagccttctacgtcctttttacctgggaccaggaggcccagatatacgagctggtggcacagactgtgtcggagcggaaaaagtgagggggggtctgagttctgagtgtgggtggaggacgcccaggtttctgggttcccagggacaggagggctgtggggaggccctggcatagggtctgggggctctgactgcccagggatttggcctttctccccagctggtgtgctctcatcactgagactgccggatccctgaaagtccctgccc

SEQ ID NO: 36667 - DNA, 1668 bp, Artificial sequence
  DNA replication origin
agagagacagggagagacagacacagagacaagacagggagagcagagagagaaggggaggtggggagaggcaggcgggcacagagacagagaaacagattatcagaaacagagacacagagatgagaaacacgaggtggagtggggagattcagaaaagacaaagagggagatggacagaaggggctgtagggatgcgagctctggagggggaccctcctttcaggacagcgccctggcccccaggtgccccactcaccttcctgggcgggaacctcaagtgcagccaggctgggggacagagttccccccaagctgagacaggaggggtctcaggcggcaaaattcctcctccaactcctggtggggtgggggtcatggatgaggggggccccttccttccccagcccactcagggcacccctggcccgtcccgccccacctccagctgcttcatggtctcctccaagctgagcaggttctcctggatttcctgggtccgtgctgggctcagggggccgccccctgggaccccatccccatctcgaggaggccccgccccattgtcttcctccgccggaaacagaagctgcttcagggacagcactggccaggggcaaggaggggtggagtcaggagaccagggggctgggctgggatctgggatgggggattccaaaggggatgtgtaggggctggaggtgaaggtgggtgccaggcaaggctgagcagatggggttcggggatccaaagggaggtgaagaagtgaggctgggtttagggttgggacagggcaggaaggtactgaagacagagatgtgttcaggaagaggctaaatatagaatcaagcaagggatggtggctgcagaagagggacgtgggcacccaggacagtggtgcaggctgggtgggtttggagcatttgttttctggcagctgggcgtaaggaaatttttgacgtggagagccttgttctagttggaacagaggcactgtttgggctggtggccaccctggaggggcagagctgggctacctttccgaagggccgtggcagcgagctggccctcggggcctggtctgcagaagggcaggaggtcactgaggattctctcggtccgggctggattggggaacagagagggagctcagatcctgccgggcctcctgtggatgcctctcttcacccggcagccccaacctggcccctcacccagcatccctctggtctcaccatcagctggagacgtctctcggccaccattgccgttctcagagctgctgaggaggggttctcgggtgctgaggggaggaagtgctgggtgaccccacacccctggccctggggggccgcaggggcagggagacagagagctggaggtggggaggcagggaggtccggagacagagacagaggtcgaggccgggagacagggagacagagaggcccagacaatggaagacacagaggcctggagacaggagacagacggggcagtggtggggtcggcacatgcgcacacacacacacatgcatgcacatgctgtcacacgcatgcacacatatgcatacacacacaccatacacgcacacacatgcacacgcacacatgcatgcatacacacactatatatgcacgcacagtcacatacttgcgtacagacac

SEQ ID NO: 36668 - DNA, 879 bp, Artificial sequence
  DNA replication origin
atcgggggtgggagctggagggcggtgtcagggagacgcctcatacccagtgtgtgtacggagtgcctggggagtaacggttcaaacaaagaaatgaatgaatgaatgaatgaacaactggagggaggcgcagaggcacagacccaggatgtcaacgccagacagtcacagagagttccagacgccatgccaggccccaccccgccatcacacacacagatctcttcttagataatatatattaaaaaataaacctccaattcagggtataaaaacagagcgaaggcacttgggggtgggggtggaggggtggcccccacaggcaatactgagatggcccgggtcaccgtggtgccctccagaatggagccctgagtcccccaagcagagggcaggagggagagatggccgaggctcatgcggggccagtaaccccagctgggcccctcccaggcgtggcccacagctccctctcctcaggccctcggggtgtgagatgctgcggcagctgtgtgggtgggggtggtccctcacgtcctctcccccattcctctccttcttgcaaaaggcctgggggatgtaggagaagaggggagacggggagagatggagagagagacagggagagacagacacagagacaagacagggagagcagagagagaaggggaggtggggagaggcaggcgggcacagagacagagaaacagattatcagaaacagagacacagagatgagaaacacgaggtggagtggggagattcagaaaagacaaagagggagatggacagaaggggctgtagggatgcgagctctggagggggaccctcctttcaggacagcgccctggcccccaggtgccccactcaccttcctgg

SEQ ID NO: 36669 - DNA, 839 bp, Artificial sequence
  DNA replication origin
agggggcaatggattctgctgaggcagggaccagggtggctgcccgtctgcccttgatgcctggcccaaggcccaggaccagccctcagcacctcccaggtctgggcacattgctgccccagtctccttccccagccccagagtggggggggtctcacttccccctccacagaggacagagggaatgtgatggcctccggcctcctccccaggctccagtttgaggggggtccccgcctggccccactcccaaagtgcaatatggcgcccagcctgccccgcccgcccacccctgtgctatgccccaagtgtttgtgtggccgtgtctccaaaccccctgtgctggccccagtcctgacaccccccccatataggcccccctggggacagggagctcagagcaataaccccgcccccagcccccacccaggaggggcccccctccccaccagctccccatgatcccaacagtcacctccagagagtttactacagaaataaaagaacagagagtgagactcggggtgcccagtgctgagcatgggggatcgggggtgggagctggagggcggtgtcagggagacgcctcatacccagtgtgtgtacggagtgcctggggagtaacggttcaaacaaagaaatgaatgaatgaatgaatgaacaactggagggaggcgcagaggcacagacccaggatgtcaacgccagacagtcacagagagttccagacgccatgccaggccccaccccgccatcacacacacagatctcttcttagataatatatattaaaaaataaacctccaattcagggtataaaaacagagcgaaggcacttg

SEQ ID NO: 36670 - DNA, 1049 bp, Artificial sequence
  DNA replication origin
cccaagttctagtgctctgtgcaccatgcctgggacagcacacgcattaagaaaccccagatcccgccccagggctccccctgcacctccccaacaccaccactctccccacagttactactacaacaagcggattctccacaagaccaaagggaagaggttcacctacaagttcaacttcagcaaagtcgtgcttgtcaattacccgctgctggacatggcggcagctgccactggctccccactcttgctgacccccagtccctttgggggggccccagggccagatgctcctcccctcacccctgaggtgagtctgggtactggggtcctggaaccgaggcacttggtgcccactctggggaggggacagtctgagaagggcggcttctcccactccctctctagaccctgcaaaccctgttctctgccccacgcctgggagagccaggggcccggacacccctgttcacctccgagacagataaattgcgtctggacagccctttcccattcctgggctctggtaagagcctggaggttctggggtgctgggggcacagtgggagaagctgcaggcttgagggaagaggatgagaaaagacaagagaagagatggggaagggggcccagggccaggttgtagggtgtgtgtgtgtaaaacccagaaaaggatgtgatgtgagggaggggaaatgagggagacaggggctttcaggggtgcctaaggaatgggaagacaagtgggggagtgggaggagatggagttgggggaagctgtatgagggggtaagatgccatgtaggagggatgcggggagatggggtgggatatggcagggaggcagccccctttactggtccccaggcaggcaggtgccccagcctgacctacccctgtgccccccaggtgccaccagctattccaagccccctggcctgctgggtccttatggccgcgccttccctgagtacccctggaactttaacccgtacctcacgggccccttccccaagctgcctccctctctctaccccccgcatttctac

SEQ ID NO: 36671 - DNA, 1053 bp, Artificial sequence
  DNA replication origin
aggcacccctgaaagcccctgtctccctcatttcccctccctcacatcacatccttttctgggttttacacacacacaccctacaacctggccctgggcccccttccccatctcttctcttgtcttttctcatcctcttccctcaagcctgcagcttctcccactgtgcccccagcaccccagaacctccaggctcttaccagagcccaggaatgggaaagggctgtccagacgcaatttatctgtctcggaggtgaacaggggtgtccgggcccctggctctcccaggcgtggggcagagaacagggtttgcagggtctagagagggagtgggagaagccgcccttctcagactgtcccctccccagagtgggcaccaagtgcctcggttccaggaccccagtacccagactcacctcaggggtgaggggaggagcatctggccctggggcccccccaaagggactgggggtcagcaagagtggggagccagtggcagctgccgccatgtccagcagcgggtaattgacaagcacgactttgctgaagttgaacttgtaggtgaacctcttccctttggtcttgtggagaatccgcttgttgtagtagtaactgtggggagagtggtggtgttggggaggtgcagggggagccctggggcgggatctggggtttcttaatgcgtgtgctgtcccaggcatggtgcacagagcactagaacttggggaaactgaggctcacagaagtcccttaatagggatcacagggcaaggaagggatgaggcaggagcggggaccctgccctgcaagactccaaagcccaggtttaggggtccctcctcctcgcctcccttccactcacaagtagcgatggtggctactcacgcacagccctgtgccttgtgggatccagcaggaacctgccccaggatgcagagggggcaccagagggacagttgggggaaaaggacaaggtgggatccagccccaagcccttcctcaccgcagggcccggctcagcttgtcgtaattcatgtggggcttgcatttgcg

SEQ ID NO: 36672 - DNA, 1066 bp, Artificial sequence
  DNA replication origin
tgcctactgagtttgggggtcctctctctagctgtgcctgtgcctcataggtacaacatatttgagggtgtgcatttgaggacagatggagtatcgggttgggtgtcctcttgtcaccttggggtcctgtgggtgtgtctgtgatacagttgcctccccagtaggatgtgttctgggtgtggaatgggtcagagctggagtctggatccagccctgtcatgggaggtgagaaagacccaaaaatgaatggagataaaaattctccctcaaggagactgcctggagctccccggccttcaggccgggaggcacaagcacccacttttctacaccaggcagcctgggtgggaccctgcgcccccttgccttccacctgtgcagttctaaaccagagagggtaaggacctgcccgtaatcacacagcaagtggacacggcgatgctggtctcccctgccctggcgcacagcagtctcctctctcctgcactgctgccagctttttatggactcactctgccttctattttcatgcctgggtctggggtctctgaggagggggaaggggacagaggatgtggcataagagtgaacacagaagttggacccagggcttggggccttctgcatgggagatgagatttcggggtgcccagctcctgggggtatgtggacagtggagtactcccctctgcatgtgagacgtgatgctgagtgagccgggggtgtcagtgctgacatgtgggtgcctctgtgtgcaggtttgggaagttgctctactgacatgctgtcaccctgtgtgtctggggacatggatatcttggtgctgtgttcaccgtctccatcgtacagtgtgttctttgggcatttggggtcctgtgtgtgtcttgtcaggcatttgtgttgttagtaagtcccagtcttgagatgtgtaattctgtgttgtgatgggtgtgcactgtggggttgttgagatgacgtgaccttgagtcttgcgcagcctgtgtctgccatgtcagccttggtggcccccagcatgagtgtggcactccggtgtgcctgtgtccca

SEQ ID NO: 36673 - DNA, 1178 bp, Artificial sequence
  DNA replication origin
cctcccccaccccttcccccacccctcaggcttccccagtgagccgcatcccccttctctccgtgtctccacgtgtctcactctagtccgtgggtccttctctctcagtcttggtcagtcccccaaatcaaaccccttctgagaaacttggctaaaaacttcgcagccagattcccctgccccctgcgtgctggggggataggtgggtcttctgggagggtacggaagtgagtgaggggtgaggacggaggggcccgaggcccgggcatccctgccacgcacgtctcagcctgctcccacgcaggacctgcggggaaaagagagcagggactgggctggagggggcactaggccaggcacggatggacaggtagacagacggcactgcccagtcaggggtacgtgcaggcacgacccggccagaccgagacccaggaaagaggacagcttgcaaccggggttggtggacggtgaagctggtcagacaccatgctgatgtgcagcgggaggggtgtgtgtgtgtgtgagagacagacagagactctgtccttggttatttggggtctcatttcagtgtgtccctgtgtcacacttcagtgtttctagaaggggtcacactgggagaatgtgtctgcacagcctgtctttgtgtgagcttgtgtatttgcttgtacgtgcacatctgaggctacttgagtgtctctgggctgggcgtgtccgcattttgggatgggggcgtctgccagctctccgactgtgcctctgcctgagtggggtgaggagcctttgcctgtttcttgcggtctgtctcgggttgtgtggcgttccgcatggctgtcttggtgcatttggggctgtgggggggatgcatccctgggcctctgtgttgggggctgtgtctggttttcagcgtagggtccatgtgcacatgagtgaattctgggggtttgtctgtcacatgtgtgtgtctgcctactgagtttgggggtcctctctctagctgtgcctgtgcctcataggtacaacatatttgagggtgtgcatttgaggacagatggagtatcgggttgggtgtcctcttgtcaccttggggtcctgtgggtgtgtctgtgatacagttgcctccccagtaggatgtgttctgggtgtggaatgggtcagagctggagtctggatcc

SEQ ID NO: 36674 - DNA, 1065 bp, Artificial sequence
  DNA replication origin
gaggtggggtgtgagggtggcagtgaggggctgaagtgcctgaggggaggggtctcgggagcgcgagggcagcgtgtgtctgcggaggggtgtgagagggagtggattgcaagggtgtgtgtgtggaggggaggcgccataagagggggaaaggtgcggggagactggagtgaggaggggatggagtatcttaggggcgtaagatatctagggagagggagtgtctgagggagggggtctgacaggggaggcagatgtgaggggaaggggtgtctgaggagggaggcagatccaagtgacaggggtcttcagggtgagcagcaggtctagggtctgtggaggcctcctgcagggcgctgggggctgccctgtggggtagaggactggaggagggggtgctgggcctgcccccctgcagcccgtcctgggcggctgcgggtcagggctgcgcctgggctggaagagcccgcctgggggtcgtccgggtggggcgggtgtgggggcaagttatagaacaagataaatctggggcagccagagagagagacagagggagacccagagacgcagggaccgaccgacccgggaggtcaggcgggagagcggggacgggagacggcagcagagacggtgcggggcgcgagcggcgggcgggcgggcgggcgtgagagccagcgagtgtgagagcgtgagcgagtggcggggagcggggagggaggctgggagcggcgtagttagtgatggaggcaccgagtgaggaggaggctgcgggaggagaggctgggagggaaggaacggggtctcggggccgggaacggctggggacagagcggtgcctgcgggagggagtgggcaggagggattgcggggagagggtgtcaggctggggtggggacctgggagaggggaaggccccgggcagcgccccgctggctgacctgtgtctgtctctcctgcccaccccgtccccgtgtgtccctcccggcctctgcagggccggctccgccatggactgtagctgcgtctccgaccttctcttcgccccgcccgccctgccggctctct

SEQ ID NO: 36675 - DNA, 2743 bp, Artificial sequence
  DNA replication origin
gggctcatgcagtgtgtggtatgtgatggtgtgtgtgtggctgtgctggtgtgtgcatctgtgcgatgtgtgctgtgtgggacgtggtggtgtgcgtgcctgggttggtgtgtgggtctgtgtggttgtgcttggcagggagagaagggaggagggccctcgcctgcccagcgcctctgcacaccgcttcgctcacatgcgcacacacattcggtgccatggctgcgggcggtagagatggggggcgaagggggggtggaggaagcaaaataaaattaaaaattaaagcttgcctggagtacccatccgcaccacgccggccggcgggggggaggggggtgggggattgtggctgctccccatccacagccactggggctggggccgtttgtccatctgtccggccgtcctgccaggccctgtttggccctgcagccccaggccccgcaggccgcgctccctccatcagtcgatcagcgatcaatggggccaggggggcgccaggggcagggtgagatcaaagggaccccaagagacggacaccgggacagaaacagagacagagacatagagacatggagatggagacatggagacagagacacagagacagggagatggggcatggagacagagacagatgagacagagatgggggacatggggacaggacagggacttgaggaggaggagatatggagatgtggagacggagacaggggtgtggagaccctagacattaaaacagagccatgtggagacccagagacatggggacacagagacgtggggacacagaagtggagacgacgtgggaaccaagagacagggaggcatggagacccagagatgggagggacggacagacggacggggacagggcggcagaggcgatgggcaagggcgaggggtccaggtccctgtggggcctgacacaggacgaaggctgggcacagagactgcgagatggcagagacgcgtgtgagacacggcggggggagcgtgggagcagggcccggagcgccgatcccacggctcctcgttataacgtgtccggaggaggcggcggggagttgaaagcgtcgggaagagaaatcaaaaccaacacggaaatgagaggggccaatagggggtgggggcggggggaggaaggagggggaccctgagaggcaaagagagcgggaggtgggagagcgatgggtgggggagaggtgtgggggagcggggctgctggagagacgcgggacagggacacggtgggggcagagacaggagagacagagatgctggagggggagggagggagagacagagatagtggaagaggagggagagacagagacggagatggtggagggggagggagagacagagacagagatgatggaggggagggagagacagagatggtggagggggggagagacagagacggtggaaagggggggagacacggtggagggggagggagagacagagacggtggaaggggagggagagacagagacggtggaaggggagggagagacagagatggtggaaggggagggagagacagagatggtggaaggggagggagagacagagatggtggaaggggagggagagacagagatggtggaaagggagggagagacagagacagagatggtggaaggggagggagagacagagatggtggaaagggagggagagacggagacagagatggtggaaggggagggaaagacggatagcagagatggggagaaagtcatagggagacagagatggacacactgggaagatggagagacagatggagaagaagcaggggtgagagatggagaaacagggaagagactgaggggtggaggaggagatggagacgagagggagagggcagtgaggtggggagagagacccccttggtggaggagagagacagaaatggaagggagatggtggggggagacggaagggagaagagaccaagtgaccggagagacagagatggagagggagagataccgagacggggcagatggagaaagacggggagacaggtgtgggaacagagggggcctgggacaggggaggctccaggaggcagatgggaggtgggggcatctgaggttggggcctctgtggggagaccgggcgagtctgaggggacatggggtgtctgaaaagttttgtccagtgtccaggggtaggcggggctcacgggggaacacagtgtgggctgccagggtctgaggggtttctggctggggggcgcatgggagcagtggggagtatcagggtgtctaagaggagtgggtttttgagagcgtctggggggtctccaggaagaaggtgctccagaggtggggtgtgagggtggcagtgaggggctgaagtgcctgaggggaggggtctcgggagcgcgagggcagcgtgtgtctgcggaggggtgtgagagggagtggattgcaagggtgtgtgtgtggaggggaggcgccataagagggggaaaggtgcggggagactggagtgaggaggggatggagtatcttaggggcgtaagatatctagggagagggagtgtctgagggagggggtctgacaggggaggcagatgtgaggggaaggggtgtctgaggagggaggcagatccaagtgacaggggtcttcagggtgagcagcaggtctagggtctgtggaggcctcctgcagggcgctgggggctgccctgtggggtagaggactggaggagggggtg

SEQ ID NO: 36676 - DNA, 1826 bp, Artificial sequence
  DNA replication origin
ggagctggcttcgtgcacccagatgggacagggtgttgggggctcgtttgtgtggcaacagatgggtggggctggcagccgtcccatggctggggctgtgcatggtgtgtgtgtgcctactagtgggtgtcactgtgggtctctactgtgtgcacagatgtgtcctacatgggcgtgtggcgtaaggagagatatgtccccagattgtgcctgaacgtgtggccatgggtgggtgcagtcagggtgtgtgtgtgcgtgcgtgcgtgtgctttggggcatggtgtgtgcatgcgggggcggcggtggcagaagggtcttaggccgcgtctctctcctctttagacagagccccggagaagatatgaaatttaaaaaaaaaatcaattttcattccgattgtgcagattgtgttaaggggaggtggggatgggggggcctgggtgagggatgaaggggctggtggtgggggtgcgaggcccgaggcggctcccgaggcggccggcgcagcttagagaaatcaaaacaactggttaaaccccagcccaggggggcgtggtgatggggcgttaggagacagaggcagagagagatgacagagagctcagagacagagagggacagagacagagagagacagagagatgcacccagagagagagatgggggaaacagagacactcagagatggagatatttagaaagacaggcaggccaagatgagcagaaaagaccctctctgacagagacagacagagaccctcagtgacagagacagacagaaagatgcgccgacacccgaaggggctgagagagaccgagagacctgtgtctcgagaggcagtcacagaagcaggtctgagacaagggcacgtgtcacatatgtgcacacacacacacacacccatgcagagacatgcttgggaagttcacagatggagggacaggcagacagatggggatggtgggagcaggagtggcaggggccttgggttggggtcatctctgagtgcccacccctacccagtgtgtctgggtgtgtctgtgtgtacctctgcaggggccgctgtcggtcgtatgtttgggtccgtgatcttggtgtgtgtgtgtgattgtgactgtgtctgtgaatgggtgtgtgtgtggccgtgtgcgttggctgtctgggttggtgctggtgtgtgtatctctacggctccatgcgtgaccaagtgcatatgtatgcgctcgagggtcggtggtgcttggttgtgtgactgtgtgtctgtttctgtgtgctgttgtctcagtgtgcgattgtgtgcttgggaatctgggtttctgtatttgattgtgagcctcagtgtgtgattatgtgtttacacagtgtgtctaggatttgtgattttgtgtctttgtttctgtgtgagattgaattgatgtgtcatgtgtgtatttgtgtaaaactgtgtgtctgtttctgtgcatctgtgactatgctgatgtgtgtgtgtgtgactgtgacagtgttggtgtgtgactttactgacacatgcatctgtgtgatgtgggttgtgtgtggcagcagtggtatgcgttgctttgttggtgtgtgtgatgtgttgtgtgggacgtggtgctgtgtgtgactttgttgacatgtgggctcatgcagtgtgtggtatgtgatggtgtgtgtgtggctgtgctggtgtgtgcatctgtgcgatgtgtgctgtgtgggacgtggtggtgtgcgtgcctgggttggtgtgtgggtctgtgtggttgtgcttggcagggagagaagggaggagggccctcgcctgcccagcgcctctgcacaccgc

SEQ ID NO: 36677 - DNA, 756 bp, Artificial sequence
  DNA replication origin
tgtgtgtgtatgtggtgtgtggggctaggtgtgtctgtggtgtatgtggtgggtatgtgtgtggtgggggtgtgtatgtatggtgtgtttgtggtgtgtatatgtggtatgtgtggtgtatatgtggcgtatacatgtggggtatgtgtacaccccaggcacaaaggcacccccaaccagggtcaggccagagcatttgatgtgggcagtgtgggaatgggggtggcgtccgggatgggggggcatgcccatgcaggaaaccccacatcacccctgaaccccctcctctccaagacaggcacagggtctcctggtgcctgtcgagggccggcccctgagcctgctctgtgtacacatggacgtggctatagtctggacggacaggtgtgtgagcacacacacacacagtgtgtgaccgcggggagctggcttcgtgcacccagatgggacagggtgttgggggctcgtttgtgtggcaacagatgggtggggctggcagccgtcccatggctggggctgtgcatggtgtgtgtgtgcctactagtgggtgtcactgtgggtctctactgtgtgcacagatgtgtcctacatgggcgtgtggcgtaaggagagatatgtccccagattgtgcctgaacgtgtggccatgggtgggtgcagtcagggtgtgtgtgtgcgtgcgtgcgtgtgctttggggcatggtgtgtgcatgcgggggcggcggtggcagaagggtcttaggccgcgtctctctcc

SEQ ID NO: 36678 - DNA, 1712 bp, Artificial sequence
  DNA replication origin
gtggtgctcagctgcgtctggtgtgaccgtccaaagctctggagttgtgccatgtctggtgttttcacatggtgtggctgtgcagggtaggcctcagggacctggggcagttatctctgagggcaagatgaggaggctcagtcccagagaaacagggtggaaggaccaagtgagtgcgaccctgagaggaccccggcagctgggctggtgagtgtgggtgtgaaggacgcagctgaggaagagcccccaaaatcttgtgtgtcacagaccagctgtgtgtttgtgtggcgctgtgttggtgttcgggggttgctgttgtgtctctgagcttgtgggcttgtgtctgagtctgggttcagatgtggacgtgtgtgtgtgtgtgtgtgtgtgtacgcgtgcacgtgcacacgtgggtggtaatttgtaggagctgaatgtaccagcttgagtgttggttcataacaattgagtgatactgtgtgtccagccctaaagagcactgatgactgtttgtgtatgtttgattgtgtatgtttgtgtggttgcatgtttatgtgtggctgttggatggcgcatgtgtctgcaacttctgtgaacttgtgccgaagtctgtgtgtgaagctgtttctggtgtcaccctgtgtgcttctgtgtgttttctgtgggtctgtgtgttaaggatgactggttttgtgtgtgtccatgtggggattacaaggtgtggtattgagagtagtaagctgcgagtggtgtgtgagtgtggtgtgtggtatgtgggtgatgtgtgtggtatgtgtgttatgtgtggcatgtggtgtggtgtaatgtgtgtgggtgtgtgtatgcagtgttgtgtatgtggtgtgatgtatagtgtctgtggcatggtgtgtatgtgatgtgtgtggtgtatatgcggtgtgtgtgtgtgtggtgtgtggtgtgcatgtgtgtatggtgagtagtgtatgtggtgtgcatgtgtgtgtggtgtatgtgtgtaatgggtagtgtatgtggtgtgtgtggatatgtggtgtgtggtgtgtctgatgggtagtgtagcatgtgtggcgtatgtgagagtgatgtggtgtgtgtgtatggtgtgtatgcagtgtgtggtatgtgtgtggtagatgtatatgtggtgtgtgtatgtgtggggtggtgtgtggtgtgtacgtggtgtgtgtggtgtgtggcggatatgtggtgtgtgtggtgtgtctgtgatgggtagtgtatgtactgtgtgtggtgtatgtgagggttagtgatgtggtgtgtgtggtttgtctgtgatgggtagtgtatgtactgtgtgtggtgtatgtgagggttagtgatgtgtgtgtgtatggtgagtgtatggtgtgtgtgtgatgtgtgtggtgtgtgtgtgatgtgtgtgtggtgtgcgtggtgcgtgtgtggtgtgtaggtggtgcatgtgtggtgtatttatgtgtgtgtgtgatatgtgtgtggtgtgtgtgatatggtatgtgtatgtggtgtatgtgtggtgtgtgtggtatggtgtgtgtatggtgtatgtggtgtgtaccgtgtgtgtgtatgtggtgtgtggggctaggtgtgtctgtggtgtatgtggtgggtatgtgtgtggtgggggtgtgtatgtatggtgtgtttgtggtgtgtatatgtggtatgtgtggtgtatatgtggcgtatacatgtgg

SEQ ID NO: 36679 - DNA, 1096 bp, Artificial sequence
  DNA replication origin
ggacagaatggcagacagggcagtggattcccaggctggggaaggtgtgtctgctaccctcgcttgagaggtggggaggctccaggccagagacagagaggcctgtgggtggggcaggggtggagacccacacccccctccctctgtctctccctctctgtctctgtctctgcctccggccctgtgtgtgtgtctctgcatctctgtctctctccctgagtctcagtctccgcacgatgtccctggggctgcggacagcagcgctccgaatggtgtcagttgaggggtggcgagggagcgtccccggggaggtgggagccgcagtgccacgcaccccgcctaccaaacagctctgggggaggggagagggagggtggaggcgccaccgtgaggcgaggcggagggaggtctggctgctccccaacctcactcgtggaccccgcctcccctcagagacccagagagatggaggaactggaggttggggtggggggcacagagaaggggagacatgcagggaggaagagagaccgagggggtggagcgtgatacatggagaactgagaggaagcaggagtgagacacggagggagatggagggggataggcgggacatggggaaccccaccaggggaaggcacagagaaggaaagagacacagaggacaaggacaggtcccacagaaacaggaagcagactgggagccacatgcacacgcagagagaagagagagacagagacagagagacaggcagggggagatccgaggtggggaaacacggcagaaggagcgaaccagagaggctgagacaaaagtagattagaaagctggaggtcacgggagagcgagggccgcaccggagaccctgggttgggaggaaggagagaagagggcagagatgcggaaaattgagggattagggcagaggcaggagagggatgcaggcgagcccggccctggaggtggagtggaaggctcaggtgtaggccgggtggcgggcagacctaaggtgtggattcctcgtcctccgccccacctcgcccttcttcagtcctaggaggttggtgtcccctgggagtccgacccatcccagct

SEQ ID NO: 36680 - DNA, 911 bp, Artificial sequence
  DNA replication origin
ggtggagtggaaggctcaggtgtaggccgggtggcgggcagacctaaggtgtggattcctcgtcctccgccccacctcgcccttcttcagtcctaggaggttggtgtcccctgggagtccgacccatcccagcttcaaagcccaccctacccctcctcctcctcatctccaccaggccccaccccacccagaccccagctccatcctctacctctcctcctggtcctcatccccaactcccaccccttccccacccttgccttcattctacctccacccccagcctcactccacatcgggccccacccctctatcagagtgacagaaggcagggaaatgactgttatttggtgatgctggaggggcgggggcagagagctgaagcggggtgtggtgtacaccagaaccagctactcagggagcccagagacccagagtccttctagacggcaaccaccaagggccagggctcaggcatcccgacagagcccggggcttggcaccaagagtgtactgaggaaattatgttgaggtggaatccagattaaactgtgctcagcagggaatcagggagacagagatagcagatcaaagggacagaaagcaggagatcaagggacagaaatgaggagggcaaagagacagggtcagagggctggggaaatagggatggagccgagagctagaggggcagatggatgggactgagatgcgggagcacacagggacagggaatcggatgacaaggaattgaggccaaaaatggggagaagtgggtgatccagggttagagaaaaggaggaacagagaaatggggtcaaagacccaggagggcaaacatgaggggcagagaactgggaaccggagagagactccgagggacgagggaccagaggcagtggggcaggcct

SEQ ID NO: 36681 - DNA, 1938 bp, Artificial sequence
  DNA replication origin
gctagggcaaggggcggggcctgggtgggctgaggctggagctgggtgccgggccaccagggatcccacaagggccggggtccagccgggctgggggggactcagggctccaggggcatcaggcgcggtgctaattcagcgccatcgatcagatgggatgagagcaataaattattgtgacaagatgcaatcctggcccgcgcactgccgccgaggcggatcgatccctgtccccagccccacaccgggtcccatgcccaggcctgggctggaggggatgcctctgcccacctctccctccattctccaccctgcacacactcactcccactgacagccaggtgaagggaatgtgaggggcagcctagggaagaggcgggagggggctgggggaacccacagagggaagttcagcgccccctctgacccaggccttttgcttccctcagcaccccatcctcaccaccacctgtgaggtaggaactgccatgatggatgcccatttcacagatgtggaaactgaggttctgacaggaaaagtaacttggccaaagtcccacagggatgaggtgagcctggacttgaatgcaggtcagtatgactctaggcccccgatatttgtactgtcagaggacagagcaagggccagagacagaaaaggaggaaagagacaagacaaggagacagacacagagtccaggatatggagaaactgagagagagtcagagagctgtaaagaccctgtatggagaaaaacagacacagacaaagacaaccagagaaatacagagaacaaagagagactgggagacagacagacagagacaaaaagacagggtgagacagaggagtcgagaggccagaaaccaagagagacagagagactcagaattaagacaggcagacatggacagggacaaggagacaggggcaggtggtggcaaaggtggaaatggagaaaggaaatgaaagtgagggtgggtggaaaggaaaggccagcatgcagggaggggcggtgtgggaggcaggagtgtgtctggggaggcaggggtgtgctgggagggggctgtgctgggggggtgtctggggaggcggaggtgtgctgggacggggctgtgctgggggtgtgtctggggaggtgggggtggatctggggaggcgggggtgtgttgggagggagctgtgctgggggggtgtctggggaggcaggggtgtgctgggagggggctgtgctggggggtggtaggggtgcgctgggaggggctgtgctgggggtgtgtgtggggaggtaggggtatgctgggagggggctgtgctggggggaggtaggggtgcgctgggagggggctgtgctgggggtgtgtctggggaggtgggggtgctctgggagggggctgtgctggccccaaacagcttgtgggggaggtgggggtgagcatgtggaatgacagccttagccccaggagtcaatgaagggtgagaaagtgagcctggagagtaggggagatggggttgggaggtaatggagaagcaagtgtcaccaaagtccctaggtggataggtgtgtctgtggagggaggaggtcacctgaggggcagatgagggaggtaaggacacctggatggctaggagggcagtctctgaagtcagacagccttgacttgactcaaatctctaacatctacctgtttctgggacctcaaagaaactctctggactcagtttccttctctgtaaaatggggacaagaggcaagtacgtgcctcatgagggtcctgtgaggacaaatgagacaatgggtgtgaagaacttggtgtctgtcacagagatggatggtggtcttagtaatcgggagctgtcatcaccatcaccctcacctttatcctcattctcgttgtcgccatcagtatatatggggagggtaggtgttatgtggt

SEQ ID NO: 36682 - DNA, 2241 bp, Artificial sequence
  DNA replication origin
ggcagtctctgaagtcagacagccttgacttgactcaaatctctaacatctacctgtttctgggacctcaaagaaactctctggactcagtttccttctctgtaaaatggggacaagaggcaagtacgtgcctcatgagggtcctgtgaggacaaatgagacaatgggtgtgaagaacttggtgtctgtcacagagatggatggtggtcttagtaatcgggagctgtcatcaccatcaccctcacctttatcctcattctcgttgtcgccatcagtatatatggggagggtaggtgttatgtggtggaacaggtggggcacacattacaagcacctgctactcagagaatgatacctggaccaggtgtttctgatgcacattgaagtcagataacctcggacttaagatgctgtgcagtgcggggagcaggtgtgggggtggctgggaacaggcgacacatgtgtctaacacatgctacaggtgttatgcacgtggaggaaggcgctcctcgaggagagagctggtcagagacacgtgctaggaaaggggaccggtgtttctggagagaagcaggttggagacaggtgtgagagatctgaaggtttcttcctaaaggtgtggtggtgacaagctgcagggacaggtatcaaaagtgaacatagcagagaatggggcagaggtgtgcagtgggttcccaatgcttgcaaaaggtgcaaagggactccggtcacatggatgtttggggggaggaaaaggagagaggtggctggagtgtggggaaccaggtgcatgtctgtgggacagggctgttttcaggaggtgacccctagacccagctgaagagatgtgaagcaaagagagattaagtgggggtatgcatagtgggtgtcgaagcctcggtatctgtttgctgattaaatgatttgaatgtgttaccagggcagaggattccctgggataaacaggtgaggaatggcaggtgcagggggttactggtgtgaccttgtgcagcaagagagagagagaaacatgggaaattaggtatgtgggaaagaagagaagtggatagagagtacctgagggacaggtgtgggaaaacaggtatacaggtgacgcagatacctgtggccaaggacagactcctgccccaaacgtgtgtgtgtaaagtaatgttgtgtatagtgagagacagtgagagaccaggagaggcaaagacagtgcaagaaggagtgagacacaggtgagcaagtgtacaagggaccgggaaactctgaggggacaagagcttggaggaaggcataatggcagggaaagccatgaggagggtactagtgtgtggattggtgatcaggtggtgcttggggttaggacacaggtggggaaggtgcttctgttgtctgtgatgagtaacccgaaatgacaagtaggaaagacaggtacgggggaatccttggaagtcagtgtaccttggaagtcaggtacaggtagagagggatgtgagcgacaggtgtgctcttaggtgacctgtgtgtggccagctcttctggaagggcaggtgttggggtggttaaggaggtgcaacactgtcacggaggaggatgggtgagggccaggaggctggggactggtgggggcaggccttacctgaggggacaggttagcaggttgcatgtgtgagtgcttgtgtgcaacagaaggaatgtgtgtgtgagtgtgtgcatgtgtggtgactcggtactgcttgagaggaggaagaggtgaagaaatacgaatgtgtgaggaacaggtgagtttgcagctttaggggacaggtgggatggctcacgtacaggtaggaaggggccagtgtgacatgaaatgagataaaatgcagggattccagtggaaggggcagattttagagaacaggtattacctggaggggcaggtaagaggggacgtatgctccccgagagaccagacatcttaagggcaggtgtgagggggacaagtgttacctggaggggcaggtgagaggaaataggtgttacctccagggcagatgaagggaacaggtatggaggacaggtgttgcgtgcaggcaggtatgaggagatagatgttacctggaagtccagatttggggagttgaagggggaacatggatgtgacaggtgcattgatagacaggtgtgaaaggttagttacctgaggccacaggtgggtgcagtgtgactctgccagatggtctgccacctcga

SEQ ID NO: 36683 - DNA, 1534 bp, Artificial sequence
  DNA replication origin
cccgcccgcgctcgctgtgctgagctccagcccggagctccgtcctcagctctccccgtctctgctctctttgcgcgtctatctcgctgtctctctccctctctgcatctccccgtctctgctcgtctccccgtctctgtctccttggctgtctctccgtctctgagtctctcctgtcccggcgtctcagagactccctctcctcgtcctctgggtctctgcctccccggggctccgggcatctccccccaccccgcccctcgccccggtgccccctccccaggacgccgcgggggccatggctgcgggatccgaactttaaacacttctccccggaccggagcggatgcgaaaagcccagaaagtgagtgagcgccgcggccggcgcaggggcggggagggggcggggattcccgccccaggagggggcgggcgcgggggtggtcccgggaggcctgagaagctgggcctccgagccggtggaggggtaggcggatggggtcatccgccccggctgtaaggggcaggtggggcagcgcccaactctgggaaggtgggaggcgggtagcgctagaggtgcggcctcgggacaggggtgcgagatttgggggcggggagggagagcgagtgagagccacggagatggggtctgcaagagactggactgaaaatctgggaacgggggttggtggccgacctgaaggtggatttggatgtttggggctgaggagtctggatatttggggctagattctgagtggggtttagaggtcagggctgagggcttgcatatttgggacctaggggctcaaagccaagagactggacacttggggcggaagatctagatatctgaggttgggagctgactggggctgggagtcaggactgggggtgtggatatctgggactggggatcagcataggagtttggacttgagggggccagaagtctggatttggagttggagttcaaagctaagggtctgcgaatttggatctggatatctggggtctggatatttggtatgaggggtcacagggtctgtgggaaggacatttgggccaattctggggtctgcacacttcggggcaaggagtacaggcctggccctgaccttcgtggggccggggccctctgggacaccctttctatcattccaccactgtcgcagggccctgctgggccacttctgttatctctcccctggctgggtctctcctcactgtctctctgtctctgtctctcacagcatctctgtgtccacctctaactctcccaggatctgtctctctatctctgtctctcacagcatctctctcttcctttttgggtccaactcttaagactatctctctctaaatctctgtgcttatctctccctgtgtctcttcctttctcggcatctatctctctctcttcctttctcggcatctctttctatctctctctctctgcctctttctgtctcttactgtctctctgtctctgtctctcccagcatctctgtctctgtctccccctcgctggttt

SEQ ID NO: 36684 - DNA, 1074 bp, Artificial sequence
  DNA replication origin
tttgcagatgaggaaacttgaggctcggggatgtttagcgacttgcctgagtgagtggtgagcgggagtgaggctgaaccttctctgtcaggcagggctgaagttctcttctagcctctcagcacctcggtctcagcacctgggcgctggtggggttggtgagatccgacagagctgtcctggcccctgaatatccacctggggactgctgtcttgccgtgagacctattttcccctctaggggtagaagcctccaggggctgcccaggtgagagctgcctttccccagagaaggtggtgtgggacttggcggggcggagcctgacctgggaatgggagagaaaagtcgggggtggtgggttggggagtggaagcgggagagagggcagggtgaggggcaaggggcgaggggcaaggggcaagggagggaataggagggtagacagtgagggtgagggtcaggttgggccaggaggtccggccggccgggagctgaactgtgggtctgacccgccctgaggctggtcgatattgacttgttatttcaatgggagcagatctggctgggcagggccctttcctgtcactgtaggtgtgcgtgtgtgtgcctgtgaccttgtgggagtgtgaaggggagtgtcagtgtgccagccctgggttctgcctatgtgttagtgagggcttgtgtgtccaggctgtgtgttgggagtggagtgtggctgtgtgtgcatctggttgtctttgtgtccagtttgtgggtcagtggatcagggagtggctgtgggttggggaaggtgtggtgtgcaggctgtgtttgtgcatatgtttctctgtgtgtgcctgaatgtctccgtgtaccggttgtgtttccacttcctgtattacggtccgcatgtgtgtgctgcgtgtatagatggcaggtctgtgtgtgtgtgtctgtgtctgtctctctgtagggttgtgtgtccctgagtgtgtgtttgcactgtcttactgtatccatatgtccctctgtccgtgtatctcctatccaggctgcgtgtgtgcgggtccgtgttccagtcccggtccagg

SEQ ID NO: 36685 - DNA, 1160 bp, Artificial sequence
  DNA replication origin
atggggcccaaatcccagcatgtcaatagtcatgacaaggaccatttaatgggatgtgcctggcagtggcctaaactctatacacagattaactcaagcaagtctcacggcacaactctaagaggtagatgctgttataagcgtcacccccacttttactgatgaggaaactgaggcacagaatcacttgccggctgtcacacagctagttagtattggaaggggacctggagccaagcagcctggccgaggggtctgtgttcttaaccaccaggccaccctgccctccccgctgcccccatattagactaggagcttgcgcagacaagcgccctgcctgcacggctctgcgtcctcccagagcagggcccaccctaccactgtgtcctctggctcagtatgaccgcccaccatccccgatccctcggggcttgaggctccctgtgggcagggcctgtgcctgattcatctctgggtccctgctgagggcaaagcctagcccacagggcctggggaggaggcagggagggagggagaggggaggagggaggcagggagaggacgttaaagagagcagggagggaggtgaggagaaagcaggcagagaggggctggggagaaggacggggagtccccggggagccgggcctggagctgggccaagccacactgctgtggatgttggggagagcagagggaatgggggagtccagtcagctgggagaggggtgcaaacaaacagcatggccacccctccctcaccccacccctatcccgggtgggagaagatggaccgagatgggcctggaaggtgaaggatgaaggcccgggacgaacaagatgcaaggagggcagacagacacaggacagatgggagccaggagagcacggggaggcagccagccagggtgtgtgcctgggggcgggaattcagacagacagacaagggtgagggaaaggatgggcgagggtgttggaagactggagacagatgtgggggctggtccaggaaaaggacagacaaacttagggcttggggctggggcaggagggacagacagacagaaggggagagtggccaggaaggaggggaggatggacacagggcgtctgcagaattggtgggcagatggacggagggacgggccgtgcagtgcagc

SEQ ID NO: 36686 - DNA, 1725 bp, Artificial sequence
  DNA replication origin
gctgggagaggggtgcaaacaaacagcatggccacccctccctcaccccacccctatcccgggtgggagaagatggaccgagatgggcctggaaggtgaaggatgaaggcccgggacgaacaagatgcaaggagggcagacagacacaggacagatgggagccaggagagcacggggaggcagccagccagggtgtgtgcctgggggcgggaattcagacagacagacaagggtgagggaaaggatgggcgagggtgttggaagactggagacagatgtgggggctggtccaggaaaaggacagacaaacttagggcttggggctggggcaggagggacagacagacagaaggggagagtggccaggaaggaggggaggatggacacagggcgtctgcagaattggtgggcagatggacggagggacgggccgtgcagtgcagccggcggggccagggccaggccgagggcgcgaggtggcagccggcccggggaggcggaggctgagcgagcggtggtgtttgtggagctgtcggctgcggtggaattatgaaaaatagcaggcatcggagccggccttcagcttcgattaggggagatgggacatgacaggtgcgatcaatacgcagccgttctataaagtgtcaagtaatgaatcaatttcgactaaattttccatttttcagaggccgttctccgagagaagaatatcctcttttgtaaagatattattatcgatttcggcggcaatttgacatcaggggtagttaattccactcagaataaaattgaaaacacttgagagagaaaagagagaggcgaagagtgagacagagagggaaagagggggagggagggaggggctgggagagagagatggatggacagagagacagagacagggagacaggaacagacagtgagagagacgagagagagaagagagatgcagagatgcagagacatgaagagaaacttggagactgcaaagcctagagttatagagagacacagggacattcagagagactcagagagcagagacaccctaagaaagggcgacagagagacaaattgagagtggctcagagagaaaatcccagatgttactaactggctacagagaagcaaagaaatggacaaagacaattcagagaaaaagacagatggaggactgggcagcagaaactgatgacacagacagacagacagacacacagaagtgagaggctgagaaacaggaacttagggaactggggagaggggctgaagggtgtgcggagcatgagcaacagagaaaagcgagcctggcagaggagaggccagagaggcagagtggaggggtggggggcagagggtaggagaggggccaagaggctgagaacctgccaggaagtggggaggaaggggcaagggtgccaggagaagggcagaggctgagggtttggggctgagggccaatctggagatgagagtttggggagatcctcctgtcctatctacgctgtccccaaagtcagttgccctgaatgggcagaagctcagcgtgtgtgtgtgtgtgtgtgtgtgtgtgtgtgtccctgagatctggtgtgcatgtgtgttggctggtgtctgtgtgtccttgcatgttgactgaatcccatatcccattagacgtttgtgtttcctggacacacacacaatctgtttgtgtccctgtccgtgtgcctgcacatgctgtgg

SEQ ID NO: 36687 - DNA, 1500 bp, Artificial sequence
  DNA replication origin
ttggctggtgtctgtgtgtccttgcatgttgactgaatcccatatcccattagacgtttgtgtttcctggacacacacacaatctgtttgtgtccctgtccgtgtgcctgcacatgctgtgggtccctggtctcccagtcccttgggtctcagctgcaggcaatggtgacaacatttctggttagtgcctgtcagtccccagctgaaatctccatttatccctgagcaggtcacaggctgcctgggaggaagagagaggaggcgggtagaggataggacccctgggttctgagagagatgacccaggacctgtactcctgggtctgagggaggatggtctcagatcctgggctcctgggtctgagggaggaggggctggggattggacccactgggtctgagggaggaggagctgggagcctgactcctgggtctgagacaggagggcctgggggcctggactcctgggtctgagggaggagggcctggggacctggactcctgggtctgaggaaggaggctgctgggggccgggactcctgggtgtgagggaggaggggctgggggcctagactcctgggtctgagggaggagggactgggggcctggactgctgggtctgagagaggaggggctgggagcctggattcctgggtctgagggaggagggagtggggctgggacaccccatggacaggatagtcagcagacaagtaagtaacagggctggctgggaagcccccgagccatcaccagcctcccctccagaaaagcctgtgcctgctgccccctagtggacatggagattaggccagaccagggacagggaactgacaggtcaaggagggaagccagaggcgctgacccaagtgggagcagagacaggggagagggagagagagaggagggaagagagaaggaggagatgggtggacagacaggcggacacagacagggacaaagatgaatagagaagtgggctggggtcaggccgacaggattgaggactcgaccttggtggagaagaaagagagaccggggagtgagttcagggctagaactggagatggacagggaaagatggaggacacagggggtctgcagcagacggcaggcagagggtgagggtgacagagagactcttggacagacagaggctgggctggtgagacctgggtacagacagtacaagagacaggacaggagccatatggacagatggacagtgacagagggatgggagctaggtctaaaggagggagaaaacccagagaacaggcagcgaagaggacaggtggacagggacaagggcaggcactcatggagagacagacggacatcggagggaaccgcagacacacccagaagaaagaggtggacagagagagagaaagagagacaggtggtcacacacagagagacagacggatgcggagaaatcagggctccccaagccaagtggacacccggagatgaagcagagagcggtatgtgggggga

SEQ ID NO: 36688 - DNA, 1329 bp, Artificial sequence
  DNA replication origin
caccccctcccaggctccccccccacccggcgggctgcccggcggaggcgacagattgagcgatgagacgcattacgcacttaatccgcctgattgaatgttttgctttcgcccaaattgaaacattaaacaacacgggacgagaagaggcggccgcaaatcactcatgaaagattcatcttctcccaggcagccgccaccgcccgcctccaaggctgcccgccccagccgggaagcctcagggtgggggtgggggtggggcagcacccctgctcactctggggagccccagccctagtggtctggggaagttcttcccactgtctcgcctcaatcctacaggtggtctcagagactagaaccctggatccctcggccttccctggacagcatgaccttagccctgtccctgtccctctctggctggggaatccttgccctctctggggtccatctctccagttaccttcctggaccagcctggacctttgggacatggaaggggctgctcagagttgggggatgaggtctgggagcctcctccccgtgcagtggggctttctgggttcttgatccaagagtgggggtggtgtctgggggctgagtcagagggaggtggccgctgtgtcaggatcagtgcaaatgggcagacagggagtgtgttccctgccacttgggagctcagtgtgtctctgtgtctgcctgcatatatgactgtgtatcttctgtctcgctctgcccatgttggtgtaacttgctttgcgattgtccctgtgtcactacactcaggtctcggtgaccctgcgtgtgacggtaactctgtgggcttgtgggtatgtctgtctgcctgtctggcactttctgtatgtgcgtcctgtgggcagcatttttgtgtggtgtgtgtctgtatcagtgtgacttttggggtgtggctgtgtgtgactccctgtgtgtaagtctgtggatgactgtgtgccgtgtctgtctgtctgtctgtgtgttgcctgctctgggtctgtctgcaggtctgtgttgaactatttctgtgtctgggtctcttttctgcatccgcatgtccctgtgtctctttcagcctctgtctctgtctctgcctgagggggcacctgctggggccactagaggaaggcctgggtgcggagaagctggggagagaggaggcaagaaagacggagagacaggacagcggtgacgcctgagaaccagggagcagggagcaagcgcgagggagctgggggggccgttgtgggcgccacggccggagtgggtgatcaatattcgatttaggttttaattccggggcttttggag

SEQ ID NO: 36689 - DNA, 1439 bp, Artificial sequence
  DNA replication origin
ctgggtctgagggaggagacgcggggggcctggactcctgggtctgagggaggaggggctgggggcctggactcctgggtctgagggaggagaggctggggcctggactcctgggtctgagggaggaggggctgggggcctggactcctgggtctgagggaggagggcttggggcctggactcctgggtctgagggaggagaggctggggcctggactcatgagactgagggaggaggctgctgggggcctggactcctgggtctgagggaggagaggctggggcctggactcatgagactgagggaggaggctgctgggggcctggactcctgggtctgagggaggaggctgctgggggcctggactcctgggtctgggagaggaaggtctggggggcctggactcctgggtctgaggaaggaagggctggggggcctggactcctgggtctgagggaggaggggctgggggcctggactcctgggtctgagggaggaggggctgggggcctggactcctgggtctgagggaggaggggctgggggcctggactcctgggtctgagggaggagaggctgggggcatggactcctgggtctgagggaggagaggctggggcctgggctcatgagactgagggaggaggctgctgggggcctggactcctgggtctgagggaggaggctgcaggggtgcctggactcctgggtctgagggaagagactgctgggggcttggattcgtgagcctaatggaggaggggctgggagcctggactcgtaggtcttgggggaagaggaagctggggttttagactcctgggtctgagggaggaggggctggggcctgaaatctggggcctgggggaaggaggaggctgggagcctccactcctgggctctaggctgggagcttggctctgggggggctgggttgggaggcccctgattgatttctgtttaccggctgtccccgcaggcggaagagcgaatcgcgccccatccatcaacaggctcgcagcctccctaataaaaacattttactcctaaatgatctcgaactaattaactcaaagtgttaattaaagtttgcgcagacagcattgtcatcagggagggcggtggatccatcttcctgagaaagagacagggtttgggggggctcccatccccctcactgctgagccctgtccactgctctgccctgtggcctccaacctcccctcgggggctctccgcgtctgtccccactctcaagctcttctctgagctcttcactggtccgtctctctcatctctcactgttagcccgtctgagtttctgtgtctccgtctcttgcctctcttgccagaatgctgtgtccccagggttcccacctccggttcatgtggtgcttttatgtgtctatgcgttggggttatgtgtgtggaccacgta

SEQ ID NO: 36690 - DNA, 782 bp, Artificial sequence
  DNA replication origin
ctggactcctgagtctgagggaggagaggctggggcctggactcatgagactgagggaggaggctgctgggggcctggactcctgggtctgagggaggaggctgctgggggcctggactcctgggtctgagggaggaggctgcaggggtgcctggactcctgggtctgggagaggaaggtctggggggcctggactcctgggtctgaggaaggaagggctgggggcctggactcctgggtctgagggaggaggggctgggggcctggactcctgggtctgagggaggaggggctgggggcctggactcctgggtctgagggaggaggggctgggggcctggactcctgggtctgagggaggagacgcggggggcctggactcctgggtctgagggaggaggggctgggggcctggactcctgggtctgagggaggagaggctggggcctggactcctgggtctgagggaggaggggctgggggcctggactcctgggtctgagggaggagggcttggggcctggactcctgggtctgagggaggagaggctggggcctggactcatgagactgagggaggaggctgctgggggcctggactcctgggtctgagggaggagaggctggggcctggactcatgagactgagggaggaggctgctgggggcctggactcctgggtctgagggaggaggctgctgggggcctggactcctgggtctgggagaggaaggtctggggggcctggactcctgggtctgaggaaggaagggctggggggc

SEQ ID NO: 36691 - DNA, 839 bp, Artificial sequence
  DNA replication origin
ccgcccccctctcccacccgcgccggcctcttggacacagcactagggtcggattcacagttgggagctccctcggctgcgggtcagaccctcccctccactccctctcgaggaccctgactccgcggccccggaactgtcttctcgccgcccctcggcgtctctgcgcgcctgtctcatcgggtctcggccgagagacgtctcgggcgtccccttcccccgcggtgacggcttcatcaggtgtccgcgcgggcgggggcagggcgaggcctggcgggcgcggggagcccgggggcggaggggcgggggttccggggccgataaatcttcatcaggcggcggcgggggggccattaggcgctaatgggaagatggaggggcctgtcggccgcgcgggccgggcctcatttgtcctgcttcccgctccattggccgctgcccccgccccgcccctcccccgccgccgcgcgccccatttccgcttcaaacctttggaggggacgtgggggggatcccgggggctgctgaaaaagaggcgactggaaggcagggacagattcaggaaaggggagggggctcagggcatggaggggaagggggttcggtcgcagagccagtttagaacgtgggtggctcagctagaacgcaggcggagtgggcaggagaacgtggcggggagggcttggaacgcggagaacgtgaatagaagtccccgaaggaaaagagaaagcgggagggggccgtcggggacgcgagaggggacttggaagatgggagtggcggggactggaacaaggcgggagtgggtgcaggattggaattaggggagggggtcggat

SEQ ID NO: 36692 - DNA, 1146 bp, Artificial sequence
  DNA replication origin
ggagcttgcagtgagccgagatcacaccactgcactccagcctgggtgacagagcaagactctgtctcaaaaataaatatataaataaataaatagccaggcgtggtggtgggcacctgtagtcccagctgctcaggaggctgaggcaggacaatggcgtgaacccaggaggtggagcttgcagtgagctgagatcgcaccactgcactccagcctgggcgacagggagactccgtctcaaaaaaaaaaaaaaaaaagttggttgtccacatgcataggttagggtgaccaatgattgggtctggatgcaaggtttaggggtgatgctacgtagagacctacatgactagtgttaaggtgacttgctggggcatttcggaggttccttggtttagtggaaactgagtctggagagccagatgtctagtttgggggagccttagggtgggtgaggcccagatcctcattttgacttgagtctgaggatccagttgtcacatttggggttgcccagtttaagggtgtttgaatttcagtcccattttctagtttgtatgtgttgagaatggggtcacatgctgagtgggtgatagcagctggggcctacttttgtagatcgtgggtggtgtatcttggggtcctgatgaggtttaatgaggaaagtctagtttaggtgtgccaaatttggggccccaacgtctaatttgggggtgacagtatggggaatacatgcctagtttggggggggcttgtggttactgatgcttattttggggtgactgagctaaggtccatttcccttattctctgagtgtcttgggctggaggacttgtttgggggtgaatggagctgggccccagaatcctcattttgggctgtctggagctaggctgggttatcaccttctgtttgtgagtcggggtagccattcgctccgcctggggtgatccaggcccatgtctaggtctgatcccaggggtcttcagtccatgtgagggcttcagagggagggtaggggttcgaaggcctggtttgtgggtatctagatgcctcctttgggggaatctcagtctagggtcctgaggtcctagggatctagtcccaggggctgggggagccaaccccagtgctaccccccaaggcgg

SEQ ID NO: 36693 - DNA, 1186 bp, Artificial sequence
  DNA replication origin
ctggccttattttatttttttagacagagtctcattctatcgcccaggctggagtgcagtggtgcgatcctgggtcactgcaacctccacctcctgggttcaagcgattctcctgcctcagcttctcaagtagctggaattacaggcacctgccacaacgcccggctaattttgtacttttagcagagatgaggtttcaccatgttgatctggctggtctaaaacttctgacctcaagtgacctgcccccctcggcctcccaaagtgctgagattacaggcttaagccaccacacccggcctattttatttcattttatttttgagacagggtcttactctgttgcccaagcaggagtgaggtagcgcaatcatggctcactgtggccttgacctccccgggctcaagtcccacctaggcctcctgggacgtgccaccatgcccagctaatttattttgttttgtgttgttttgatagagacagggtcccactatgttgcctaggctgatctcgaactcctgggctcatccacttgccaatttctggtgacagtttaggtcttgttgtctatcttgatgtgccagacattactcatccatgtcatgtttggggtgacagagactactggtcttgctttctagtttggggtgacagtgactggggtccttttgtccagtttgagctgacagtgattggggttcagttgtccatttgggggaggcagagactgggatcagtggtctagtttggggtgatgagaccagaagtcaaggcccggccttggggtaacagagatggagatacagtttcccagttctgggtggcagagacttcctagtttgggggacagagacttggggcatagttgtgcagctggagggatgaggctgaggggtgcctgttttgacttggggcggcaggagctgtcatttcagtcctctagtctggggcgcagagtctagggtgctggtcccttctaaacatggctgagcctgagagtgctgatgcctgaatgttcctgggacaactgagtcaagggtttcctgtactcaggtgtggggtctctgagtgagtgtggccagcggtgtggagctttgtgtgaaggtcactgaagctaggagtctgggtatttggaatggaggtgtcaagaggtcagggccccaggactcaggacccacttgagga

SEQ ID NO: 36694 - DNA, 1092 bp, Artificial sequence
  DNA replication origin
ccttggcttggggtggaagacctggggtgaccagttggctagtttgaggctgcagccattataggtctggttgcctagttggggtaacagactgggatctggttggatagtatgggatgctggagatcggggttccagatgtccagtttgggacaacagaagtgggggttagcctgggaaacagcaagaccctgtctcaataaaaaataaaaataaatcaaccaggcctggtggcgcgtgcctgtagtcccggctacttggggaaactgaggtgggaggattacatgagcacaggaggtccaggctgcagtgagttatgatcgcaccactgcactccagcctgggtgaaagaatgagactcttgtcttgaaaaaaaaaaaaaaaaaagaaacagaagtgggggtttctttgcctagattggggtggcagaatcagggggttctggtttctaattttgtgggataaagactgggatcccaggacctagcctggggcacagagactgggaagttgaatttggggtgacaggggctaggaggttagctgcctagtttgtaatgacagatattagggatcagttgtccagggtgagatgaaatgataggggttccagggtctagtttagggtgacatagaatggaagttagcttgtctcatttggcatgagtgggaccaggggtctggccgtctagtttaggagacacactggatggagtctggtcgagcagatgaagatgaatgggactgtgggcccaggtctctagtctgaggtcacattttatgcaacgtgttgctcaacgtggtgtgacagaccctagaagcctagaagtacaattgtcccgtttggggtggcagtgtctgggggttggttgtctagggctgtgagacagagactgggtcccagggtgatgtattcagggtaacagagatggagcatttggttttatagttttgtggggagaaaacagagaccagggaacatgtgacctcatagactctggaggtccagttgcctagttttgtgggacagaggttaggatccctgggtatatttggggtgacagagactggggtctggttgtctagtgttga

SEQ ID NO: 36695 - DNA, 946 bp, Artificial sequence
  DNA replication origin
ttcaccgtgttagccaggatggtctcgatctcctgacctcatgatctgcccgcctcggcctcccaaagtgctgggattacaggtgtgagccaccacgcccagcccagttctctttaagtgacagattagggacttgcatctggttggtgtgacaggaaccagttgttggaggtggcagagactaatgttcttgtctaggttggggtgatgggggctgagattctaaggtctgttttggggtgatagactgggttctgattgtctagtttctcgtggcgaagactgggacttctggcacctccttaggggtattggatgtagagtcttggctcttttgaggtgacactgggttgagactgaaatttaaggtttggggtaccagactgagggtttgatgaccagtttagagcaacagtaactggggatctggtgaactccactgtggtatctgatactggaggtctggttatctcactttggtgccagaggctaccagtccaattatctgggtggggttacagaggccacaagactggccaactaattttggctaaagaccaaagccctgggggtcagggccttggcttggggtggaagacctggggtgaccagttggggggatcagcgccttggcttggggtggaagacctggggtgaccagttggggggatcagggccttggcttggggtggaagacctggggtgaccagttggctagtttgaggctgcagccattataggtctggttgcctagttggggtaacagactgggatctggttggatagtatgggatgctggagatcggggttccagatgtccagtttgggacaacagaagtgggggttagcctgggaaacagcaagaccctgtctcaataaaaaataaaaataaatcaaccaggcctggtggcgcgtgcctgtagtcccggctacttggggaaactga

SEQ ID NO: 36696 - DNA, 761 bp, Artificial sequence
  DNA replication origin
caaaaagaaggcgggggcggggggtgtgcggattaaatagaaaattgcaagttagcccgggcatgatggctcatgcctgtaatcctagcactttgggaggctgaggtgagtggatcacctgaggtcaggagttcgagatcagcctagtcaacatggcgaaaccctgtctctactaaaaatacaaaaattagcccagcatggtggtgcatacctgtaatcccagctactcgggaggctgaggcaggagaatcgcttgaacctggggggcggaggttgcagtgatccaaggtcgcgccactgcactgcaatctgggcaacagagggaggctccctctaaaaaaaaaaaaaagaaagaggaaaggaaaggagaggaaggggaaaagggaagggaaaaataaaaggaaaagaggggaggagaggggaaggggaggggaggggaaggggaggggaggggaacggggacaggggaggggcggggcggggcagagagggttatccctctgaggttgtgtggcggatgggctggagggagtgagacgagggacgatgatcctagctggggaagatggggcagggaagtggggtggagaggcgagacagggaagagagattcaggaggttgaaggacaggtcttggtggctgacttgcgtgggaggtgagtggaaggaagcaggaagacccccaggcttcaggcttcccaaaagatgggaagaccagggggagcctgggtgtcttgacgccacacaggagtgcacttcca

SEQ ID NO: 36697 - DNA, 881 bp, Artificial sequence
  DNA replication origin
tcagcttcggcagcagggtcctgcggggggtggggccgggtcagtggtggaccgggatggagccccagacccccgcaaaagaaggggactaagggtgcctggactccctcccgggaccccagattcctgtacagcaggcagggaggggactaggggcccagactccagggtcccattagaggagaccggggccaacacttctgcggctcggggctgggactccaggctctcgagggaggagggaggagggggccgggggcccggactcccgggtctctggtccgagggcctagagccagctcgctcacgtgccgctcagcccttccgcctcggcatctttctgctggtccttctgcgctgccatgtctgcgtcgtgaggggtagagctgctgtaaccagcccggtaccctgaagaccccgccggccccgcccgacgccggccccacccagcggagtcgacgtggcgcagccccggagcagctggggactgtagttctgccgccgagtattgtgggagttgtagtcctgacggtgactaagaggatgggcgctatgatggcggtctgactcgcaaaacaccttgggagatataatcccagaaagtgacggcgcgcgcctctgggtattataggagttgtagtttcaggagggtgcatgtgggctgtcaggagcgagggcgttatgggaactctaacggcagaagcgggcgttgtgtactctcccagggaaggcacaatggggaccgtgcagagctgtccttctgactctagagggcataaaaaaacacctggagggcttgctaaaacagattcctgggccctagcccagatgttttcattcagcaagtctggggtggagcccataatttccatttctgagtt

SEQ ID NO: 36698 - DNA, 776 bp, Artificial sequence
  DNA replication origin
tccagcctgggcgacagaatgagaccctgtctcagaaaaaaacaaaacaaaacaaaacagaaaacaccaaaggaggagtgcaatagcacaattagccccgagcaggaataggggagcagcatctgaattcaaagggccaaagcagcagaggtagcccttggaagaacctccaccgaaagacagagcttggggaatagaattgggacagagctccagctgcctctttggtggcaggccgtaggagattcaggatggacttttgttatgagagctgttgggtttccttataggaactgaatgaaagcaatttcattccaaaacccactggtctttgttctgagcagagaacatagaggcagaggcctggaggtgtcgaacagcgcaggccatggcaagagacggggagggggacagtggagtctgaggggcaaggacattgcaggaggggtcctaggagtgggagggtggggggggactttgaataagggaatttcaggagatgggacctggacacaggggtaatgtgggagaggagggcctgaggcagagacatcatgagatggtgagaaatggggtccctgagggaaggggcctttggcagatgggccctgaattaggggggtagggggttggtgtgctgggagatgagggggcacctgagaagattgtgagtcccaggccaggtgtggctcacgcctgtaatctcagcactttgggaggccaagatgggcggatcacttaaggccaggagttcgagaccagcctgcccaacatgg

SEQ ID NO: 36699 - DNA, 893 bp, Artificial sequence
  DNA replication origin
gtcctactcctataggagaggctcccagtcaccatcccacgtctgcttccctccctctcccctgttctgattccacaatgccatcgcctggtgaattcaagctgctctgactttcgtggagttgaaaactccgtgattagatggctctgagattccgtgacttccaagccagtgccaggctaagttcctgcagtttcgagagtcgcctggcagcgcgccccaacagaggggatgctgtcccagccgcagtccccgtctggaaagcaggcacaacacacacaccgcttctctctccccactgatatatttgataattgtccagaaccagagatggcatcagccggggggctgaaggggagtaaaaaagagcccagggaggtggctggggcgggaggaatggatagaggggtgaggagagggagagaaactgacacagaaaagagagaggagagaggtttggggcaggggagagaagccagccagagtgggggcggcaggagatagtggagggggtgggggccaaggtggggccacaggaagagagggctcctccccccagaatacaaaattggggggactgacaggggcggtcctgggcctgggggacggggaagagatgggcgatgtggtggggctgaggtcagtagtaggtttccttctccacccaacctggagagacaaagaaggaaagaaagagacagagtaagagatggagagagacaggcaaggcgagccgcccagcagagagagggacagagagggagagagacaaggaaaccacacagacagagacccgtgagaagacagagtgggtgcccggagagatgggaagagagagaagagtgggaaccaggtggcagagccatccagcagggcgaggggagcctgggacc

SEQ ID NO: 36700 - DNA, 1431 bp, Artificial sequence
  DNA replication origin
tagtggagggggtgggggccaaggtggggccacaggaagagagggctcctccccccagaatacaaaattggggggactgacaggggcggtcctgggcctgggggacggggaagagatgggcgatgtggtggggctgaggtcagtagtaggtttccttctccacccaacctggagagacaaagaaggaaagaaagagacagagtaagagatggagagagacaggcaaggcgagccgcccagcagagagagggacagagagggagagagacaaggaaaccacacagacagagacccgtgagaagacagagtgggtgcccggagagatgggaagagagagaagagtgggaaccaggtggcagagccatccagcagggcgaggggagcctgggaccagctgcctgagaccctgctgccccccgcccccctcggctgccttgccgagctccctcaccccctgggttcctgcgcaggatgagtttgcggatttcgtcgtagacgaagatgaggaaactgtaggggaaggcacagaaccaccagctgggcctgcagaggggagagcaggagggcttgagtgcggggccctaacgagaggcagagtttcaggggactggaggggacgcagaggggcagtctcccaggatccttcgtgctcacaggtggagggtgccctgggcggggctggggcctggggtcttcggagtaatccgtggtgggagcagcctatgggggaggctcgggggcatcagaatggggactgcagtggggacaccaggggaggtggggcctgaggttcaggctgagtctaagggaaggctccatggcaggcgctggtgtgggcagggctgggggcagcggggcactcacttgagagggtacatgcgcagggccacgtccatgccggggcagtaggacaggaaggcagccagggccgtctcctcaaacagcccgaagatcaggatcttgttcctggaggcacagaagggcagggctgggcccagagagcacccaccctgcacctgccaccccgcagagacagggggaggcacagtgcagacacccagagacagcagcacagacacagagacagagaggcagagacatagggagagacagagatggggagacatgccccgacagagagagacaaagatagaggcagagcgatggtgacacagaaagagacaaaagacagggacagacacagagacagggacagacacagagacagacagggacagacagagagacagacacagggacagacacagagacagggacagaaacagacacagagacagggacagacacagagaggcactggtataaaaagaaaaggccaggggcacctccaccacacacacagaggctgagagagaatctaggacacacaggaccccttgagagaaaatcagtgcagtggcaaaacccaaa

SEQ ID NO: 36701 - DNA, 869 bp, Artificial sequence
  DNA replication origin
ctcttcccagggatgccaaggcctgcgtgatccacggcaccgacctcaaggacttcacctccgagcaaatcgacgagatcctgcagaatcacaccgagatcgtcttcgcccgcacatccccccagcagaagctcatcattgtggagggctgtcagagacaggtgggctgcgctcccgcagaggaggggacggggccttgactcctgggtcctcactgaggccggggcctggtttcctgggtctgagggaggaggggctgggggtctggacccctgggtctgagagaggagggtctgggggcctggactcctgggtctgagggaggagggggctggggacctggacccttgggtctgagggagggggcctggacttctgggtatgagggaagaggggataggggcctgaactcctgggtctgagggaggagggggtgggggcctggacccttgggtctgagggaggaggggctgggggcctggacccctgggtctgagggaggagggtctgggggcctggactgctgagtctgagggagaaggaggctgggggcctggacctctgggtctgagggaggagggtctgggggtctggacccctgggtctgagggaggaaggtctggaggcctgaactcctaggtctgaggggaagaggaggttggggacctgaacttctaggtctgaaggaggagggggctggggtcctgggcttctggatctgagggaggggactctggggactggcctctgggtgtcatccttaccctctctccctccagggtgcaattgtggctgtgaccggggatggtgtgaacgactcccccgctctgaagaaggccgacattggggtggccatgggcatcgctggc

SEQ ID NO: 36702 - DNA, 1398 bp, Artificial sequence
  DNA replication origin
tctgtcctccaggaacctggccatgcccagcctctgttaaggacgctccatgggcccaacacatggaagatcccagagagaggcagagacagagatagaggaaggtaccagagggagacagtgagagagacagagacagagagacatagacagagatagagaggcagattccagagacagagagaggagatctcagagagacagaaatagagaataagatcccagagagaaagtgagagaaagagacagagagagagaggaagatcccagagacagacagcgaaagagagaggaagatcctacaaaaagagacagatatatatatatatatatatggacagagagagagagaaagagagagagagattgaggagagcccagagagagacagtgggagaaagagagacagagaggaaaattccaggatgaggtagtaagagagagaaagagaatgagagatatatggggaaggagggggacggaagatttgagagagacagagagagggagagagagaaagagaatgagagatatatggggaaggagggggacggaagatttgagagagacagagagagggagagagagaaagagaatgagagatatatggggaaggagggggacggaagatttgagagagacagagagagggagagagagagagagaaagagaaagagaggagatcttagtgatagtgagagagaaagagagattcagagatagagaggagatcccagagagagagagtgggagagagacagagataggcagatcccagagagagatattagagagacagagagagagacagagagaggttgaaacaggaaaagagacaggtagggagagatgtgagcatcccagaggagacagcttgagagatgaagatagagacacaatgacagagagagacagaccgaaagacggaaaaagacagagacagaaagtactgatccttgagacgccaactcagagggaaataagaacccagagagacagaaactcagccagacctggggagacacagccaagagatggagacagacatcatgcaaggcagagagacaaagaaccagagatcagagagagacaaaatcatagaaagacacatgcagagagacccagagactgggatcaggatagagaatgacagagacaacataaagagatcagagcgatagagagagagagagagctatcaagagagagaaacagccttgcaaagacagagatacagagatggagagataaagagacaggagacagagagatgatgaaacaaagcaataagaccaagagccaaaaacagacctggagatacacatcaagggagacagacagaggagaaagagatggagatacacgtggagacatagaaaagacagatacgaggccgg

SEQ ID NO: 36703 - DNA, 784 bp, Artificial sequence
  DNA replication origin
ctgtctatgtctctctgtctctgtctctctcactgtctccctctggtaccttcctctatctctgtctctgcctctctctgggatcttccatgtgttgggcccatggagcgtccttaacagaggctgggcatggccaggttcctggaggacagagcaggagagttagaggcagaagccctagtcctggcttgaactgcgcatggtgtgagtccctgaagttccagtttgggagcctgggcggatggggagggcagtgtccgaggctggtgggaggggtggggcgaggctgggtgctgcaggggccgctgacaggtcccgcaggcccagggccaagctgggatcggaggctcagcgcggctcagcgctaatctcctcgtgaccttgtagagggcctgagctgcctgctgtctgcccccagacccagaggctgagtcggagggtgggggtgtgcagggaggggcagcagcctggagatctgggagcctcaagaaggggtgcagggggtgggagggaggcttggccccacgccagccctgcagcagcactgcgtctcagatgcggaggcacagaggcttgggggacggggagaccatctttcctactgccctacagtgccggggtggtctcagctttgcccgatggggtagacccaggatggagagacatggagagatggagagatgtggagctacaaaggcctggggtcaagtcctgtgcaggaggccaggagaggggtgagatgggggtcaggagagagagagggagaaaatcagctgcccaccca

SEQ ID NO: 36704 - DNA, 2230 bp, Artificial sequence
  DNA replication origin
acagctgcagtaccaggggcggggccgcgggccgtccgtcagcacggcggcgcccctgattggccagcgccgcccccctcccgcggacgcgggcatatgaggaggcggaggcggcggccgccgcagcctctgtgcggtgggaccaacggacggacggacggacgcgcgcacctaccgaggcgcgggcgctgcagaggctcccagcccaagcctgagcctgagcccgccccgaggtccccgccccgcccgcctggctctctcgccgcggagccgccaagatgggggtaggtgctgagccggctgggcgccgcttccgtgtgacattgtggggccggtgacattgggtgtgcgcggggggcgggggcaccgggacccctgcgctccggggccaggcctgcgagacccggggagccggctgacccagccaatccatgtggtcgtggggccgcagggggcggcggggggtctgtggcgcacgttggcatggctttgtgtgcggagatccgcgaggttgtgggccagccctcagcatctccgcctgaccttgtgcggttgcatgtgcacagttgcatgtgcgtatgagagctgctggctctgtcaggccctggcagcgagtgtgtgggccccgtggtgtctgaaagtctgcgatcgcgtctgggtgtgtctgtgagagctcgtgttagtgcgtctggggttattgaggcccccctgcttccctggcagggtgcggataggtccacgttgtgggatggacaccagatgacctctctttctccttccaggcctggatggggggactccgcagtgtgtgtgtgtgtgtgtgtgtgtgtgtgtgtgtgtgtgtgtgtgtgtgcaggctccgcagtgtcgcagcctggggctgcagtgtgtgtgtgtgcagcccctcatgtaggggagcaggcatgggaggctgggaggaggagaggaacaggagagccacggtggggagactgagtgcacagctgagggtgtgcgtgtgcaactgtgtagtggggagcgtgcatgcctggctgtgtccttgcctctgtgtccgtgtgtccttgtctgtctgtgagtctctccagcagatgccgcctccctccctggctgaccacctgacccttgctgcagccctggattcctccctgtgtgtctggggcggggctgaagggagggggaatcaggagaggagggggtgggtgggggtaggtgggatgaagagggcgggagaggccagtggagggagaataggagggctggggagaaagatggcggataaaggctgatgggcccagggatggaggtgggggatggggctgcagatctgtggggtggggcagggtgggccggggggctgggaaggaggattgggttggggcaggactaggggagagaagggagaaaggggtagtcagtgatggctgtcaggtaagtgggatggagggagggaagctgtggatggattgggagaagactgatgctaaaagccctagagaaggaagttagagggaggtggtcttaggaaacggagtggggacgagaggagaaatgaaggcagcttagacatgggaaggaaagacagagacacatggaaagacagagatgctctgaaagagacagagaaagagacatggacatagagacaaagagacagagacaagcagagagacatggctgagacacatggagagacattgagagagaaaatgagaaactgaggctcagaggaagagacacaaggacagatatttcctatctagcggcaaccacagtcagcctgagggacaggaagaggaggcagagggcaaagggggaggtcaagggagggatggtcagagatgtgggccaggtcccctgcgagggggaagggaggccggcccaggcgcagaggctgcgggagctggcaccagatcagggagaggcggacagcatggaaaatggcaaggagctgcagaggcggccacagcgagacaggcatggtccccacccttggaggtgctcccaccccgcagcgcgcccatctgggcctcctgccttgactgggaaagcctcagctgtgcactccaacagatgggagcctgctccccaagggggtctggctgtgtcaagggcaagcaggagccaaggccagggccagggtgagccaggagtcccagggtcccggtccctcctccctcagaccaggagtccaggccccagcccctcctccctcagatccaggagtccaggc

SEQ ID NO: 36705 - DNA, 1530 bp, Artificial sequence
  DNA replication origin
ctgcaggcccaacctcctttgctgcagaagcagctccctgttaccatggcaacaaaggacagcgagaaagatggggacgggtcagaggacaggattgggatggggctctgggcactggggaaagcctccattcactctctggccttgtctctgtccatatgctgtggctctgaatctctgtgtttctgtgcctctctctggccttcagcctttcacacatttccctgcaccaggtcctcgaccttcacccacccaccctcatacaccaagctcactccctgtcccttgcctgcgtcccccacatctcctatcccataggtggagaggatacccacattctgagaaaactacaaggtcaaatgctctctgtctctctctctctctcttccccttctaccatccccagggagagtctggggtgttcctcatagaacaaagtggtgttggagtgagtggggaggcctcaacttcttgggctccagtggggtggctgatggggtgttgtgtgtcggcagcaggcctggggtgtgggtgccggctgtgcatctgtgtgtgtacatatactgtgacgagctctgtgtgtcatgtgggtgagggcgttggggtgtgtttggaggtgcaacaaagatgtctgcgatagtgctgcaataacgtgatgtgtgtatgtgtgggaggtgtgtgggtgtcgcgtgacttgtgtttgaattattgtgctatgtgtaagtgtgtgcacctttttgtctgtcattcacagttagcattggcaactttgcactgtgggccgttgctcatgcccaaacacactggggagcagtgtgtgtgaggatgtgtgcgacatcgtgggatcatgcaacgatgtccacaaaggctgatgtagtgtgtctggaggcagtgtgaggcctgtgcgtgtgtgatggtgctgagtgcaggtgtgtgttggtttatgggttgcacgatgtgggtttctatgtgagatggtgggaggtcaggtgtggtagagtgtgtgatgtgtgagtctgcgattttctgagtgtcggtgttagtccgcacagcactttgtggctgtgattatgagtctcttgtggtgtgatgggtgtgtaaggtgtgtgccctatgtgtgtttcactctatgtttgagactctgtgtgtggtggggtggtgttgtgtgtgtgagggtacatgctggcctatggtggaatatgagtgcaaccctgtggtgtgtgcgtgtccccagcatctgggctatcagtgtgatggtcctgtgtaactgtgacgctgggcattttctgggcctcctggggccatcctccaccgtgttgtgtctcccgtgtaccctgtgtggttgtggctcattggatagctcaggcgtagtgggggggcacccacagtgagggaatctcagggctcctcccgccagcacccctcctcaattgcaaggcctttcttgctctcttgtgttcccttccaacttcccctcctgcagggccctctccctgaacagcactaccccccgccgtctccagggtccct

SEQ ID NO: 36706 - DNA, 1063 bp, Artificial sequence
  DNA replication origin
acccgtccccatctttctcgctgtcctttgttgccatggtaacagggagctgcttctgcagcaaaggaggttgggcctgcagactgggctgttgccatggagactgggaaagggggaggagccacatcttttaacccagatgcctcacccccagacgccccctccccaactctgccctcttcctaggggagggagagcctatcaacatatcctcctttccttctcttgacaccttggcctagaggcatgggcctggaccatggagaatgggactggggagatggggaagcctggggaggtgggggaggcctggattccaggagattctaggctctgtctgctcttgctctccagctgggccgggggaggccttgagcccttcccatcccacctcagacacaagctcacgtcccccctcatgcactctctcctcaggcacgagcctgatgagactgatgactgtgcatcgtgctcctggtgaggctctgcagaagtagggggggcggtgagaaggaaagacctgggaaggtcacagggataaaggggaataggggagctagatgtgagaggcggaaggagagacacagagggagaaacaggcagcccagaaccagagagaggcggatacaaacagattgaaaaagacagacagagattggcagatgcagagatgagaacacggagacagagcaacggaagagttcagtgaaggtgacagagacagagagacgtagacagccaggcagagacaggcttggtaaaccagggagactcagagataaaggccagggggagactgagcagaaacctggtaggggaccggggactcagaaatgggggagaccccagagggaattggcctcgaggcattgggacagagaagggggagaaaccagaaatgtctgtaatcatgttctagtcacctcgacaaagagtccgacccaagggcagagacattgattggagtgtgtaagagacgtggagatagagatgcgagacaacagagagaggctggtgcctgcccccacacctgtccgaggggcacgcaaccagggtctgagac

SEQ ID NO: 36707 - DNA, 869 bp, Artificial sequence
  DNA replication origin
tctctccaccctcagccctgcctacaggctgcaggccagcccgggtcccagcagctggcccctctccactgaccttctctcaggacagagggaggctgcgacagagaccctgagacagatggagagatgcagggatctggagacgcggagacaccggaagcggagacacagaaagacagaaaacagatggggctgggggaggggagggccagtgagctgttgagtgtggccgtgcctggggtggcgagtgtgtgcctgggccggggtgattcagtgacgttgtgatcgtgtgtgcacgcatctgcgaggccatcttcaactgtctgtggctgtgatcccgtgtttctgttgaaaatgtacctccccaacccccaagagaggaagtgaggaatcccagtagactggggggtgggtgggcgggcaggggtgggagaggctgaagggctgatggcgcaggagaaaggtgggtccgccttctgtccccgccctccctgccccgccggaggtttctgtggaaactgcagctgaggaaggacgagtgaaggtcacacagcaagagccaaaacgaggccgagcagaaagggagagatggagggatggcgagagacagagatggggagagacaacgaagggggcagagtgggcgggagggggatggggagagagagctagaggacacagagccggcgagacagggagagaggctgggtgaggtgagagaagactggagaaagaatagagggctgagaccagaggtgaagcgggagggtaagatacacccggagttggggtgagagacaggaagccataaaaaactaaatggaacctggaggggactggaacggaaaggaaagcctgactggaaaggt

SEQ ID NO: 36708 - DNA, 841 bp, Artificial sequence
  DNA replication origin
gctggggacttcgggggcggctctgggaagcggaaagcagtcagcggagaggaccccattctgggactgctcaggctccccaagacttgacgcagccccccacgcttctggaggtggggagggcctctggacagatgggtgtcccctggtgcccctccactcttctcttcctctcttttttggggggagaaacctcggaatttctatgagacctcccccagggagggggtcagttgggcccccatccctccccttgccacatcgcagcccctgttggaataaaaaaaagaacaaaaccccagaactggggataccgtctctcatttcctgggggtgtgagggctttggaggcttgggtccccggggcacctgctgagaatcagagtgagcctcgatggttacttccatgctctctccaccctcagccctgcctacaggctgcaggccagcccgggtcccagcagctggcccctctccactgaccttctctcaggacagagggaggctgcgacagagaccctgagacagatggagagatgcagggatctggagacgcggagacaccggaagcggagacacagaaagacagaaaacagatggggctgggggaggggagggccagtgagctgttgagtgtggccgtgcctggggtggcgagtgtgtgcctgggccggggtgattcagtgacgttgtgatcgtgtgtgcacgcatctgcgaggccatcttcaactgtctgtggctgtgatcccgtgtttctgttgaaaatgtacctccccaacccccaagagaggaagtgaggaatcccagtagactggggggtgggtgggcgggcaggggtggg

SEQ ID NO: 36709 - DNA, 917 bp, Artificial sequence
  DNA replication origin
cgcgcacgggggcccgcagcgcctcctggacgacccggggccccccagcggagcccgacccgccgcccccaccccctgcacccacgtgcgcgtctgccaggagtgccggcgcatccaggcgctgcgggcctcgggggccggcgcgcctccgcgtggcctgggcgtccccgccgaagccaccagcccgccccggccgcggcctggccccgccggcccccgggagctggcggagcacgagtgaccacgggcggggctgtgcgggcgcccggactgaccgaagggacggggcccgccccaggccccagcagtctccgctcccgcagcgggcgcgggacaggacttgtgcgccggcgccccggacgccgcgattttgcctttggttccccgcgaagtccgaggcctggctctggagcccgcctgcgccccccagtggactcgcgagagggtgccgcgggcgagaagggcgcaggaaccgaggactccaggggctggggacttcgggggcggctctgggaagcggaaagcagtcagcggagaggaccccattctgggactgctcaggctccccaagacttgacgcagccccccacgcttctggaggtggggagggcctctggacagatgggtgtcccctggtgcccctccactcttctcttcctctcttttttggggggagaaacctcggaatttctatgagacctcccccagggagggggtcagttgggcccccatccctccccttgccacatcgcagcccctgttggaataaaaaaaagaacaaaaccccagaactggggataccgtctctcatttcctgggggtgtgagggctttggaggcttgggtccccggggcacctgctgagaatcagagtgagcctcgatggttacttccatgctctctccaccctcagccctg

SEQ ID NO: 36710 - DNA, 1561 bp, Artificial sequence
  DNA replication origin
gccagctcccgggggccggcggggccaggccgcggccggggcgggctggtggcttcggcggggacgcccaggccacgcggaggcgcgccggcccccgaggcccgcagcgcctggatgcgccggcactcctggcagacgcgcacgtgggtgcagggggtgggggcggcgggtcgggctccgctggggggccccgggtcgtccaggaggcgctgcgggcccccgtgcgcgctgcccgcatccccgcccgcgccggccgagtagagcttgccgttgctgaggcgcatctcgcggaccgcgcgcagtgacagcagggcccggctcgggccgcccgggcgtcggcgccggcgggaacgcgacgtcttgcggcaagaaacggcgtggcgcagctcctgcagcatctcctggcacaccgacacctgggggtggcgcgggcggtcaccgtcccggcgcagtccgcctcccgcctcccccagcccctctccacatcccactcctcctcctcctttcctcgcccgggtctttcttccttctgccctcgcttcccttcccacttctcttccctttatctcccccgtgttttctgcctcccctctccacctctccccacttatcttcaatgtctccattctactctgcgtttgttcctgaatctgcccttcaccttccacctaagctcctctctttcctctggtcttttcactgtctctaaattttctccagttcttccttcctgatttcccatcttctgcccctcatccatgcgttcattattgcaaggcatatttacctgtggcctgctgtgtgcccggcactgttctgagcactggggatatggcagagaaggaaacagacagaagtcccagccctcgtggaggttatgctcaagtgtgcagagacagaagataacagacatgtatgtagtgtgttaggcgtggtgagtgctttggaaagaaagaaaatcgggaagaggcctaaggtgtatgggtagggagtgacgatgaattctgagacaggacagtcaaggaagacctcactgagagaaggatccttaaataaagacagggtgagccactggagacctgggaagccagcctgctggacagataaccgggcagggccgaaatgcccaggtgggagtgacttggcacgtctgaggcactgcaagcaggtcagcatggctggaggggggcgtgcacagggaagacagaaaaatgaggtcaaaggagcagtggcggccagctctggtaaggcccataaaccactggaaggatttttggctttcattctgaaaatcagaatgagagtcagacgggaatcactggggagctttaggtagaggagtgctgtgttttcataggatcactctgtgttgagaacagattgtagggaggccaaggcaagagcagggagctcatggaggaagctatgacaataacccgggcaggagatagggatggctggaccagagcgacctgagaaaggtctggattctggatatattctgaaggtggagccaataggatctgctaagagatcagatacggggcatggaagagagaga

SEQ ID NO: 36711 - DNA, 828 bp, Artificial sequence
  DNA replication origin
gtgaggagaggctgcagggaagaccctgggcacgtggtagaggcgggggaaggccgtggtgagggcacagtttggggtttggggcggtcagggctgcagggcccgatggctggtccagcccctcgtgtgcctgcccaggctccccgttccgggatgagatcacactggccatcctgcagcttcaggagaacaaccggctggagatcctgaagcgcaagtggtgggaggggggccggtgccccaaggaggaggaccatcgagctaaaggtcagttcccgcgtatggtgtccccttcccatagccccctcccagcccccttcccacacagccccaactccctttgccccccaactcccttcgccctccaggtttgggcatggagaacattggtggcatttttatcgtgctcatctgtggcctcatcattgctgtcttcgtggcggtcatggaattcatatggtccacacggaggtcagctgagtccgaggaggtgaggaggctgggggtgggggtgggcaggaacagggacccccaggggctgaggtgcgtgaagattgtggcattgggagccatacctggagggtggtggggatcgcgagaagggggcagaggaatgcaggaggtggggaagtaagagagctgatggggccagagaatcagcgcgtgaggaagaacaggagggaaagtaggcacagggagcaatgaggatgcagggagaggaggtgagggacaggatgtggggagccacagaggcagaaaagcaagaagaaataagaagagaaacagggccaagtgcagtggctcacacctgtaatcccagcactttgg

SEQ ID NO: 36712 - DNA, 728 bp, Artificial sequence
  DNA replication origin
agtgtatcactttcgtcattcagaaacacttgcctcaggtgggatacctgtcccacaggatcatcataagacctgaataaacccagggtctggcacacagttggtgcctggtagatattaatcactttcatctgcccgtgtctctggttctgtggtagttggtcgggaagtatcttagtcaatgaagaaataagtatagaatagggtgtgtggggtgttgaagcccaaggatggcttaagggcaggatgtgaggttggggaggagaggtggtccagggagaggtgtggatggggattcgtctggtgtccaactgcatgccaagtcccgcactggatgcagacgaaagatgataaacacatagccatataatacagtgttaggtggtgacagctgctccaaagtaaattaaagggaagacactgacagggagtggggcgcttggtgccattttaaataaagtcatcagaatagactccctggggagccagcatgtgggcagagacctggatgaagtgcggagagggacattccaggcagaggcaaaggtcctaagacaggactgtgtgtgatgaatttggggagcagccaggaggctgatgaggctggagctgagagccgtgggggtgagggtgtctgagagtggccgaggggaggagcttgcaacaggaagccatggagagtcctgagcacaggaaaggtatggcctctgactcttcctaacactgtc

SEQ ID NO: 36713 - DNA, 873 bp, Artificial sequence
  DNA replication origin
caggaatcccagcccccactggcctatgcgctgtgccagccaatgcatccctccacctcacggtgggagctaggactgggctcagggcagcgccactcccaggcccccatctagggccactcaccaggatggttgtgaccaccagggtcttgttggccagtgtctgcgacaggttgatgtccagggtggtggcattcatggccagggtgcggttagagtaccacaccccaatctagggggcagagagggtgctgtcagctcaggccctgcctgaggtcatggcagcctctgggcccgcccccaccctcaccccagcagggctctggcgtcaccctgggtctgctcacctcacggtggccctgccgggacttttctaggatgcgcagggtgtagttggttctctgccctttgctgttgaactcgacccgcccggtcagcccatcatactctacctggcagggtggggaggtggggcagagggagagtgcaggggcccagagatgggcagggaaggcccaacgtggtgagacatccacagagaaaggcacagacagaccggggtggaggggacaagagagagaagaggaagatcacagtcaaaagagcaagataacatgcaaggaagcaagaggagatgggacaaaaggcatgaagagggcaagactcagaaagagagagagagagtaacccagataggcagcaacagccaggagtggacaggggaggcagtgggtacggtgggaagagcagggagggcagagggccacagggtggtcacagtgagcgctcccacctgaggtggccgtgtcctgcctcctccacccatccccgctcgggctcaccatgcgcaggtagttcatgaggctggtcccg

SEQ ID NO: 36714 - DNA, 1160 bp, Artificial sequence
  DNA replication origin
ccggcatcttcctcccctcctcatggggacgcagctgccgcggcccccactcgccacctgcagggagaccccccagaccaaggggagattactatgtggtgggatggaaccccttggaggcctgctggatggggtggtcacagaagccttggggacattgttggcaagcagttcacagctctgcagagccctgctctgtttagaagctggcaatactgagggcattgcaagaagggaagctcagctcagaggggcactaccagggtggaggtcacagtgctcaggcgctgagtaggacaggctgcaagagagaggatgggcacagctaccaaaacaggagggaggcgtgcgaggttctcaggtaggagtgaattcctgggaccagccccacccaaataggaaaccaggaagtgccaccccccacccagtcccgcccctgtctctgggcaggcagccgttactaggcaacagaaaccggctggagaggatgcggtggttgctaggcaaccccatcccaggcctcacttgccactttcctaacatccccagttcccacaatcccatggggagagaggcctggacatccgaggtctggaggagagagtatctgggagttaggaaacttcgggagagatggagagatggagaaaaagagagagaggcacacacagaaccccatagatgaatggacccagagcagtaaaagggggaaaaaaaaaaaaagcaaagagagagaagggaggaaacagagaaagtgaaagagaggcttagagaagggaaagacagagagactcagaaagagagaaaggtcaaaatagatagaaatacaagggaagagaaagacaagacaataggaaaatgggggtagaaatggagagaaaagaggagagttacagggaggcagggagaggactaggagggagaaagagggaagagacaggaggatgaggaggcaagataaagaaaggacagagcagggagcggaggaaagaggggcaggctggaggtggggaaaccaaggcacaggcgagacacaggaagagggagacagaggatggagaaaagataggaaccgactcggatacaagcaggaagagctggaagggaggagtgagtaaggcagggagtggagctgcctgccagaagtgggtgccatacca

SEQ ID NO: 36715 - DNA, 2516 bp, Artificial sequence
  DNA replication origin
gaaagaggggcaggctggaggtggggaaaccaaggcacaggcgagacacaggaagagggagacagaggatggagaaaagataggaaccgactcggatacaagcaggaagagctggaagggaggagtgagtaaggcagggagtggagctgcctgccagaagtgggtgccataccactgccccccaccctactggggagaagaagtaaagggggagatggtgcatctttgctcttcacaactctccacccctaaggagtcagggattcctctaggcaccccagctttctgcagggcaaccactgggcaaggagtttggccagatgcacagctccacttcccctggctgagggctgtgccccacgggaagggatgcttgggtttccatggagtagggttactgtggggggcacagaatgctgtgaagtgggcctggacaccggaccccactcagtccccatggaaggacagcttgagctggtgaaactgtggaatgagaacttcgagggaaggatagaggcacaagtccttctcaccatctcaagtggcctgcaaaacctaggctggggatcagtcccagctctgcccctgactcactgcgtgatcttgagcaagtcactgccttctaggcctctgagaagaagagagtgctaggtgggagggtatgctggacaggctggggactgcaaactataatgtggattaaggtgaaggcttgtcaaggatggaggcacaagggatgctgggagacccggaggagcgctcagagtgggaggagtgtgaagggcggagctaggagagaggcaggagtggagtgggtcatcctgagacaccagggactcctggggcaaatcagggagcagaggacaaaggacagaaagaccgagggagagatgggacagaaggacagggacccacaggtggcagccaaaggtgggagcagacagagaaagacagggttgaggggcagcaggtggacacagagatacacacagaaagacagcccaagacgtaggaactgaggctaagtgagagagcaagagacagacacagcctagaagtgagacagcaaaggagacagagacagggcaggtagggtgtcaggcaggtccaggactcagccccagagactgggcaaagccagataaaagtcaaaacccagcagagagctgagcaacagtgggcataggagagacatcagcaaaggtgagaggcaaggagggccagcgaaggcacacagggtgagggagaaggcaaagggagataaagaaacagcagcaggtacaagacttgggagaaggaaagaaatggccaaactctacaaagagagagggccagtcggaaagagagacagtatgtcggagctgcacgacaggcccatagaagaggaaggggcaagggggaaaagcacctgggagagagaaagggggagtcagggagggaaactgaggtggggagatggagtgagtgcactagaggggcacaggcagggacagggcaagcacctgcaggagaggccagacccacacagaggcatagccaccccaagacactcaggaatgccgtgtgggggagcaggagatcctggggcctgaaagcccccagacatggagaggaatgggagcagaaaggccacgcgaggtaacacagaagtcgggagagagaatgggagtggaaagagccagaccagccaggaaaagtcagcatggaccacggagaggtggggcagcagctgaggagggagggactgaggagccgggcacccagagtggatctgggggaaagaggtggaaaagtgacagagggaagacagcctccaagctcagaggcagagagagggaggaggacaggtgagcggaggcacagaatagaaagagaaatggaaagagacctgccgagggagacttggaaagagggaagccagggtggaggagttctgacagagagagggatctaaacagagacatgccgagagcaacctgggctaacagcaaagagagaagttgggcagagtcagagaggggcccaagagacacaggaaatgggggctcaaaagcggaaagacatatccaggagatagagactggacggggtggggacagggccaaggcccaccgcaggcagaggatgaggctcagaggaacagaaagagccagtctgggaccaggacggaggcttggagacagcaggggcacggacatgccaggggcccggggtaagtgagagcccaagtaagagcaatcagccccgtaggaccccagaaagctagagggccaggggcggcagtgagctatgtacccagaagaagaggtgagaagaggtcgaggtgaatggacgctgaggagatggagggcgcagagcaggcccctagtgggggagggtacttgccagtccggagaacggggagaatgtggtgcccccctgccaggcggcaccagagcccagccttccaggacccagaacccagcccaatccctgccctgcagacactcacggatcctggtgggacggagggctgg

SEQ ID NO: 36716 - DNA, 719 bp, Artificial sequence
  DNA replication origin
agagggcagtccacagggccccctcccccgccgccggtggtggctcccaactaatccaaaacggtggctccacaggagcagggaggaaggacaggtggaagaggagagggcgggccggggaggggaggaaggggaaaggagaaaatggaggagagaaggggagagaggagagggggaaggagcaaatggaggggaaggagggaggaaaggaggagaggaaggtgaaaacggaaggggggggcacaggcaaagccgggggagggggaagctggcccaggaaagggcccccgccccctcccctagccgggccggcctgggggggccacagggggcgaggactgggtggagaaaaggaagccggccatcaggagaagtgggggaggggagggcctgctgggggagggggccgccccctttccccctcccccctggagcctgggccctgccctggttgaggcaagggcccggagtcctcaagccctcagcccccacgggaaaagcatgctgggggcggggagagcccgggagtggagagctggggaggatggagagctgggagacccggagaggccaagaagggggcaaatgaggtggagagatagggaggagggagaggaggatggagaggagcaggtggaagagaaaggcggaggagggtggggtgtcccaggggctcccggtgctgggcctcagtgggagggcctggcgacacactcctg

SEQ ID NO: 36717 - DNA, 2062 bp, Artificial sequence
  DNA replication origin
ggcctgctgggggagggggccgccccctttccccctcccccctggagcctgggccctgccctggttgaggcaagggcccggagtcctcaagccctcagcccccacgggaaaagcatgctgggggcggggagagcccgggagtggagagctggggaggatggagagctgggagacccggagaggccaagaagggggcaaatgaggtggagagatagggaggagggagaggaggatggagaggagcaggtggaagagaaaggcggaggagggtggggtgtcccaggggctcccggtgctgggcctcagtgggagggcctggcgacacactcctggtcccctgtgaggagccggctccagtccccggctccagtccccggctgggcctgcctccctgccgctggctgccgccaccgctcagtctcccctccgaggccgccgcctgcctgcccgcctgccgcctgcgctgggtcctggagcgcagtggggtggttcaggagagagagaagagggagggagggaggcagggaggagggcgggcaggaggaagggagggaggcaggcaaagagagagtagggaggtgagtcgggggagggggagcctgtattggttggggctgggggccccccgcgaggagaatgctgatgagaagaaggagctgcattggatggaaggcccacccccgagccaccccctctaccacaccatgccaccgccctgcccaggcagccctgggcacaggagcccacagagatgagaggcaagaagacccagggagaaggccactgagatgaggggagagggctacagagatgaagagaaatgaagagaagagagacagccgtcaagactgtccagagaagtgggctgaggcccacaaaccccacaaggacaaggacaggaaaagcccagggataagaaagaaaggcccatggagacaagggagcagcctacagagacaagcaaaaggacctcggagacaaggggcagtaatgtggacatagagacctcccgcgaaggaaaacgggagaagccagagacacaagagagaggcccctggaaacagaaagcactcctcagatatggggagcggtccacagggcagggagagagccaaggagagccgaagaaggtcacagaaacaagggaggcctacagacaccagggtaccaaaaagacaaggatgtggctcatagacacaagagagccactgaggcaggagctgccagcctggagatgcggggcaagcctcccccaatataaatagctcctatagaggtgaggggatgggtggtgagtatgagaattccctatagtgcacagagaaatccttgggacccacagagatgagtgggtggagagaaggggccctcattctctagtcacaggagcagagaggcagtgggaaaggtggatgggacaaggagaggaagctggagggcagagccagaagtgggagactccttcccagggaacaccctgcagcctctcagaaggagctgagcaggacagggggatggaagagagaagcgacacagatcttggagtgggggtgggtggtgcatggctgggtggggggtgaaatttggggggaagaaacatgacagttggcgccgaaggctgagcccgtgactcaccaccacccccgatgctcgtgatggggaggagacactgacacactcacgtgcggcccacagcatatgtgaccgcatgcctcgaacacacagctggcacatggcaactcctggaccacatgccagcccagcacaggaagccctctgcaagctggcatgtggggcatcctggacacacatctgacacatatatctgacgctgaaggaccaccaactttgcacacacctccttaccccacttggtcaacatctacaccgccccctcaaacatccacacttaactccagtcaggcctaaaagcccagattcacacctgcctctgggactttgcttatgaaggacctcaacacagaacaccatcctttcgaccagggcggtggctcattcctgtaaccccagcactttggaaggccggggcaggtggaccacc

SEQ ID NO: 36718 - DNA, 1025 bp, Artificial sequence
  DNA replication origin
gccgtctcgcacgccccgggcccgggccacggctccccttgcacggccaccctaacgctgcgcccgctctagctctcgccgtcgcctctcgcctgctccgtagcctcgctctcgcccccagctaccctcagcaacgcccctcccaccttcctcctcggccgccgcacggacggccggacgcaaccaatcattgcccgctcgggccctgccgttcggccaatcgacgttcatgtctctgaggcttgggccaatagtgaggagcgtcgagattccccgcagcgcccaaccaatcctttagcgtcgttccctcaccggtcagccctcgggtggatagtgcccgcccctttaatcctccttagaggatgctcctcctcctcctcgactccgcctccgacggctccagaggggaactctgagcggagggcggcgcgatgacgttaggcggcggagcgcggccgcgggcgccattttggggacgccgtgagggagtcagcgttggggacagggagagggaggaaaagagcctgggaaattgaggcacgcggcaccttgagggctggagcgggggaatggaggcacgggaacctttgtggtttccccgagggtcagagggagaaagtgaaaccacttagcgcgatggggagagggcaaactgcatgcagcaccagtcacatggagagagaaaagggaaaccaaggttccagactcactttattaaaaggaggggaatgaaggcaacaggaagaaacagagaaaagaccgaggggacttttgggaggtggagagaggagaaatgtcataggggaagcaaggagagcgaggatatggagaaaaagaagcagggacaatttcattggaagaaatagggagtgtggtgggtagaggacctgaaggacaatcggggtgagagcctgaaggaagtgagccggtaacgggcggactccactccacctccttccggggtgactctgacccttacacctcgagattggggccccatgtgtccaaggggctctggccattcc

SEQ ID NO: 36719 - DNA, 2675 bp, Artificial sequence
  DNA replication origin
ggggaatctcgacgctcctcactattggcccaagcctcagagacatgaacgtcgattggccgaacggcagggcccgagcgggcaatgattggttgcgtccggccgtccgtgcggcggccgaggaggaaggtgggaggggcgttgctgagggtagctgggggcgagagcgaggctacggagcaggcgagaggcgacggcgagagctagagcgggcgcagcgttagggtggccgtgcaaggggagccgtggcccgggcccggggcgtgcgagacggcggaagcaggtgagcgcgagcgggcgcgcagaggccggccgggctgcgctccctgccgccgcggcctcctcttgccaggtcgcctgcgcactgagggcctgagggggtgcgcgccgggcagttagggcggagcggcaccaacggccgacccggcgcgcgggcagccgggcgggggccgggctggagcggcgggtggggaaggggcctggagtcgcgtgcggggctgagtgaggaggggcggggctcgggctgaggctttggtggggcacctgggcgggaaggggaggcctcagagctgtcccaagagggctccgcggctccccagggtttggggtaaaggacttggtggtgtggcaagtccaggacgaaggggctgggccggttagacggcacgtgggtgcccagttaggggcttagggcgtgagaaagataattaagttaatgcaggggaaaaatatctagttcttcctggaaagaattggggcggtgagaggggttttggtgtgaagacattaggaaatcgatatccccaagggaacggtttagagctaaggaggggtccagttgtaatggatggggttaaattaatgtgaagaggccttaaaccaatgtgtcaggaggttgggtacccttggaatgcgtggaaaggagtctttgtacaaagaaggattaagtgtattttaaaagggtgtctgggtgtccctagaatgagctggggaaggtagtcttttttaagtacaggtaattaggccaaggtgaagatgggatttggttattggaaggggaggaagtagggtgggagagatctgtgtgctaaagtgaggggtgcctgggaattcctggaatgagactgagaggttgctaagacgctggggggtctgagtacccccagaataggaggctggtgagaggggcttgagtgtgaggaagaggggtctgtgctggattaaggtggtgatggaggttctgtatgagaataggaggtccgggtatccctaaagggggtttgggcagcacgaggggtgtgtgtaaaaggagcttaagccattgtgaaagatgggtgtgtggatctttacacaaagaagaggagttatgttgctacgaagaggagggtctgagcatccctagaatgggttagggtgggttgggtcttctagcaaattaaaaaagattaggttaataatgtggaggaggatctggatattcctgagatggatttgagggggggctctgtttgcaagagaggcataggttgatataaaatgagggtatgggcatccctgaatgagtggctgtgtatgaacaggaagggtttaaatcaatgggaagaggggatctgggtatctcagaggggattagaattgtcgatttggtcttggtacaaagaagaggtgatgaatgtaaagagtggatagataccctggagacaggagctagggtggtggaagggcctaggtccgaagcggggaggagtaggcttttgtgaaaatgggtctgggtattctggatagggggttagggttgtaggagagggccttgatttgtagaggaggttaagtaattaaacagggctgcgtatcatgaagtggttaaggtgggcaaagtctgggtgtggagatgggttaggccagtgtgagaaaatttgactggggggaagggatatagtttgacgtgaggaatctgggcacctgaggaagagttggtgggtagcaggggttgcgtgtaaaggggaggggtggcaccttgtacagtgctgaaagtggagtggtggggcattgggcagtttgagtggtctgagtgtaaaaagaagtctgagaacctgggagaaggagcagaggccatgggaggggtgtggctgggagaaacaggtggggaaggcctatatggggtttcagttgggtaccttggagaggaatggggtgaggtgagttggtaagaaaaggagtcagtggaaggaggtctgagtggaggttcccatgtgctgggcggaactgtggggcccactgtgaggtgtgggagatgaggggactggacaggttacaaggatctggtgggtggagtttgatgcaagttgatacagaggtgagactgtgggtaaattcctggggaagggactgcctgggagatttgtgtttggtgtttgttatgctgaggggaggaaggattattgggagggaggcagaattttaaaaatcgaaggaagaacttaagggggtgtagatctaaggtattaggagtggagagtgatgaagggaagagctgaggaatcggtgacctaactggtttgtccccactgtctcctcttccagcccagggccttgctgccgccatgactgaggaatcagaggagacagtcctgtacattgagcaccgctatgtctgctctgagtgcaaccagctg

SEQ ID NO: 36720 - DNA, 892 bp, Artificial sequence
  DNA replication origin
aggcggtaaggacggtgaaaacgcaccccacattcctggcagcggtaggggaagtgctgggcatgcaccaagcggtgctgcctcagtgtggagctttgcgtgaaagccttgccacagtccccacaccggtagggccgctctcctgtgtgtgtgagccggtggcgggccaggttggcaggtgagttgaagggcttggagcagtcagggcaggggaagggccgctcccctgtgtgtgtgcgcaggtggttacgcacgtgagacttcttcttgaacatcttgccacaaatgctgcatttatggcgccgctccagccgatgcacaaaacgttggtgccgggtcagctgcaaggcctttccaaattcacggctgcacaggaggcagcggtaggtgcctggggcagcgggccctgctgaggtctcctcagacacagggggctcaggggcctctggctctccagtctctgctggggctggctcagggaaaccaatgacaggttcctctggtgggactggtgttgtgggcagagggacaccccctaccccatgagtacgccggtgataaaggaacttggtaaggttgacaaaggtcttcccacatggacatgaatgcagaggattcggggtgtgggctcgccggtgggccaggaggagggcctctgtgccgaaggccaggccacagtctacacacaggaagtgtgactcgctgctatggtctccaaggtgctggtccagactggaagggctagggaagacacgactgcacagggggcacttaaagacgccctcccggtgactccgcaggtgctgctgtagctggtggggtgagagaaagagctggtcacaggctgagcagaagagctcctgtgtggctgccccgcctgcttctccactgt

SEQ ID NO: 36721 - DNA, 863 bp, Artificial sequence
  DNA replication origin
cgcacagagactatgtctgtggactcaagcctgcccagccccaaccagctgagcagccccagcctgggtttcgacggcctgcccggccggagacgcaagaagaggaccagcatcgagacaaacgtccgcttcgccttagagaagagttttctagcggtgaggcccccctctcctgggtggccctcacctgaggggtggcgggcggtgggcctcgggctaacgagccctctgcctgcagaaccagaagcctacctcagaggagatcctgctgatcgccgagcagctgcacatggagaaggaagtgatccgcgtctggttctgcaaccggcgccagaaggagaaacgcatcaacccctgcagtgcggcccccatgctgcccagcccagggaagccggccagctacagcccccatatggtaccaagagcccgcctggggggtggggagaccacagagctccgcaggcacctgtgtgaagcccaccctacctggttgtccacagagcctagaacagagacaagaagagtcactcttggagacaggccatcacgtagatgggcacagttacacagggacggtttccagggaactgtggtcttacatgggggatacaagcacccctagatacacaccgacatagccagacacagagttatcacagtgccatagccacacaggaagggatatatgtccagggacgtggtccaggttagaacacacaggctcacaaccacacagaggcagggagaggcacttatttgccgttcggggaaattgtcacacccatgggtgtactctcaggtccacagctatacacaggcccacttgatatcagacacagctgggacatcctttatcccatcct

SEQ ID NO: 36722 - DNA, 1075 bp, Artificial sequence
  DNA replication origin
aactcttctctaaggcgaagcggacgtttgtctcgatgctggtcctcttcttgcgtctccggccgggcaggccgtcgaaacccaggctggggctgctcagctggttggggctgggcaggcttgagtccacagacatagtctctgtgcgccgggggagacgtgagcatgagaaggggcctcccgcggccagcggccactgcccgccccctacgcgggaaccccagcctggtcccacctgcatcgttgagccacttctccaggaggggcttgagtttgcacatgttcttgaagctcaggttgagggcctcgaagcgggaaatggtcgtctggctgaagtcgttgccgtagagcttgcccatggccaggcccacatcaccctgggccagtggggcggggaagggcccgaagtcagggtggggccttccggcactgggcccgctccgcccgcccactggccacgcccctcgcggcatctatcaactggccacgcccccacgcccaccgcccagcctgcaaggtgcctccagacctgcgtgaagcccagcttgatgcggcgttgcttgaaggtgcgggcgaattgctccagctcctccagatcactgggctcctcggggtgggatggtggctccaagcatttggggggctgcgggtgcgagaggtgcgggtcgggcagcgtagggcgggtcacggcctggtggggtgggcaggtgggtgggatgcagggcggaggaccaggatggggctcagcgatgggtgcacagtccccctcccgccctcttcgcccctgcgttccatccgccgcctgcagactccccccgccttcctccacaagcaccgtcaatccctttaaaggtccctccacatgcactgttaatccctttaaaggtccgactctgctgccctacatgggtttcctcattgcctgggactctctgcactgtcccttcacgcctgcgaactcccagaaggagcagccagctttttgtgccagggctctttccctggagctggaggcagtggttcatcctcatctcaacctgggaatcagggactggccctgccaccaaatcactgc

SEQ ID NO: 36723 - DNA, 2070 bp, Artificial sequence
  DNA replication origin
gcaaagaggccatcactggcatggtgcctggaagaaaggtggcacccaacagactagttactgttacttcaagagccaggtattgaaaggctacatctgggctgagcaccgtggctcatgcctataatcccgcactttgagaagccaaggtgggcagatcgcttgagctcaggagttcaagaccagcctgggcaacatggcaaaaacctgtctctacaaaaaatatgtatatataaaaaaattagctgggtgtggtggcatgcacttgtagtcccaactactcaggaggctgaggtgggaggattacttgagcccaaagaggtcgaggctgcagtgagccataatccgccactgcactccagcctgggcagcaaagcaagacctcatctcaaaaaaaaaaggctacatctacaagagccatcacggagccatgcgcccagtttacagagtgtctccacagaaccaggcccagtggaaggaagttctaaggaggcaggttatcagctcagtgttaaggaaagtcccaaatgggagcattggccaataatggaacgggccattattggggtgaactgtaacaagggaacagccttaccagggctggacagctccctgcatggacagcatctatatctagggttctgtggaagtggttggacggagtgagagaaaagccttttgtggagcagtcactgagggaaacgccaggctaagggaagttaaacaggtggctttgctgtagggcttcccacgaccttcactgccctgaaacttggccacagctctaaggcttatgaaaaccagacagacaacatgaatgggtgaaaaccagacagacaacatgaatgggtgacatgggaaggggtggacaggagtgggctggagacagctgcccttcggaagaggaagcctactcagctcccactctgctcccccggctgtccttatgggaactctgttggccactgttaggggttaaattgtgtccccaaaaagatatgtggaagccctcactcctggtacctgtaaatgtgaccttatttggaaatagggttgcagatgtaatcaagttaaaatgaggtcaatggggtgggccctaaactaatgactagtgtccctacaagaaagaaaaatttgaatacagagacaggtgcacagagagaagatggccatgtgacgacagaggaggcagagattggagtgagccatctactaagctatggaacaccaaggattgacagcaccatcggaagccagaagaggcaatgacagattctccctgggaggcttcagagagagcacggccctgccgataccttgagtttggacttgtggttggagacaatatgtttctgttgccttaagccacccagtttatggtattatgttacggcagccctaggaaactgagacagccactaattcatgattaactatggaccagcaaaagctccagagtcagggaggtgatggagaacctcctaattcatagatcacgggccccttttttgaaagagcatcttgttggataagccaggggacacgatgagggtagggcactcattcttattcttaaccttttgttttgtacccacatggtaccattcacgagagtgactcctggtttccttacctgtatgttgaggacaacaatctcaacctcccaggaggctgtgaactcccagcgagatgcacaggaagcactgcccccaacacaccaccagagggaggattatgatgtgggatattcctccctgtgagcctcactttacccctctgtaagatgggacagcaacatcttccaaagcttcctagggttgctaggaactgcctggcatgtggctggtggtcagaacagtccatgtggaccagtcagccccttcccacacactcactgtttctgcatgtccttcactgcagggagcctggtccccagtggctgcccttacctgtgctgtgagctggatgggttgggacaaggtgagctgtggggtcccagggggctggctggcaggctgtggtggtggcaggtcaccccccccagaggaggctgggggctgtgaggtcgag

SEQ ID NO: 36724 - DNA, 749 bp, Artificial sequence
  DNA replication origin
cggcggcggcagcggcgttagcggcagcggcggcactggactgctgcacggcggcggccaggagctgggcctgggcttgctgcaggaggagctgctgctgagctggcatcagtgccgtgagctgcggggtgtcggggacagcaggaattggagcaaggggttgaagaggagcagagaaggcagagaggggttagtgcctaagccaagcaagtaaggggacaagacctcctagaggacagaagagggcaagaggcaggtgtgagagagtggccatggccttggtggaacagttcatccactagccctgtaacagatgaggggtggctggtttgtcccctcgtccccatccttccccaagtacttaccccagctagctggctgcccgtcaacatgagttgggcctggggcagatgaggctgggccggctgagggggcaggggtgctgctggggctgaatcgccactggggtcttcagccttgatctgggggggagagaggcagggtccgggaccccagaatgttaagtggaggccagagagaatgcccacctgtgaaccaaagagagggcacgtgtgtggcaatggcaatcaggctggcacaggaggagcagactggggtgtggacatgagggtgcagtctgtggtcctgcactgaccgctgggagcttcaaaccactcctctggcctcagtttcctcatcaatcagatagggctaacacaacacctgcacccaaactccctacagaagtc

SEQ ID NO: 36725 - DNA, 1003 bp, Artificial sequence
  DNA replication origin
gagagtgtgtgtgagtgcatgtgtgtacgcacgtttgggtgtgtgttttgcatatatgcccgtggcatcatgtctgggcatgtgtcgtatctgcaaacctgttcacattcctgtctggaatctgtgcacatctgtttcttgtattgtgttggccggggccttgcctggctgtggccatggggtgtgtactgttggcagctcttgcctgctgtcagcgcagctgtggggccacctctcttgttgtgtctgctgcctgtatctccatccctccctcctgacaactcagaaatgttcactcccttgaggccacccagggacagctgtggggtggggaggggtgaggtgctgcttctggggaggacgggggctcggccagctgggcccacagaggttcccggcagcaccaacctgcccacaggggctcccaggccatacccctaattgaagcaggctgcggaggcaggggacccaggggacaggacaagtggggccaggaggggtgaggggcagtccttgggccctctatatttagccccgttttcggtaagtgctaacgagaagctggcctaagtctgctaaaactggcggggggaaatgcagaggagaagtgaaagtccggggagggaggagtgggagggtggagaggaccaagagtcccaggcctggggcagtcgggcaagtgagtgtgagctcagggctgggcagccctggttgaggggtgtctgacctgaggaaggtgggattcaaggggcaacatggctccaaggggcctggtagggctatgcattgctttttctctttcagttcccctaaaatattacacattacctatgatgaggggtgggaatagccatacataaccaaccaatcttttgtgtgtgaatgaggctttgagaggggcttctgaaggtgccaggggatggagcacattagaatcaccaggagggggctgggtgcggtggctcatgcctgtaatcccagcactttggaatgctgaggtggg

SEQ ID NO: 36726 - DNA, 1739 bp, Artificial sequence
  DNA replication origin
agcagtgttgatgggagtcttaaatgaggtaatacatgtagcatgcttagcacagtgcctggaacatggcaagcactcagcccttcatgcctgtttcatttgtggctgtgtaggcatgaccatgggcatgagtcttggtttggtggtgtgtgctgtcctatatgcgccattgtgtgcgggcacccgtgtgtcctccaccaacatgtatctattgagtagttctgtgttgggtgttggaagtacagtggaaagggtagctcaggtctgtcctcctggagctcccagtttattggagaagacagacctgtcaccaatgacagtacagacaggtcagggctgggatgggggaggtccaggcagagggatcagggctgggatgggggaggcccaggcagaggggtcagggctgggatgggggaggcccaggcagaagggtcagggctggggtggtgggcacaggcagaggtgtcggggtgggatggggggacaaaggtagaggggttggggctgggatgagggaggccccaagcagaggggtcagggctggggttggggaggctcaggcagaggggtcagggctgggatggggggacataggtagaggggttggggctgggatgggggaggcccaggcagaggggtcagggctgggatagggggacataggtagaggggttgggccaggacggggaggtattaggggatcgtaggagccctgaaaacatgtgatttagttggtagagtgtcaaggagggcttcctggaggaagggggtgtctgagcagggatatgaagaatgagtgggtatgagcaagcaaaggcggtgaggagaggggtgggatgaaaggaagactatttgcagggtgacatgtttatttgttgaggtgactgtgtatgcaactgtgtatatgtgtgtgtgtccatacagtgtagacacagagatccagggtgtctgctcccactgactcgttcctctctggggttaaatggggacctcagaggtgctgggcagtaggctaaaccctttacttgggatttctcacagaacagcccagtgtgggaagactggggtgaattttccctgcctggacatgaattaatacactgtgtggctgtgggcagatcactcaccctgcctggtctcagactccacacctgtgaactgggttcagaggtcagccctggccatcttccaggataaggtgactctgggtgtatgtgtgtgcacttgtgtttgtgtgtgtgactctgtgtgagcatgtgcatgtctgggtgtgtatctctggctggactgatgtgacttggtgtgagaacatgtgtaagtacatgtgtgcgtacacatgtctgagtctgtgagtgactgggtgtagtatgtagggggagggtgtatgtctgtgttcgactccgggtgtgtgagtttgtatactttttacgtgtgtctggctggctgtgtgtcactcagtgtgagagtgtgtgtgagtgcatgtgtgtacgcacgtttgggtgtgtgttttgcatatatgcccgtggcatcatgtctgggcatgtgtcgtatctgcaaacctgttcacattcctgtctggaatctgtgcacatctgtttcttgtattgtgttggccggggccttgcctggctgtggccatggggtgtgtactgttggcagctcttgcctgctgtcagcgcagctgtggggccacctctcttgttgtgtctgctgcctgtatctccatccctccctcc

SEQ ID NO: 36727 - DNA, 623 bp, Artificial sequence
  DNA replication origin
agcagaggtggggccacaagggcctcctgtaaattgcttcccaacaccctctcccctgcccctcacaccagcagtccagcagggtgtgtggtgtcgtccccatccctgaaggggctgctccgggcagagctgagactgacacatgggaaggtgtccagctcccggccctctctcttttcctgcacccagctgcctcccaaagaaaagggccaagttcagtgtggaaggggcagagacaggccctgggggactgagagctgaagtgctgtaaccaggggcagagaggctgcagtctgtctcccctcttcagtgcctggtccccacagacaccctacctgttcttgtcccctgctggctgctgagggacaggctttggctatcctgactttggccaatgcctccctcaacctgtggccatcgtctccctgcctggtgaccccaacaccctcctgtacctcctcctacccatccctgtgccccccaagaccacccatcccatggccacctttctgctcctctgcaggtttggggttagggaagggagcacagaggcctagatggggggtggaaggcttggtggattattgaagatgtgcgggcactgcggctgacatggatgagga

SEQ ID NO: 36728 - DNA, 1181 bp, Artificial sequence
  DNA replication origin
cctgccacccctccaaggggcctccttccaacctcagagtacccacacacacatatccatggtgggctgagggccctggccaggccttcctcccctcccccctacctggccccctgctcactcccggagccatttggctgatggtcagaactgtctgtcaaggtggctctgagcccctggggacccagatgggaggagggagggggagaggtcgggggtcaggccacgtcccctcagcttgtctctttcccctcccccttcctaacaaagggagcatcggcctgacactggcgggatggcctggtactcagggaagcggggaggagaggggctgtggggatggccatgggcagaaggcgggggtgggggccgcctgcccctcctctgccctccccctcgggtcaaggctaaggtgattcctcaacctctcggaggctgggctgggaggagaggaggatctggacagacaaagaactggagccctggggagttgggggctggggggacgcacctgggaccagggcagtcctggctgagggaggggcaacaggcacccctctggccctgctctcaccctctggatggccctgcctcccatctgtaccaatccctacggatcccagagccatacagaccttccagcttgggcaaggtcggatgggggtggggggaaactgaggcccagagaggggagacggcccaggcccagggttctcagcgctgtcccagagtctctcccctcacttctcttcctactaagggaagacatcttcctctcctgccctcccccacccaggtcaggggaggtttggtgggggcagatggtagaaggttctatggagagggaagaggaggctgaggaaaaagtgaggctaagcgttctcctctcttaagccagtgggcaggggaggaagccagaagagaaaaagtctaaatgtgaccttgagcactggcctggcacagctgtgggaagaaacttaacgtccgtcagaaagggcaggaaaccaacatagacagggtgctcctgagtacctggctagcggtggctggggaagaggccttcagacagttttccccttttgcccatggctacagtgaaggaggaggattcacactctggttggtcacaatccacccatgacactgcgtcagggcctcccatccacccagcctgactgtgg

SEQ ID NO: 36729 - DNA, 710 bp, Artificial sequence
  DNA replication origin
cccctacagcaggagagcttagggaggctgagagcttggacagccgggagagggggtgagtatgggagtgggcaaggaagcagatggggatgggggccatagtttcaggtaagggggctgggagaaattgagggacaatttctgggagaaagcaggcatcccctcaattgggagcagctcagaaagatggggccctttgaaggtgtgtgacggacagagctctgggaggtgggcagggggcacctgtgggttcagagagacactgtcctgagcccatgaggcaggggaaggtctggggtgggtgctggagtaggctacggtgaatggacacaaagaacagtggggcgaaccctcaggccggcctgcgcccacccccagagctgctggctgccccgcctttgggtccctgcgggtagaagttgccttggcctcaccccagggtctggcctgcacatgtgtggttggggtgggaagcttgtgcggcttcggacaggaggttccagcgagaggtctgtggtgtgcgagctgccatggacgcagggtgtgcatgtgtcctcaggctctgctgggggattctaggactgcacatacccgagcgtcttggcccgagtcatgtctgtgtgtgaacatgagttcatggatgtgtcccaggagcactgggtggctgtgtatgcacttccatgagtgtttccctgacgctaagtctctgt

SEQ ID NO: 36730 - DNA, 675 bp, Artificial sequence
  DNA replication origin
cttcctctgctctttttctctgcctttgcctcctggttttggtgtctgtgtcccttccagtctctttcatcttctgtctctgcttctctgtgcatctctctgcgtgtgcctctgtctctcactctgccgttctctttctcttgtcgtctctcggggtctctggctgtccatccctgcctctgtttgtgtctctctcgctccccctccctgtccccccctttttttcctgtttctaacacccacactcacatcctacctctggagtaattgcttttgtctgggttggactggacttgtggtggggggagggcggggggagcgggtggcgctgggggggttgggagggacggaggtcgcttggtggagttgaggtggcatccaccaaagcaggggtgttgaggagcagaggtacagcctgcccaaggtgccgggggagggacgggggcctgggcccatcctggcaggggtctggggtctctggcagggaagggaaagaaggcaggcaggccctgacattgggatttggagatgatgtagtgataaaaccggctagccagtgtctccgtggcagcccctgctgcctcgccaccctcccccactcagagactcagggttgtagcctctacacacatacaccgtgccgtctacaccaagtcaccatgacacacacaggga

SEQ ID NO: 36731 - DNA, 1183 bp, Artificial sequence
  DNA replication origin
ggtttctctgtgtgtctatgtgatgctgtgtgtccctgtgtgccgatggtcgagtgtgtttccacaagtgggctggaggctctgggtgtgtccctgtgtgtgtcatggtgacttggtgtagacggcacggtgtatgtgtgtagaggctacaaccctgagtctctgagtgggggagggtggcgaggcagcaggggctgccacggagacactggctagccggttttatcactacatcatctccaaatcccaatgtcagggcctgcctgccttctttcccttccctgccagagaccccagacccctgccaggatgggcccaggcccccgtccctcccccggcaccttgggcaggctgtacctctgctcctcaacacccctgctttggtggatgccacctcaactccaccaagcgacctccgtccctcccaacccccccagcgccacccgctccccccgccctccccccaccacaagtccagtccaacccagacaaaagcaattactccagaggtaggatgtgagtgtgggtgttagaaacaggaaaaaaagggggggacagggagggggagcgagagagacacaaacagaggcagggatggacagccagagaccccgagagacgacaagagaaagagaacggcagagtgagagacagaggcacacgcagagagatgcacagagaagcagagacagaagatgaaagagactggaagggacacagacaccaaaaccaggaggcaaaggcagagaaaaagagcagaggaagggcaaatgcagagagcacgacagagagagacgcagagacagtgactggagagacggagagagaaacagagaaagagcacacaacagagcagaaaacccagtgatggagccacacagagagaagacgcagataaagagagaacgggggccagaggcagggagaactagaaagggggcaatgcacagagaggaacagaaaggctgagtgagagtgagagagaaaggagaccagagagataaaaggcagacggcagatagtggtggaggggagttggtaacccactagagactctgagatggcaaagctagagagaaactgaaaggggatcacgtccaaagtgatgtctctcacacacacacacacacacacctttctccccattccccaggccagaagtcagggatgctcaagccttttt

SEQ ID NO: 36732 - DNA, 1874 bp, Artificial sequence
  DNA replication origin
gcagctgacgcgcatggcgaagacagcggcgcctaccgatgggagcagcggtaaggcaaggcggcgcggcgcagccgggcgggcgggcggcgggcagcctcctcctctccccagctcgcctgcgcgcccgcccgcctgccctcccttcctccctctcccctcgcagcccctgcccgcccgcccgcccgcgccgcgcttgcccttccatttaaaaatctttaaaactttgcatattaatatctgcgctttgcataatctgacccgcgctttattgattgcaagaagcttaatgcagccggctcggcctattgcagagagctctccgggcgggagccgggcgggagccgggcgggcgccgctcactccgcaccgcgctccggctgtcagccgccgccgcggccccggccctctcgcctccctctcggcgcccggcgccggggctttgccccctggctgggtatttttattatttggggatggggggggtcagcttgctctcgatggcagtgagggaaccaaaggagaggtgtacgtgggggcggggggcagggatggaaagaaatggggacggagaggaggtgaagagggagaggaaaaagggagaaggggcaagaaggatgaggaaaggagaggcgtggagggggaagcagtagagagaggagagggcagtcggctgaggacggagctgaaaggacggaggagcggaggagcggaggagcgagagccgaggcagaagagaaaggagggagtcaagagcgcagactagagaaagagcctgacggccgcagagctgaggaaagaggcaggcagtgggcgcttcgccgctgctgcccccgggccaaaaaataaagaaaagaaaaagagaaaaaaaacaataccaataaaaagacgatgaaaataaaacacatcgcaaccagggccactgaacacaaaaaggagcgaggacagagaagagaggcgaggtggcatctgctcccggctggctgcggcgcttcggagaggctccccgggctgggcgggacccccattttgaccctgcatttgaggaaggggcgactgtggagaaaatgaggcgagagggggtcagggctggtggcggttccgcctgtttttttttttttctctctctctctcttttcctggaggtgtgggggccggtttagtacgatgatggtgaggatattggtcggtgatgctgtctgaagctccgaagcaagcagggtgcaatggggggggagaggtaagagggcacagggaacgagaaagggctgggtggtgggaatgaggggtgagagaaaggaacggggtgccttggagagcagaaacggtgagaaataggaaaaagcagccgggatggggcactcagaggcggtggcatctcaggcaggaggagaggtggaaaacggagctccagggccccagagtgaggttggggagccgcggtgcacccctcagctctctggacaaagtctgtaacttggggaaccccttcgactgcctgctgcctctttggtctcttttctttcccttttcatgtcctttctcagctcctttatttccatctcctttactgttttttctttctcactgtttttcagtttctatctcttccttttctcaataaaagctctttctcctcctccccaccccttagtttttctttttctacctcccttatctccacctccttcccttcttttttctccgtttttcccttccccctttccccctttcttttattcttcccttcctgccactcatttcccctgttgccagctctttctaccccctccctcagtttcatttattcatcactcttgctgctctggccttcaacagggtgccagggaaaggggctccatgcaaaggcagga

SEQ ID NO: 36733 - DNA, 2319 bp, Artificial sequence
  DNA replication origin
cgcgggtcagattatgcaaagcgcagatattaatatgcaaagttttaaagatttttaaatggaagggcaagcgcggcgcgggcgggcgggcgggcaggggctgcgaggggagagggaggaagggagggcaggcgggcgggcgcgcaggcgagctggggagaggaggaggctgcccgccgcccgcccgcccggctgcgccgcgccgccttgccttaccgctgctcccatcggtaggcgccgctgtcttcgccatgcgcgtcagctgcacggctccgaggggatggccgaggaggagccgccgccgccaacgctacccccgctcccgctcccgctcccgcgcccgctcgctgcctgctgctggcgctgctctggccgctgctcctcgcctgagctgccggcgcgagcccaggcgcgcgccatccccggctcccaccttgtccccatggcaaccccgggcccaaggatgctcagagagagagcgcgagcgagagagcgaggggggagagagggagagggagagggcggggagcgcaggggacacggaggcagggagaggcccgagacccacagagacacagagagacacagagacggagagatgcagacatatgcagaaacagagacacagagatagaggagaggggtaggaatagaaggggacacggagacaaggacaatccttgagaccgacagaggcccacagagatactgagagacacagagacacacggacacacagagacacagagacacacggacacacagtaagagacagaggggtaagggcgaggggcagggagcagagagggattcaaaggtatggagagacactgaggtccagagactaacagagatactcagagacacagagacacccagagatagagacagagaaaaaagagagaggggacaggacagggagcacagaagatgcagaggcagagaaagactcctagaggcagagagatgctcagagacacagagacacacagaaacaaatagacacggggacacacagaaaagagacagagaagggtggggagcacaggggactcaaaggcagggagaggccctaaaagccagagactcaaagagacacccagagacaaagaggaaaaggagaagggagagggcaggaagtataggggacatggaggcagagagatgtccagagacacacagaaatatagagacacaggaacagagtggggggagaggagggaggagggagcagatggggacataaaggggcaccaagaaccacagagacactcagagacaaagagataaggagaagaggtccatgcagagacagagatgcagagtcagaaagatagccacagagaagtagacacacagagacagagagatagtgaaaaaatatatatggggagagaaagagactaattcacaaagacagagacacagaaataagagagatagatatgcacaaatcagagataggagaaagctacacgcaaagagagacaaatgaagatgtaaggcagtgttgcagagatacagagataggaagacatagagacagaggcagacacacacagaggtaagagatatagacctgcggaaacagacagagattaagaaagagccgttgaaagagccgttgaaagagacagagaaacagagatggagagatgcaaagccagaaagacagacattgacagagaccaaaagatacagagactgagactgagacagagaaaaaggcacagagagagtcaaacaaggagacagagtcaaacaagaaggtgtagacagaaacacagagaaatatacatagggattctgagagagaacctaagaaacagagacagaaagaaatgtgcaaagagagaaacagagatcaagacataaaaagagatgaaaagaaatacagagatggtgagagaaagaaagcaaagacagagacccagagagtcaaagtgaggcagagaaatgcagagacatggacagagactgcaagaaagtgacaggaacagagaaacctcaggagacacacagagagacacagtgagatggagaaaggcactggaagaggctttcagttggacagagatccacagagagatgcgagacagagacaagaagagacaaatggagagtcagaaatagagaatgaggtctggtagacaaggctggggatggggggcagagacagagcccaggtaaaggaggaagggacaggctggggtgaaagcagaaagtaggaaggtgacaagagggtccagggaagcaccaagggggaaagggcagacaggaggggagggaagaacagcagaaaggagaggagtggggaag

SEQ ID NO: 36734 - DNA, 988 bp, Artificial sequence
  DNA replication origin
caaaggctgtcccctgcccagaataccccgtcactctgttgaactcctcctcagcccgcacaggccaacccaaggttccgctcctccgtggggccacgccggcctcccacatctcccatgggctccgatctcctgtggccccacgccctgtccccacacgatcctgtttctctacccgatgctcccagggttgtcctccgggctcagatctgacccacctccgggccccgagggtcagtccctcaccccccgcgcctcgcccgcactcttgactagctcaagggagctccacggcgcatgcgctcagggaggctctggaggcgcgagcctctgcctcatggttcccgccaagtgcactgcgccagcgcagatcccttcagcctcaaggttggccctcctgacttctggcaagcacgtgctggccagaggcacgtctggggctgaacagggttaagggggaggtgacccagagaatggggtggggccaatgacatggaacggaagcaggggcagagcctgaaatgtgtccagccttgaggtgggacccgtattcaaatgaggccaggagacaagccaggggctaggggctcaagggaatggcaggtcctagaatttagcccagtaattgggagcccaaacacaggtaaccccacctagaggagagcctcagccttaggtcatgaaaatggaagggtcagggcaagggagtggaattccccacctcattccccacctaactgctgtcactaaggtactctccatctcaatgctcccaccactcaggtaaatcacctgccctctctcagtccatttcacatcaaacatgggtttaaaatcccacagtgtggctgggggctaaatagatcttgagtaggtgtccagtggaactcagcttcctcccagagagggtcaaggcagaacctgggatcacacagcagctggctccaccaggccttggctgctggataggactcacgactagactttg

SEQ ID NO: 36735 - DNA, 1154 bp, Artificial sequence
  DNA replication origin
acgtagattaaattaatcgcttgaagaggctgtgaggtctgtggagaaggactaggcagaggtctggcctgggggtcgtgttggagagggtgaggagaagtgacctaggaaataaggaagggcactggccatagggctgactgtagacacgatgggttgggtgggttggggactctgctgtgagactactttgaccttgctcttgagaaattccacttggtcatgtggggaggacacagcaatgagcaccgcctcaactgtagtactcctttctctagttgggcaagcttgggaaacacagaagggatcagatatggtcttcgagctctcaggctgcagggaagacagatgagggaagtggcagccaggctgatgtgacaggtggcacgggtattgtgagtgcaggggctctggggtgtgcagggagtctcctggccagccccagtttccttgtggaggtgccatgtctagaacaagctcaaggaagctggaagaggagctgggaagggtgattctggcagagtgactcatgcgtacaacgtccccagccggatgtggtcagggctgagtctgtctggagcagaggctttgtgggtgggagcagggggagatgaggcaggtggggggccttggtttggattttattctagggggtggtgggtgagggagccatggaagggtttgttaattccttcatccagtttttattaggatcatctttatgccaagcactgttccaggcacggagggctcagaattggaccaggtgaagaaagtcctcagcctccaggagtttacgttatagtgggcaagacagataactcgaaaataagccagcgtagcagacggcatcagctagtgacaagtgccctaatgaaacatgaggccaggggtggtgccgagcccctgcaaagggctgaggctgctgagggaggggaggaggcccctggggggagtggaagggttcaggggaggaggccattgtggaagctggaggtcagaagaccaagttggagctggtgagatgctggcatgtcctgtcttctaggagaccttggcctgggggtgcttccttctaccatctgcagagctttctccagcccacaaagcacgcgcacctgccccctcctagtgcccataatggccctccaggg

SEQ ID NO: 36736 - DNA, 1372 bp, Artificial sequence
  DNA replication origin
gcgggagcggccctgcccggcgcgattgggcgggggagacgcgctggcggtgtggggttcgggcctccgcgtcgctgaccactgccccctccccgctgtgtgggttctaggccgggttctgagcttgttccgcctccctcccccgggaatggcgctatccgggtcgaccccggccccgtgctgggaggaggatgagtgcctggactactacgggatgctgtcgcttcaccgtatgttcgaggtggtgggcgggcaactgaccgagtgcgagctggagctcctggcctttctgctggatgaggctcctggcgccgccggaggcttagcccgggcccgcagcggcctagagctcctgctggagctggagcgccgcgggcagtgcgacgagagcaacctgcggctgctggggcaactcctgcgcgtgctggcccgccacgacctgctgccgcacctggcgcgcaagcggcgccggccaggtacggttgaatgggagggtgtcacacttcctgggaggaaagggcctggctcccgctgggcctccctggtgccctgatacggacagtgccatatcaggcagcttatgtcccattctgctactctctcttcccacaatatcaatgagcaacataagaggaagaaagcatggctttgggaatttggccacatcagtgatgatgattttggccactgtttacggagggcttgtttcatgccaggcacagctgtcagcccttcatatgaactagtgccttatagtctcccagtaatctcacaaggaagtcctgttactgtcttcactgtaaccaagaaaataacaagttcagagaagttaagcagtttgcacgtataataacaatcctgtttgctgggcctaggagggatacaggatgatggagctgacaaggtgtttgttccatgaagtttaagtttagtgggggcaatcagataataagagaacttatttttagacgctgttgtaggaagactaaaagtaatggaatagagagagtcaggagagcagcaaggtgaagggaggctttgccctgaggctgcactgccagccatgcatagaccccaggggagaaaatcccagggagcatccaaggcctgaggtgggaatgagtttggcatcatcagaggccagtgtggcaggagcagaggggacccaagctagggaagagagggaggtaagaagttatgtcatgaaggggcttgcagagaacgtagctgggaagtgtgggagccaggattcaaacctagccaacttgtccccagagttgatgcccttaatccttgtgaaggaagtgctcctggaggatagcagccttcacatgagaagctgggaggggttcaggctgccggtagccgtgtg

SEQ ID NO: 36737 - DNA, 973 bp, Artificial sequence
  DNA replication origin
gaaggaacttatagactgcgggggtggtggtgggggggcgggatttccatttgggatcacgagagagcacagttgagatgtagatccctggttgtcactagaagtgagggacaatctaatggaggagtgcccaggaccagatcatataaggcctgggagtttactgggagacgggaaagtagtgattgtgttactttgccacgggcaactaggggcagtggtgatgtgggcgtctagctcgtgatcaggagggggctgtagtttatgagatgagtagttacaactactcgtgacgtggcgctacatggccccggtggcttgagtcacgggcaggaagtagggacctggaaccgggtaccagatacagcccaagaggcggcgtgctctcgctctgcgcaagcgcagcactcgcgaaccaagatgcttcggttgggggcaggtcaagcggcccaggaagggcggggcttggaggcctcgttctgcgcatgcgccgaaggggcgtggcggtcgcacctgcgcgagttgggggaaggaggaggggcgaggtgacgcaggcgtaataatagagaaggtgccagaaagatccaaaacaagtggctgcggccgtcgcccaggagtcatcggacgccagaatctggtgaggatccagagaggcctaatggtgactggtggcgggtagacaggaccacctgggctctggggagcgggcggggccgcccttgcagggcgagggggtcgggttcggacggtaccacctgtgtggagcaaaggggctgcctgggtcgctcctctgtgtagggggcagagggtcactttcgggaggtaccacttgcgtagagccgggggactcatcagacggtaccgctggacggagaaaaggggctcgtctgggcagtcctacccagagtcaggggcagtcagcagggagccccggggtgggccccgaggcttgtttgggccgcatcgtttggtc

SEQ ID NO: 36738 - DNA, 1486 bp, Artificial sequence
  DNA replication origin
gctgggggagctgttgctcctgtgggaggtgccccgcttttgccggcgtgagtgcgccggtggtagaggaacttggtcatgttgctgaacgtcttgccgcaacgacagcgatgcaatgggttggcagtgtgggcccgccggtgagccaccaacgtgagttctgtgccaaagccgcggccacagtctacacagaggtagcgggcttccccgcgatgcagccgcaagtgctgctcaagcgatgctgctttcttgaagaccttggagcaggttgtacactcatgtgtgccaccaacatgggcccgcccatgagcctgcagccggttggcggagctgaaactgcgctgacactggctgcagtggaaggggtgggtggcagatgccgggctgtgagccgtccgccggtgttgccggcgagcccctgctgagggctggtgctggggacagtccccgcagccctgagcccagccagctgtggactcgtcacctcccacagcatcatcaccgacctctgccatggcctcctcatcctccatctcttcatcatcttcttcatcctcctcatcgtcctcttcctcctcctccaacccattgcgctcctctttctctagggagtcaaagtgggtgccctgatgctccaagaactcctcaggggtggcgcagagggtagagcactcaggacactcatagggctccatcttgacttcggatgggggagaaggtggaggcagtggtgttgggggaggcaaaggaggtggcactggtggctcagctaccgtagcagaaaggtgctgggcctttcgatgagccacccacagctcgggcgaggggaacagctcctggcagtcccagcactggtattggatctggtttgcagactctcggaggtgggcatcctggtgggccaggagctccccaggggagaggatgagctggctgcattcaccacactggaagggcccctcagcacccggcaccagctccggctccaggccaacattctgtgtggtcagtgcctcctcctctgagacagcaagcatgtgctgctcctggtgtgagaggacttcctccagtgtgttatagaggctgccacactcagagcacatgaactggtgatgctggaagaagagggatgaggcaagggcctccccaggtgtcatctcagtcacttctgttgacatctccatcatctctgccgacataggtgttgacatctccactgcccctggtgacatctgtgttggcatctcggccacctcagccaccacctctgccattgtggggaaggcagtgcctggagaaagaggggcaggagccagtgagacagcaggaaaccaaggggaggtggaattctcttgcacatcccactactcaccagctatcgctcaggaagtcttaatccactgtttctgcttcagtcttccgtgatcccatgtctctgaagcctacacacaccccacggcagcctgcaggagagaaacaccactca

SEQ ID NO: 36739 - DNA, 938 bp, Artificial sequence
  DNA replication origin
ggacaggaggggagttacagctgtaggaggggcggggccaggttggacggtgcgaatcgacgttttctttaagaaaaaaattataacaatctatttacacccgggggccagggaagggaagaggagacgggctgggctggttctatttacaagggacacaggaggggagggggtctggaggaggtggaggtctgggggaggggagggggccaagggggtaggaggtcctcatccccccaacaccctgtccttctcttccctccccacaaccagttaaaatcctcttaaaaagcccaccacaggggtgaggctggtgagggagggactggaggtggggacagggactcatttacctctgccctctagtctaggggcccagccagggcaggagcttgatgggctatggccccccttcccagcccctcttggggctcccagatggaagtggaagggtgcttggtggggccctcaggaggagttagtgagggtaggtgtggcatcggtcgactgccagtctgagctggtcggagtctcagttaaagctggagggaggcagggaaggagcagagttagcctttgcctttcagacaccccttcgcccaacccaaaagtaggaattctcttgtcatagatgctacattaaaagttacaagctgttactttaggtgaagggttgcaaactcaagtgctaaagggccacgatagtaactgagtgacacaccagagtgccaggctccatataaggcggtggctgggctgggcacagtggctcacgcctgtaatcccagcactttgggaggctgaggtgggcagatcacaaggtcagcagttcgagaccagcctggccaacatggtgaaactccatgtctactcaaaatacaaaaataagccaggcatggtggtatgagcgtgtaatcccaggtacttaggaggctgag

SEQ ID NO: 36740 - DNA, 1384 bp, Artificial sequence
  DNA replication origin
cattcccgcggtctactctgaggcttttgtggacttcatttcccggcgtgccacgcggctctctgtgcgggccgagggcggtgacggcggcgcggacgacagccggactgcatctcccggcgtgccccgcggcgggcgctgggccggagccggagcccaagccagagcggcgcggcctggaagaggccagggcccgggggaggcggcggcagcggcggcggctggggcagcccgggcagcccgagccccgcagcctgggcctgtgctcggcgccatgagcggcggcgggccttcgggaggcggccctgggggctcgggcagggcgcggactagctcgttcgcggagcccggcggcggaggcggaggaggcggcggcggccccggaggctcggcctccggcccaggcggcaccggcggcggaaaggcatctgtcggggccatgggtgggggcgtcggggcctcgagctccgggggtggacccggcggcagcggcggaggaggcagcggaggccccggcgcaggcactagcttcccgccgcccggggtgaagctgggccgtgagtactagtggcgcccgtgtagggtggtgattagggttcccaaagctcctcagacatccatcagattctttcatgtgcttagataggagctcgaggtcactgtgcctccccataccggggatccgagccctcttcctcccaggaaaaggagtcttggggttaccatctcttggagatcagaattactcgtggatcagaattactaacacttaaagaaacgggttacaagtctctgttcttccattattgaggtcttgggtccttgagccttaagaacaggtatctgatgttgctattcattataatattggatcagaggtcacagtcgcttgcaaatggggatctagggttattgtctcctaagagaacaagaataagaccaaccccgaaaaagagggatctgcattccctgtccttcagaagatggggatttggagcgaatatcacttagaagcagggctttgaggttactgtgttttgtccccaaagaatagggccaggctttccaaacctggtactcagatcatcttccctattaaaaccaagacctggcatcattacccaccctaaatcttgttgagctgtactgccaatggtgagaattaatagttactgccttttagatataaagacattgggagtcagcatatccttcaaaccaagtccatagtccatgttttaaaatacatggcttggtgtgtctcctttaacaaaaatggaatggagcagggtaggtcacagtttcctacagaatatggatctaaggttatacttttttaataattgttctaaggtatggtgtcattggctctgaaaaaaaaaag

SEQ ID NO: 36741 - DNA, 1419 bp, Artificial sequence
  DNA replication origin
agcttcaccccgggcggcgggaagctagtgcctgcgccggggcctccgctgcctcctccgccgctgccgccgggtccacccccggagctcgaggccccgacgcccccacccatggccccgacagatgcctttccgccgccggtgccgcctgggccggaggccgagcctccggggccgccgccgcctcctccgcctccgccgccgggctccgcgaacgagctagtccgcgccctgcccgagcccccagggccgcctcccgaaggcccgccgccgctcatggcgccgagcacaggcccaggctgcggggctcgggctgcccgggctgccccagccgccgccgctgccgccgcctcccccgggccctggcctcttccaggccgcgccgctctggcttgggctccggctccggcccagcgcccgccgcggggcacgccgggagatgcagtccggctgtcgtccgcgccgccgtcaccgccctcggcccgcacagagagccgcgtggcacgccgggaaatgaagtccacaaaagcctcagagtagaccgcgggaatgatgggcgggaatgacgggtcacgctgtacgtcgggaaatggagtccagggtaatctgtcagccgactgtacgacggggagccctgaagcactttaggaagcagagagcctgatgcacgctgggaaacggagtccactcactcagtctattagctgtgtatgcctcccagagctcggtgcgctctgggaaattgagtcggcccgcgtgaacctgcgggtctcgggccgtgaggcaagccgggaaatggagtcgtcgccacgccctcaccgcattgcaggtgtaaagcgatttttaaagcacgccgggaaatggagtctcaggtggtttttaagccccaggtggatactgcagttccggagatgggcgaggaaatggagtaggtttacgcgctcctctttccaggtacgctgggccgcagtccctgccgggaagtgtagtcagcaccaaggcctcagtgcagttgccacagcgagccctggtgtgttctgggaaatggagttcgacgtatcctccccattgactgagggggcgggatcgcccatgagctccaagcatgctggggaatagtccagacctgaccctctgtgaggccagtctgcggaggcttgccgggaagcgaagtccaatggccaccatcaggggcgtgtgaacgaaaggttagagactgcggcagttccctggagagacttaaaagtgtttcagcgcctccttcctcgcccccaggtccttctttaagaaagagccgaggtcgatcaaggactgctggaaaatggatccaagcacctttaagttccaggtgaccatagatcaggaaagaaaaaatgtcccctctctaaccgcaactctgcaaagattcgggaaacaaag

SEQ ID NO: 36742 - DNA, 820 bp, Artificial sequence
  DNA replication origin
agaatgaaagcgttctcagcccctcccgcatcctggaatggtgggaaatggagtctctggacttcacgttaatccgagcttgtgcttatactaactgtcctgtcctttctgaaaccagaagaaagtcctgtccactcagtttgttcctgactgcaattccccgcggacacaactgcgggggtcggtagcgccaaagcctgttgagactacattacccagaaggcaaagtgcggaacacttccgctcccttcacaaagcaggtggccgcaccacgcgcggctaggcgcgggcgtttctgggagttgcagtttcccagccaaatggtacctgctgccctctgatggcagctctgagtcaaaaagtaaaaatttcagtcgagccccttggcctagggattccaacgcgggaccaagacggctcaaaagggcggcgacatggggcaggatagcgagggttatttaaccgccagaacccgtggggcatgcgccgctgcgtgtgggcaaccgccacgaggggattggggtccgtgggagtttgaaggtgacggtctgcaatctatcaggatgtttgtagaggatgagaatgttcatagagggatgctaggaagggttgtaaacgtctgagagaggcctatgggtgtctagaagggctaagaggagtccgtggagtggtgaaggggtctttgatgagcttagttgacaggataattactggggaccagtggagaagcctgaggggacttaggctgtctgctaaaagttctatgggtgggtggacgcgatggcttacacttgcaatcccagcactttgtgaggtcaag

SEQ ID NO: 36743 - DNA, 915 bp, Artificial sequence
  DNA replication origin
gggccccccagcctccccaggcccctccccacgcaccttcttgtcctcaccctcatcctcaaagcccccagcggggcccccacccccttcgaggcgacagtcttcactccagcgccgcttaaagcgtagcttgaggggcatgcactgggatgccccgggtgcctcgccgggctcaggcttagggggtgcaggtggggcacggggcgtcttgaacacctccccgtcttcctcatcctcatcactgatgtcagtcacctctacctcctccgactcgccttccgagatgggctccaccttgatctgtggtggcgggggcggtggggctagcgcccctgccccctcagccagcccgcctgcactgccaccgctcttgtcagcaccggctacggccttctccccagctgcccgctgccggcgtccgagtgggggcggctggagcttaaacttgaatggggaggaagaagaagaagaggatgacgaggccgaggaggggaccggtggggtctcgggtgccatgggcggcagcgggcacttgtcagggcgctggggctggggcaccaccagcccagggtagtgcaggaaggcgcgggggctgaggtggtagttgtagacgctttgggtgtgggcctgcaggtaccgtttcatgtcctcagggctgaaggagaagtgggagcctccccctgagccgctgggccccccgccaccactggggtacatcgggctcagcgtgggcgagggagtgtaggccaggtgggtgggcgtcatgggcagagccggggagagctgagggggcagcagggatccaggaccggccagaggcgacacagggaaggggctgaggggttcagggccaccccgaggccggggatagactcggaagacaccagggtcatggggcaggcgggccagcggggg

SEQ ID NO: 36744 - DNA, 1008 bp, Artificial sequence
  DNA replication origin
caagggggcctgggacagctcccagaatgcggcttgaggcctttccagagcccccccacctcctttccgagttccctttgtgttgcatgtagtctctctcactccctctcttctgcaaagtttatttttagcctcctgctcccccgctcccaggactgtcgctgcacacacgttgcctggttaccgggacacggaggctggggcgggtgggctgggaagggtggctttaattttggggggagggtggaagtcagtacatcccccacccccagattgatgtctcaggggctttggccccccttctaggtctagagccagattggggctgaggtggaagtaacatggagcttggttccctgagaggggctgggagctttttggaggggatatgagggtccatgaagctggtggctgggtcacctgggttccaaaggaccctgggccttgcaggagaccttgtgatctggattctctagaagggtgaggataatgggttgaacacctagattcccaagagagcgatggtgctctggggtctctggaaggggttgtcaaaggctgtcacttttaaatggaacaggggctgttggtgctggtctgtgaacagctggaggtcatatccctggcaccctgaggggctggtggaaggctgggatatatctgaatggggcagggactccgggggctatgtggtactgcagcccagtctgggcaggagttgggggcctacagtgagctctggatttggagggggtggtccctgtgggagcaggaactactgattccctggattcccaaggggaaggatcccttgttggattccagacttgggtggagtctttgagggtggatgtgttgcctggaggccttgttggtacctgtttgagctggggccaagggaggcggattgacccctgcagcctgactggatttgggagccgcccatctttagctggccaccttggccttctctctctagtggcaccagggaccctgctctgcctcccc

SEQ ID NO: 36745 - DNA, 1422 bp, Artificial sequence
  DNA replication origin
ggctctagacctagaaggggggccaaagcccctgagacatcaatctgggggtgggggatgtactgacttccaccctccccccaaaattaaagccacccttcccagcccacccgccccagcctccgtgtcccggtaaccaggcaacgtgtgtgcagcgacagtcctgggagcgggggagcaggaggctaaaaataaactttgcagaagagagggagtgagagagactacatgcaacacaaagggaactcggaaaggaggtgggggggctctggaaaggcctcaagccgcattctgggagctgtcccaggcccccttgttaaaccccttccctgagcaacccctcctccagggcctggaccctggctcccacttctggcagggacccttccccactcccaagcccaccacaacggcggctttcctcatcggacacagcatacatgaaggcctgttcccggctttgggggggggagaatgaagagggggtgacgtcagggtgtctcaatggggctctgttccccaggccttggagccaggagccaggcacgggcaaggggagcatgtgtgagtgtgctgtgtatgcgtccacgtgcttaaaacagggaaacaccagacctgcacggaggaagcttgggggtgcgggacctcgggaacatgggggccagtgaggcagggagagagcaggcacatggagagaggggttcaggagactgcgagacagagtgcagaagtggcagcagtcagacagcaagggctgggatggcgaggtcccagaagcacacctgggtcccacagaggcggggtagggattctcccagacagactatgcaagcctggggggacaaaactcctgggcaccccccaacctcacgtgacggcccaaactttttttaagggactatgagggtcggaagggaggagtggtggcagaggaagaacacgccggcctcctggggggccccaccacctcccccactccaggcggccctctatggcgccagagccgggaagaaaacaggaagtgggaaacagccacggcagagagagggaccgggatggagaactggatggaggggtgcggagcggcaggccaggaggcagacgggaaagatgcaccgatcggaggccattccaggcctccttcccctcccctcccccagccggaaaacccacacactgtcccgccccccgacagggttggggaagcgacccgcggatcctatcaggccaaggccggtagcagggagagaagatgaagcgaggttgtctgggtgcctcggcctcctccttgggcgagggtaggctcctgctgcccccagggcccagccacccgggagcgagtggaagccgggggagtgtgtaggacgcacgtgactgaccctaccgcactccgcaccccggccccacccccagggcccctcc

SEQ ID NO: 36746 - DNA, 1060 bp, Artificial sequence
  DNA replication origin
ctcccaaaagaaactctggagcccgcagtgggcaggagaggaggaggggcagcaggtagcgagtgccgaagacttaagttagctgcagactcggagcctctgactagggtcatgacccgcgggaccccatcccacccccaccccctccttcctccctcccccgccgcgcggcccctttaagcccagagccggccggtcctcagtggctgcgcgccgacgagcgtgtgtgtgagtgcgcggggagggggcgggcgcagtgtctccatggcgacgcggcggtgacgtcgccggccggggggcgtgggcgtcccggccccggagtgcgatattaacccgggaggcggcggcggggaggggagaggctctgagaggcgaggccgggtgaggcggcgagggcggcccgacgggcgcgggacgggacggggcagcgagggcgccgggagccgcggcccggaatcggggcgcttcgccccgggccccccagcatgaagaccccggcggacacaggtgggggcgggggcagcacgtgtgggggagacttgttgccccgggaaaccgaacggagaaactttgggggggctgaaggggtccgggggagcccgagtgatccccagttctgggggacccctcaagcactggagacctgttgcttctcgtggcgcgagcggggttgctgcctgggacccccgattcctggctccgggcggagtggtgtgggtgctgcgggtcttggtcctgtatccctaccgggaccccgcaggccgggctctcccccactcccgggatcacgggggtggcggggtccttcccctccgctcttgtcacgttgcactctgggggccgggacgtgtgcggggcgggggggctcgtccaccgggcccgctatccctggttctgcgctgcgcggtcctgctggtgaccttcacggcggcgcgtgccctgcaccaggttagcgggggatacgggatggcctctaggaggagggcgtgagtggggagcccgggactcggggtcctggctgcgccgcccctcccccgcccgcctctgtcggctcctcgct

SEQ ID NO: 36747 - DNA, 2021 bp, Artificial sequence
  DNA replication origin
gcttgaggggtcccccagaactggggatcactcgggctcccccggaccccttcagcccccccaaagtttctccgttcggtttcccggggcaacaagtctcccccacacgtgctgcccccgcccccacctgtgtccgccggggtcttcatgctggggggcccggggcgaagcgccccgattccgggccgcggctcccggcgccctcgctgccccgtcccgtcccgcgcccgtcgggccgccctcgccgcctcacccggcctcgcctctcagagcctctcccctccccgccgccgcctcccgggttaatatcgcactccggggccgggacgcccacgccccccggccggcgacgtcaccgccgcgtcgccatggagacactgcgcccgccccctccccgcgcactcacacacacgctcgtcggcgcgcagccactgaggaccggccggctctgggcttaaaggggccgcgcggcgggggagggaggaaggagggggtgggggtgggatggggtcccgcgggtcatgaccctagtcagaggctccgagtctgcagctaacttaagtcttcggcactcgctacctgctgcccctcctcctctcctgcccactgcgggctccagagtttcttttgggagcctgtatgggaaaacggggggcccttccgaggaagcgggggtcagaaacttttgtggggagggggcagaatcttctctgcagaggggcggggtcaggaccttagaagatgatgaagaccacagcatttcccagcttggttttacccaaccccccaaccctgagcctgaatgggggcagctgtccaggggtggggtggaatgggtgggatgcatttcccagcatcggaaatggggaggcggctgtgccctccgctcctgtggggatggggtcttggcttccctgataacccccgtccagctggggaggaagtgaccagagagaatgcatttggaagcccccaccaccaccgtccccaggctgcagctgtcccggggatagggctggcgccggaggtccccccacgtccactactaggaccgggggttccggaggcggggccgggatacgagggggcgaccaaagtctgaacaaatgtgctcccaaggggcactgagggtcgccaggagagaggaagacagggcttaagatcgaaagccagagcgtagagaagtgttaagtctccgttctctgcctcagccgggagggaaggatgaagcctgaggctctgggaaacaggaaatcacagcgcagatctgatggagcccaggagccggcagcagggtagaggccaaatagaagcaatattcacaggcatagcctggaaacagagtctcaaaaaagactctgaggttccgaaggaggggcgtatgggtggcgggcgggagttgggggggctgggtgggggacgaatccagaagatgggcggggagacagaaaagtcacagatagggaaggcctgcggagctcaggctcccggtacccagggcttcaatcccagcctcctcgcttgcggggtacctagtccaccttagacaggctcctcaccagtgcctaaaaaaaaaagtctcaggcctcctccttggggagaccaagggctccagggaagctttcccccacaacccccgggaattatgtaaccttgcctacggacagtacagctcccccacggatattgtaaccctctgggagcggtgtggtccagcaataataatcatcttcattgttcgaataacagctcccgaattccgagtgttcatgatgtgccaggcaccgggccaagcattgtcaggggcatcttctcatttaatcctcacaaaatcccaacgaggggaattactgctgttatccccatttacagataaagaaagtgatgctctctgagggaaaatcagtccactaaatcttacagccaggaagtattggaactaagattcgaacccagatctaaccaattccaaaccaccacatttaccctttaccattatgctttattacctcttttactac

SEQ ID NO: 36748 - DNA, 1663 bp, Artificial sequence
  DNA replication origin
gcaattggacacgactggtgtccttcacttgttgtagggtagggccctaggcagatcaggcagtcgtaggctcaggttggtgtcggtcccggagggaggccggtcttggactttggccccgccccctagcgctgcccgatgggcccaattggtcgccgcgagcgtcgctcgtcgtcgagaggcggagccgaccagtctgcggatatctattggtctaggctggcgccggtcagtggggttgtgatcgctgattggctggctgctccagctgttgcaggtccattcaccattttgtgtgttggagtaaaaaaaaaagggagaatcgagagggagagccggagggggggcggggagggaccggaccggaccgagccggggccacggccccccgccccgaaaccccgccgagcccaaggtgaggggcggggccagggctgacacaggaaaggggggtccggggggctgggggccgagaggggacaggtggcagggacggggagggggtacagggggaaaggggtgggcggaatggtgggaagggaggagggagtggaggaagtggtgggggtttgacagaaaaagggtaactgggggagggggtggtgggcaaagaagggtaacaggaatggaggggtgacaggactagatcagggtgacagggagagggaggggacagagttggagagtgtgacaaggagaggtgatggggagagaaggtgacaggtccggagatggctgacaggacagtgactgggaggaataggtgacagagataaatgggggtgacaaggagggggtgacaggagggggcctagggcattttaaccgagaggtagagatagaggtagtgacaggatgagagagagagtgtcagagaagctggtgccaggagggctaatgggaacagagggtatgagaccccaaagagccagggcctgggctggcctgggctccgggagttactactcagatctgaggaaggtgagggcccccggggcttgggtgggagttattcagacagggtggacaggaagagagtaggccctaggggaaagaaagcagctctggggcgaagagaggctgggccaggcagcaaggtctaggggtccaggcggcatagttgtaggccctgggtggggtatgcaaaggtttgtgcttggaaaaaactggagccagatctcagtccccaacatggtagtctagtgggtcagcgggtattaggtggtgatggctgcccaacttctgggcatttgggtgccagccccgggacgccctccaggctctgcctgtgaggaccccaggattggcccaagaaagggcaggcctgggactccagggtccacaggaggagcaggcccctagtgagagagcatgaggtcaagggtcccccagtagctggaagactgagtcggggttgcctctcattgtgtttggcttatggttctgggtcccccaaccctcctagaggcctctgttttggcctctcaggttctcttagtcacttcagagtaaagttttttccccttttcttttctcagggcagctcgaaagggggcgggcagtaatgactgttcaggaagtgggtgaggttggcctgttgggcttgtcctgctttctttgaccttatcccacctatccccacttggagttggagggcatattt

SEQ ID NO: 36749 - DNA, 1700 bp, Artificial sequence
  DNA replication origin
cgactcagccaccctgccagagccagcccagccagggcggggatgcatgcaggcaagaagaggggggctgggcttgcgggtatcacgctgggtgctgtggggggaggagcaggctcccatccagtgggacagagaaaccctggggtgtagctctgtgtcccactgtgtgatgacgtgtgcgtgcttctgtgcgtgtgtgtgtgtttgtgcgcgtgcgtgtgctcatgcacggccccgtggcagtgctgggtatgagctcttgccccagacatgcccctgcctgctccctgccaggatctggggagatggctgtacctggcagccctagggtgcagagcagagtgggcagccgtccctcgggactctcagctgcccacttcttcccacagtgcctggccatgccaggctgcccagaggggcagagggagggtgggggggtggagaaaggctcatatcacagcccagtcaccaccctttttgtgacttggtacttgtgcatgtgtgtgtgtgtctgagtgcatgtactctctgcatggtgacagtgcgagtaaatgtgccctctggatcatgtgacaggcagcacactgaaatggtcaggagcacggactctggagccagagagcctgggttcagaccctagcactgctgtttcccacctggatgatcttggacaagttgtctcatctttttgtggctcagtttcctcaggtgtgaaatgaggccgatagtagcacctgcttttagggctgttgtgaggatgaaacaggttaataaaggcaagcttagcatggagttcaggacacagggagtgctccataggtgtgaactgttagtgcttttgatgtccccttggggcattcagagcatgtgctctgtgtcctttgcagagccagcaggtgtctgttccccaaggagccagagtgtgtatactcaggggactcaggtgctcacctgtgcctggtgctgactgaggtatcacatgagttgacagcagccagagaggaggccttggggatggtgggatggagacagtagactcagcaagtgggaaatcttagggtacactggctctggagaggttcctgagttgctccgcgtaatcctccgctctcccaccctgcaggtggacaaaaatgaagccaatgaagaaggcatgcactggcctttcaggtcctggcagtggcagcaagtcccccccagccaccagggccaaggctctgaggcggcgaggggctggggagggtgacaagccagaggaggaggatgacgaggcacagcagccgcaaccacagtccgggcccgaagaggctgaggaaggggaggaggaggaggctgagcggggccctggggctgaaggtcctccactggagctgcaccctggcgacccggctccaggcccagcagaggaccccaaaggggatggggaggcaggccgctgggagccctcactcagccgcaagacagccacgttcaagtctcgagcgcccaagaagaagtatgtggaggagcacggagctggcagcagtggggtggctggggcccctgaagagcgggtgcggacccctgaggaggccagtggcctgggggtgcctccacggccacccacctccactcgttcctcctccactgacacagccagcgagcactcggcggacctggaggatgagccggctgaggcttgtggtccaggcccttggccc

SEQ ID NO: 36750 - DNA, 1103 bp, Artificial sequence
  DNA replication origin
tcacactcgtcgaactcaaagcgtgacaagtcagcaggggccaccaggcgtggccgtgagtctccacgagccgccacactgctggcctcactgtccctcgacgtctcatcaccccagtcaaactccgtgctgccctcacgggctgccacggccgcgggccggcccgccccgccaggcccactgtctgccaggccttccatctctttggttcgcatggacaggtggcgtgagcagtagcctcgccgctgtgactccttcatgcagccatctcgtgagcacagccggcgccactgcttgccgttgaacttctttcgtattccgctgggtgtgcagaccacatcgcccttcttgtacttctgctgggcggctgtcagtggcgtgcgggcccgggctgccggtgctgtccccttttccagggaggccacgctgctgctgcggctgccgccctggctcccctcctggcagggcgagggctgctcgccagggcggccggggcccacaaaggctggagacttgggtggtggtgacaggagctggggtgggggcagtgggagcagggctggggtacccagggctggagggtgcttctcctcgccctcctcacagtgagtacccaggttgccaccaaagctgatcttagagacctcagcatcctcgggctgtttggggtccagggcagcagggcagggtggcagggtggccccaggctctgcctgctcttcctcagggcctgtagggggcttcctcagcatggtctcaggttcccagggggggcgcagcaggcgtaggctggagcgggccacccacacagcctcctctggctcacggtgcagtggctgtgggggctgcgggaggctgcctggtaggcctggctgggagctggggccagggctgagacggaccttgtaggcagctggcttggtggccacctccaccaccacaccttcccggtaggcagccacgccgggctccacacaggtacagacagctgtgcccaccaccagggcacctggtgggggtgtggcatccaaaactacatccacaccagcgcctggcaccccctcatagaaagtcagggctcggtcaccagggaactgcacgcc

SEQ ID NO: 36751 - DNA, 1547 bp, Artificial sequence
  DNA replication origin
aagtgctctatgaggtggatgtgaaaatttggcaagctcacctacacgcagtgcttaccatggcaatgccctcgcccagtcccccaagatgtggaagctgttgccacaattatcattctcttatcccatcagctccatggagacctgactcagtctgcactcaagaaaggtttgctgactgatagacctcttgagaccacgttctctgacaggaggcctctggaaacggtgccttgagccttaaaagtccaatccctttcctgacatgtgaattccaacagcaacatctgtgcagagaggaggccggcctccccttgaagccctcccaaggtgaggagctcacctctcaagagttcagcttgcaagaggccctctacgaggtgagcctggcgcagcccatccacttccacctcttacctgttccaggccggcccatgatgacttccttcttgggggcagggtggctggtatagctgctgggcaccaaaacgggcaacagggcagcaggtgaggggtggaaggccacaggctgaaagggtgaagaagccaggccaaaggcgggcatcggctgggccacggcagttggtgcagctggaggcacggtgatgggcacgggggctggcagaggtgggggcaggccaggcttcccactggccaccccagggggcactggggtttcacggcagccccgcccaggtcccccagcccgcacctcaccagcagtgcccacctccccagggaatttggagggcagtggcacatcagggttgcggacaataacaggtgagtcccgctgcacagcaggcaccctgcgcacagagggccctggatccgaggtcaggccggcagggggtggcaacagcagcaatggtgagggctggcgggagcgagagaagggcacagcaggggacacggcccggaagccagccggcgtggagggtgtaggtgtgtgggacactgagtccacaccagagtctaagctgtcactcttgggaaagtctggggcggctcctccaccccctgcgccaggggcccccaaggcccctggatgcggcaacagctctgtcttccgtcgcccagggctgatgggcacggtgaaggtcaggttggtctggaaggtgggtaggattccagaggagtggcgctctcggggggcaggtggcggtgggtgggggcccaggtctggtggcgtcagcacgcctgccttaggggtgctggcgctcaggtggcgactgcggactgcagtgcgctggatgactggtgaggcattgatggggctaaagttggcagggcggaagccgaagagtggtgagggtgagggtgatggggctggcgagaagggcgattgagtggagacgggtgagaaggagggcgtgcctgagcgcgagctgcccagcgacaccagcatcacggccgcctcacactcgtcgaactcaaagcgtgacaagtcagcaggggccaccaggcgtggccgtgagtctccacgagccgccacactgctggcctcactgtccctcgacgtctcatcaccccagtcaaactccgtg

SEQ ID NO: 36752 - DNA, 1304 bp, Artificial sequence
  DNA replication origin
ctctctttggccctcctactcccactctttagatggacttgctgcccccatgccagcctcccagccccaccctgtgcatatcaggtgttctgttcttttaagacagtgggcagttgccaagcaccaggtctcctacttccttcttggggagtgttgggaggttgtccaggccagggagccccctcatgctctttgacaaattaactgcctactactgtccctgaaatctgctgagaagtgctgagatccatcctgcagacccatccaccatccaagcacctgttcccaagacaggcaggaaagcgggggctgtatggaccaagctaggagatccggctgtagggggcggcaggaaagaagcttcagtgcccacccacctgccagagggcatgacccaggtcatcctacctccccctttaccccttgcctttcatttgatgccagcttcattgaaaggagtcccagatatagtgcaccccaatgggtagggcctcagagacgaggcagtacccaccaactatgcttgggcaggtggggaaaaagaggggccaaaggggttaagcctgggtctcctgactccccagatccagatactgcccaccataatttccattttgtttcaaacagtgaaccctatctccaccagcagaagccagctccctcctcatccctctgccaggcccagggctgagcagtcctggggcaggtgggtgaggaaggcagatgtggatgcaggcacaggcaaggatgagcccagggaggtactgagtctggggaagccaaggggcagggacaactcagtggttcatgggggctgataagggaggatcaggtaggtttctcactggaggtgacatttgagctgaagtatgaggaatgagtagatttcagaatagtcaaagaaaggaaaaggcaattccacctgaaacagctgcatgagcaaagaccaggaagagtgaaagtgcatgaactccgagtggctagttgaggctggagctgacaccagagtccaggcttagcagaagggtgccgtggacgacaggcccagcttgaatgccaggctgagaagctggggctctacgcgggccagtaaagagtcaagaaggcatttagagcaggggagggaaaatgttggatctaggtgtcagagacccctggagaccgccctggaaaggcaggagttgggaagaagatggcttggggaagaggaggagaggaggaagagcttgtgaaggtgcaggagtgagtcttggtaactgtagaagagaccccagctcccccagcttagcagcccccagcaccag

SEQ ID NO: 36753 - DNA, 1862 bp, Artificial sequence
  DNA replication origin
tctctcaacccccccacccccgcatcccacccatctcccaatccctggggaccatcccccacacactctccccagtctctcttttcctcctggtccccctgcctaccccagccccactcacactgactcaccccggcgctatttttagccccccatccttgccgagccgcgccagcccaatcctgggctcgttccccaggcaaccctggccgtcgccgacgccgcccggggtgggtgggtgggtgtgtatgtggaaagcgggtgaggggagctggggacaccggggtggtgagctgaggcggggacccgggcctggagagcagggtggggagccgcaggcggccggcaggggtgcggtgcctcgcgggctcaataaatgggccccatgagtttagagtgcgcgtctgcctgtccctcggtctgtcagcatccctggctgctcgccccaggcctctgggcaggcctcagcctgtaccgcccgcccgggtggctgttgatgtcttcgtctgggttccctgtccccaggcctgggtgtggtggcacagtgggggctgtttaggggcagtccttctgtggagttggttaggggttggtgcagggggtggctgccatcacagtcctgctcagtacctttttccaactagggaggccccaattagggttggggatggcaagagagtgggagctgtctagggataggacctgctccctcccctctgctcctaatccacccccacccagggttcctccaccctgaacaatagaagctaagtatagggctggcccagcgcccagggcaggggggcccttcccgcccggattcccgcccctccctgccaggctaggcccccacttggttgtaccctgccccggacggggcctcttcccatctctcctccgtgggcactgtgtattctaccagatgtgcacccctcccagatgtgtggggccctctttccctcctgtgccatgcctggctctttttctcaaccaacagaagtcggggatctggggggcagagctcctctgagctctgtccttggactgcattgcagtagagaaggggttaacttgccagtaggtgactcactcaccggtggggagaggagggggcagtggtaggggcagtggtggggagatagcaggccacattgatttcagcctcaattcgtgcctcacattgcagtccctggggcagtgaagtaatggagggtctgagtctggggctgcataggaaggagggggcagtcacctaatagtccctctggttgcccctccaggctcacagccaagtgtctggccctgcagtctctggaggtcagagggctacagaccttcccttcccttttgggctcaggttacccagtttttgccccctctccattccttcagctctgtcagtggatgaggcaggttggggaaagggctcgtctgctcctgttgaccatccaacctgtgtaagagcccagtcttggtccatctgagcctgtgcaacctttacgtgcccaagtgtgtgaccccagtcctgtgcctttactgggtatggctccagggcccctcttgggtgatccagggcctctgggtctctgccagatgggctccacatccttgcctgtgtctttgtgtgagcccccctcgcctttctgtggtccacgtggctctgtatcattgtctaactatattccccagcctctgtttggagttccctccctgggtccaccctgaggttaagccttgagtaatggaaacagcacttgagttagagctctgggctggtacatcttgactgcatgatcttgccacagtttattcaatctctgaggctcattttttcacctgaacaatgggtgtaataaagcata

SEQ ID NO: 36754 - DNA, 1191 bp, Artificial sequence
  DNA replication origin
tcctgtgcctttactgggtatggctccagggcccctcttgggtgatccagggcctctgggtctctgccagatgggctccacatccttgcctgtgtctttgtgtgagcccccctcgcctttctgtggtccacgtggctctgtatcattgtctaactatattccccagcctctgtttggagttccctccctgggtccaccctgaggttaagccttgagtaatggaaacagcacttgagttagagctctgggctggtacatcttgactgcatgatcttgccacagtttattcaatctctgaggctcattttttcacctgaacaatgggtgtaataaagcatacctccctaggtggctgtgaggattcaatgaaccagataatacatacaagctcccagcacacagcagccccagtaagtgttagtttcctttcttcctggccctttttttctgggagggggggcggggttagtgggtggctggcagagcagtgtggtggggccagccatggtgtgctctgtggttccctgccttatactgctagacagagggtccagagtggccaatgagtgtcagggtgggtggctgaatgatggcggtggccactgagctctgtatacctgatgggcctgggtactgaagcaggtagcacccattagggtaggattatatagagggtggggtcggtatgatggtgtctgtgagagctgagtgtgcactggggataggaggcgctttgtgagtgctaggaaggctgtgtgtgtgacggaggagtgtgtggttgtgtgggaggggtgtggagtgtgtgtagtggacaagcagggctatgctgagttcctcctgtttgacatgttgtctgtttgcatgattcatgtgggctggtgggggtgtgatgaggatgcgggttggcgaagcatgtgtgacagggcatggatgagatgggtgatgtgaacaggatgggtgaatgcacgatggtgggtggggagcgatggaccgtgagcgtgtgaggttgtacatctgtgtgagcaggtatgtgaggtgtgacagcgtgggtgtaagacagagggcatatgtgcccgtggggtgtgtaggagataatgggtgtggcacgaaagtgtgtctgtatgtctgtgaggagtgtgagtgtgagtaggtgagggctcaggatgcctcgcccagccctacgcgcagttt

SEQ ID NO: 36755 - DNA, 1299 bp, Artificial sequence
  DNA replication origin
gctgcgagggagggagggaacgagcgagccagcgagcggggaagggagggggccgcccccgcgcacgcgcgtcgcgccccgccccgcctgccccgcctgccccgcccgccggactccgcgagggaggagggagagggagggggcggtgccgatggcccccgtgccgcgcgccccgtgacggcccccgcgcgcgccggggggcggggcggggccggtgcgcgctgacctcccccgccccccgggcggcgggaggcaggcggcgctgtgcgcaggcgcgcccggcagagacccccgcgtggggcggccggaggggggcggcgggggggggggcatgcggcgacggcctcccgctccccccgggcccaagcggcgacggccgaggagcgggctgcgggcggagcggcgtcggccgctgaggaggtgcgagcccctgccgggtcccccctgcgccggaccatgtattcggcccacaggcccctgatgcccgcgtccagcgcggcctcccgtggcctcggcatgttcggtcagtagcgcctgggccctgggactgcaggggtcaaggtgtcggggtgctaagtgcggagtaacggtggtgggggtatagtaggggagagaacagtagaggcagagtaaagggatgacggggaaagttacggagctcggccgggccgagtggttagtgatggcaggtgggagtgtagcggagtggggcgtatctggggacagctgtgatgttaaagtgatgggatggcacaggtccgctgtaatagaaaggtgaggggtgcagagtaactggctctggagcatggggtagaataggaacagcacgagacctgctggtcctaggggaggaggcttggattgggtagtggggctaaggacagggctcaggaagcgagtgaggcactgttagctgagatcagagtgacaggctgcagtgtgtggtgtagtttgcagagagcgcgacacctaagaacctggagggttgtgcactggggaggggttcaggagggagcaggaccaaaggactgccctccattgtctgctgggtcccttttccccaccccccagaaaagaggaggccttgatgggaaagatctttgcaaagagaggcacaggtctaagtccctggaggcttttatatggggttggagggcccagcgggttttcaggggtaagggacagggtcatcgtagtcttgagtgctcttcagtgctgtcttcgtgatcccagtcccttgtttcctgaggtctactttttcctttgtcagcccctctcagaatcaggtctcgaggccag

SEQ ID NO: 36756 - DNA, 1005 bp, Artificial sequence
  DNA replication origin
aggttgatccggatcaagggaaggcctggaatgatggagagcagggctagggcggttccctcctcccttcttcatcttccccgagcaggggcctctctcctctgctggttccacttcccccagggagccaggcagtgtgaggggaagcccactggtatcctaggcccgccccaaaagtccagccaggggtaggtcccagcctagggcttgctcttccaccacccacctcttggggctgaaggttggacccctgggaccagcctcttggtgaggaagcatcttcctgtgcatatcctcaaggaaacacctggcacttgtgccctctctgggtagagacttgttacaattctctcttctggcccattgtccgtggtttttcttccaaggagtttaccacaccctcccctgttttgggcaagggggctggaccctggactacagataagccgaggggctgatggggaagggaggctgggaggccgatttctggatggtgcattgtctttgtgggggcaaaggagagagctgctggagccacctgtgcccagccaggaagggcaggtctggcactctgtgtttgtggtgggggaggaaggcaaggagcaggacctctcccacaccacagttgtaagagaccccacagcctgtgcatagtgaacggagagttggaggggaggggacgtggggccgtatgcctcaggaaagggaaagagagcatgaggccaaggtgagacgctgtgttgggcggcgactgggctgctgggaatgtggcatgacgggggtgggggtcccagcccgtagaggtctggggccttgggagtgtgggatggcagccaagcatgacctggtttgtggcaggagcaaatcgttcctctggcctggtccctggtggcagggctggtggagattggtggggggaggagtggggcgtgagtactatttcccttccctgcttctgttttcttttttataaatctagaaacctttcagggaggagtttttcct

SEQ ID NO: 36757 - DNA, 974 bp, Artificial sequence
  DNA replication origin
ggaagagcttgagttggggttggggccaggctctcctgctgcacagctcacctggctcctttccacagtgtggacgaatgtggaacctcgctctgtggctgtgttcccttggcactccttagtccccttcctggcacccagccagcctgacccctccgtgcagccgagcgaggcccagcaacctgccagccacccagtggcctccaaccagagcaaaggtgagggctggtggggactggggggaggcaagggtgtggggtccaggtggcctaggagccctctgatctacctctgtgtccccagaacctgctgagtcggcagctgttgctcatgaacggccaccaggtgggacagggagtgctgaccctgagcggccccctggagccacatgccctgagagcccaggacccggacccccacaccctttgggggtggtggaatctggtaagggtccgcctcccaccacggaggaggaggcctccggccccccaggagagccccggctggacagtgagacagagagtgaccatgatgatgcgtgagttccctgaggcctgggacttgggggtgggatggccagagacatggccctcactgtccctgctgccccgccgcagcttcctctccatcatgtctcctgagatccagttgcctctaccgcccggaaaacgtcggacccagtccctcagtgccctacccaaggaacgggactcatcttctgagaaggatggacgcagccccaacaaggtactttatccctgcctgtcctgtgctcaccccgtggccacccacacctgtctgccaggtcctaactgtcccgctctgggctgtgtttaatgcagcgggagaaggaccacatccggcggcccatgaatgccttcatgatcttcagcaagcggcaccgggccctggtccaccagcgtcatcccaaccaggacaaccggaccgtcagcaagatcctgggcgagtggtgg

SEQ ID NO: 36758 - DNA, 1005 bp, Artificial sequence
  DNA replication origin
cccagtgcccatttcagtcctggcacctgctgtgtcatttggagacgcctcagcccggccagaggtggggaagggcttagaggcgatgggcacaggagtgctgctgacaggccgcaccacattggtgaccatggtggcggcaggacgggacaggggagctgctggggccccataggccagtgatggggcgggggcggagggcactctggctccgccgccctcttgctcctccttgtttgggggcagcaccagtgtctgcaggatgtttcctcctccgctgggaggggccgcgatgactgaggggcctggtggctccaggccacccacactttcgggtctcttgcgccggaaggtggcaggatccattgggaggaaccgggttgccttggaaggtgtcgctggacccccagccccagggggtgggggccgtagggggcccgctgtgctgccctgaccagactcctgggccttgaaggttcctgagcccagtgagaaggaggtggctgccgaggctgaggaggaagcaggcgaggacgcagaggaggatggggcggaaccatagcctttgccaaaggctacaggaggatccgggggccctgggggctcagggtccagtggggggcggcagtgggtaaaggaggaacggatcacaggtgaaaacaccttccgaccaaagccctgcatgaaaggaagggagacaccccaggtcaggacactccgacacctcgatagcagccccctagccatgcccatccagcctgtcagccaggccagcctagggctgcacccctgccagctgaaggcctcaattcatcctgactatgacccaactccccacggggcaagcagcttgccctctctggaccttaatctccccctctctcaagcccgggagaaacagacattcccatggcttaggagggagtgtgatgggacagcaccgtgacccaagccctcaccttgttgccctctgggtcctccccagagctgtccccactctcgctg

SEQ ID NO: 36759 - DNA, 831 bp, Artificial sequence
  DNA replication origin
gcccacctgaccgggagccagcagtggggcttggcctgctgaaagacagagaagaagaagcaggagaccaagttagggcccggactgcctcagccccaccctgggtccccagcactgcctgccaggccgcccctcacctgagagcaggggctgcacgaaggcggggccgctgggccccagcgaggtgaagcctagagctacagagctcgtgggcccgtacgaggtgactgttccagcctggctggacgcagggctggtacccaggggcagcgcgtgcccgcccgctgactgcacataggtgattctgccgcaggagaggaaatggggaggagtgaggtaagccggccccgccccaccccttccctggcctctgagtatgggctcagctgcaattacctggtggaggagggcaacaggaccttctgaggctgagaggtgggtccagggagtgtggctgggctcaggggcggcaccaggccgctgggtgtgctcacaggcaccggggtcagctggatgatctgtggagaagggcacccataggccagggtgagctgtggccccagactggggcaggggaagaccaagacctcaagtgggactctaagcaaaagcaaggaacacagaacttggggtgagaacaggatgggcaagatgacagtgagaggtggggacacagagaaggaggagggtacagacactgaggacttgagagagtcaggatgcacagagacatcacggaagatggcaagacagagaaccagatacatggagaaggagaaaagactgaaaaaaaagacaaagaaatgatggggtacaggggccaacatccag

SEQ ID NO: 36760 - DNA, 1381 bp, Artificial sequence
  DNA replication origin
gcctccctgtggcccaaggcctgcaccaccctccagcttgcagccctcacaggagccattttgcataaagtgaaaagctctgaaggtcacacgctccaggttatgtacaggggcttggaggagggagactgcccctgcagcccctcagctgccccccagcaccgggagggagcttcgagggaagggggtatttacaagaggagcaggcctcattccgccccaaactggagaggacgaaatggctttacccgggaggagataaccttcctgcccccacatactgtccatgtcctgagggggtactataagtcctggcatcttctcaggggtccctcacctgcctgtggcagctgtggagggacctgggggtgggggggagggctggggagccccctcccagccaggctgtccaggccccgactctgggggtggaggcagtggcggggcagcctgggccgtgccagagtccgagctgggtgaggtggggtcagggccccctgcggggctgggagtgggggcaggggcagcagcggtgccagtggggggcggtacagggagaggagcctcagctccagggggctgctccgtgggagtggcagcctgcatgatcttctggcgcacctcacggatcttcaactgcagacaaaccttggagggaaagatgtctgcatagcgggcctggaaggcggctgtggcctgggctggagatagaaaaacggtggggagcacaggatgagatgtacagataagtcccacccgagtgaccccaagactccgagacaggctcacctgacgggaagaagccatggtcctgaaagagctgcatgaccagggcccggcgctggtccagggtgcgccgcagggaggagtatggcaccttgtcatactctagctccccaagcacgtcctcggcttctgtacctgtgcagggcacaggcagcatggcaaggctgcagcagcggcagggccttcctgccaccgtctgagtgcccacccaagccctcactgcattctatttcacaggggagtcagagaggggtcctgcccacagtcacagggcaacctaggggcctgccagactccagaacccaccactgacaggctgtgcttcctcccagcctggatggacccaccctacctctctcactctctaaccgccttccagagacccactcctcttgcaggtccccaggcccccaaagttctgcccaccacggcacctgtacggtcaaaggtgaagatgtccccctcgcacttggcactcttgggggtgttgggctccgagctgcagctggagcgtcttctcatcttgcgcttgggcgaggtggggtcctcgggtgctgaatccaggtctggccaaacagaagcagactcagtgcag

SEQ ID NO: 36761 - DNA, 998 bp, Artificial sequence
  DNA replication origin
ctcctctccagggacggaagccttcacttaggaggtaggtggaatcaggaaccttcgcttcccccacgacggccgcacagtgggctcgcccggcgcttcccgctcgggccgctgactcccaggccgcgcacccggcacggggtggggggagggagaggcgagaccatccagctcccgaggcggggaggagggagaaaccacccaccggtcacggggaggggcgaactacctgaagagtcgagagtgggcggggaaaatctagccctctgtctagcaaatgggaagaaaccatttgctgtacagagtgaaatgtgcggaagggaccacctactgttgcgggggggggggtgacccattcacgtggtggggggaggggagcgagtggacgagtccattcttatattcccttgaaggggtggctcgaatgcacctggctgggggggacgctcctattttctactgatgtgggggacagaaaaggaagatgacaaaatgtgaaaattcgaggctcccttctaaggagccactctaaggccgcgccagggctttagtgagcctatctactcgtgggcttcccctactcaaaacaccgtgggtgtgtgtgtgtgtgtgtgtgtgtgtgtgtgtgtgtgtgtgttgaaatctaaagtacatatctttgcattcaagacatcacaggacccctactcaaaacaccgtgtgtgtgtgcgcgcgcgtggcataacatataaactacatatctttgcattcaagacaccataggacctgcttggagggtagaagaaggtgcagaaagagaaaggaaattagagacgcctccagggctcaggtccagtctggcgtccctccggcagatcatcttgcagatctgcagcctctacactctctctaaacccacaggccaactgggtatgtctgagctctgaaacctacatccatagccaaggccacctagggtcgcgcctctcccccaacgctgccccaaattaatctcagac

SEQ ID NO: 36762 - DNA, 1216 bp, Artificial sequence
  DNA replication origin
tgagcagagagagattggaaaaggtttggtcagataaggaatcacaggggtaagatgaagtcgaaggagtcacagctaatgggaagataagccaggaaacagagagaggctattaggaacagggacatggggaaacagttaaaagatggagggtgagccgggcgcggtgactcacacctgtaatcccagcactttgggaggccgaggcgggcggatcaccaggtcaggagatggagaccatcctggctaacacggtgaaaccccatctctactaaaaataccaaaaattagccgggcgcggtggcgggcgcctgtagtcccagctactcgggaggctgaggcaggagaatggcgtgaacccaggaggcggagcttgcagtgggccgagatcgcgccactgcactccagcctggatgaccgagcgagactccatctcaaaaaaaaaaaaaaaaaaaaaaaaaaaagatggagggtgggggccaggcgcagtggctcacgcctgtagtcccagcactttgggaggccgaggtgggtagatcatttgaggtcaggagttcgagaccagcctgggcaacatgtgaaacctcgcctctactaaaaatacaaaaattagccggcgtggtggtgaatgactgtaatctcacctactcaaagaggctgaggcaggagaatcgcttgaaatcgggaggcggaggttgcagtgagccgagatcgcgccactgcactccagcctgggggacacaacgagactctgtctcaacaacaacaacaacaacaacaacaacaaaagatggagggtggtgaaggggtcatgagattggagggatttgggggaccagaaagtgattctggacggagaaatccaggggtagacgaggtacaggggaatgcagaaagtggaaagagatagtagagaaagagaagcaggagagggagagcagcaagagaagtctggaaagcctgagaaaacctcaagagaacaggaagggagacagaggcgcgatcagggacagggcctgatcacaaaggaagggcctagggtaggagaggaagcatggtggccagccgcggtagggcagggtgggcagagtgaagggagtggggtacggttggcaggagcagggtgtgggaagggcacctctctcgccccaacgaaccccggcccttcccacttcacgtagctgtggggcgcaatggcttcttttccgcggtgacc

SEQ ID NO: 36763 - DNA, 2289 bp, Artificial sequence
  DNA replication origin
agtttaggacacaggaaaccataggtatctacgggactccaggaggggagggctggggcggggtgacagaggatgaacgtccccctcccacgcggagaagataggagtcaggttgggccctcttggaggagggggcagggagcgcggcgcccggcggcccctttaatcgggggcgcgcgctggccagcccgcgcgctctcgcctccattgccgggccagtgcgggagccggagcggagccggggccggagcgggcggaatggagcccctgcgcgcgcccgcgctgcgccgcctgctgccgccgctgctgctcctgctgctgtcactgcccccccgcgcccgggccaagtacgtgcggggcaacctcagttccaaggaggtgagcatgccgagccctcctctgcggcccgccggcccccgggggacgcaagggaggcgaggggagcgggtaccgcctcgccccctgccgcccctcctggcggactccgggagcctcgggggagtggggccgagggcgatgggggactgggccagagtcgaggctaaggggagccgtagggtcgcggccagacctgggggttgtaggagggacgttgaggtcagagctgagcggggagggggagcgggttgggagagtcagagtttgggaagggtggtgcagaggtggtgctgaagggacagcacttttcactcagcagagagccccgagctcgccgccacactcccgctcaggaccgggagggggccgtttggaagattcccccgcgcgggatggtctttgggagcacggggtggggtgcaggggagtgtggatattgggggaacggggttagatattggccaggacatgaggtggccaggatgagcatctggcccctaaggtctttctccccagaaagatcccgggaaatgcagggaggagtgtttgaatggaggggaggaaacttgggggggcaatggagggagaaaatcagggcggcaggaatcctggacccacagtgacgggatcagggaaggagtttggaggtgacctggtctccttctagtacttgggaagccaggtacctggggggtagggaagaaaagttgggggtctatggagtaaagagttcttgaaggactcagcggagggtcagactgggcccctttttcaggactgggtgttcctgacaagattttgtttcctctcggattacggccgactggacttccgtttccgctaccctgaggtgagtctcccccaacactcgccatgctgaggctgggtacttcccttggcctccaaaggcacaggctgccccagctcccggtccccaacatctctggtctgcaggccaagtgctgtcagaacatcctcctctattttgatgacccatcccagtggccagccgtgtacaaggcaggggacaaggtgagggctgtgaagagggcatagggggagaggggagaaggtcgttgctggccgggggagtgaccctgtccctgccttccccaggactgcctggccaaggagtcagtgatccggccggagaacaaccaggtcatcaacctcaccacccagtatgcctggtccggctgtcaggtgcaggctcagcctgggggagtgggcaggtgctgaaggatgaagccttcggggcatcaaggacaggcttcagccttctcgtttgtccccaggtggtatcagaggagggaacccgctacctgagctgctccagtggccgcagcttccgctcagtgcgtgaacggtggtggtatattgcgctcagcaagtgtggggtaaggggctggggtggccacctggaccaccttctctttgccttcctgccaacccccaacttgcccagggccccccttaggcctccctaccccccacagggtgatggattgcagctggagtatgagatggtcctcaccaatggcaagtccttctggacacgacacttctccgctgatgagtttggtgagcacgtggggacctagaaaccaggctctctgtgggacaccagagctgggtgcccactgaggggacatccacctgaatgaaccttactcctcctaccaaatcggcagggatcctggagacagatgtgaccttcctcctcatcttcatcctcatcttcttcctctcttgttactttggatgtgagtctggcacatggggtgtgggggaagagataggagggagcagggttgggggaggtgagctgctctccctttctgcctgtggacagcctttccctaccttgcttcctagatttgctgaaaggtcgtcagttgctccacacaactt

SEQ ID NO: 36764 - DNA, 911 bp, Artificial sequence
  DNA replication origin
tgtctccactaaaaatacaaaaattagctggacatggtggcgtgtgcgtgtaatcccagctactcaggaggctgaggcaggagaattgcttgaacccgggaggtggagattgcagtgagccgagatcacgccactgcattccaacctgggtgacagagagagactctgtctcaaaaaacaaaacaaaacaaaacaaaacaataaaggcctgaactcctgagtctgggggaggaggggctgggagcctggactcctgggtctgagggaggaggagctgggggtctggacccctgggtcctggaggaggagggtctgggggcctgagcccctgggtctgaaggaggagggggtgggggcctggacccctgggtctgaggggggagggggtgagggcctggacccctgggtctgagggggtagggggtgggggcctgggcccctgggtccttggggagcagggttgggggctggactccagattctcctagcaggtgagtcggggtagaaggtctggagtcctaagggaggaggcgggattcagactgcctggatggtagtgctagagaacagtgatgccccagagctgctttctatcctttcttatctgcccatcctcccctcagtcctgagcctcctatttttctgcatctactggggtcaatatgccaccgatggcattggcaacgagagtgtgaagatcttgggtgagaatgaagctgggtggggagagggtggagcccagggctcaggttgggcatcaggtctgagcctggctctgagccgccccctcctcccttctcccagccaagctgctcttctcctccagcttcctcatcttcctgctgatgcttatcctcctggggaagggattcacggtgacacggtgcccgggcagggcgtgctcgtggggc

SEQ ID NO: 36765 - DNA, 836 bp, Artificial sequence
  DNA replication origin
acctggcctgggtcaaagaactagacccgcaggagagggtccatcacagcctggcctcctcccctctattagggtccccggaccccacccctgggcacttgggaacagaggtactcggtcagaacacaagcaacaggagagccaggcacggagacagaagcatattgaggtagagagagagggtgaaaaagacaggaagagaataaatcagttactgtttgctcaacacagggctaaacccctctcatgtgtgagtttttccatcagcatctactcaacgaggtaggtcttattactgctccatctcacagaagaggaaactaaggctaagagggaagccctttggccaaagccatacagacgatagaaagccttagaggggctccatggggtaggtaagatcctcccaattttccaagaagaaaatgggcccagagacaggggtcgtcacccaaggtcaggcagctaggaagtgggagagctggtgtggaatccaggtctgtgtgactcctgaactcttagtcacgatattgagcacaaatgtgacagacagtgagagacagagggaggagaaagaaagctgctgcgggatggtgaagagaggaggaatcacttagacagatgggaaagcagaaaatcgaagagtgggagagagagcgagccagcaggagcaggatgtgggcaagggcgagcagacaggtcaagggggaggcggcgccaaaagcaggggaaggcagggcccggccaggggccagtcggactcacttccgcctcgtagatgagcagcaccacatgggtgagcgtgtacagggtcatgtagacagacaacttcacgg

SEQ ID NO: 36766 - DNA, 922 bp, Artificial sequence
  DNA replication origin
aagccaggacacaaagttggagaggggaacagaagaaaatgggcatgggcccggcgaggtggcccatgcctgtaatcccagcactttgggaggctgagacgggtggatcacctgaggtcaggagtttgagactagcctgaccaacatggtgaaaccctgcctttactaaaaatacaaaaaattagctgcatgtggtggtgggcacctgtaatcccagctactcgggaggctgaggcagaagaatcacttgaacccgggaggcggagtttgcagggagccgagatcaagccattgcactccagcctgggagacagagtgagactctgtctcgaaaaaaaaaaagagaagaaaatggactctgaggagcacaatagaggagactgcaggaaccaagcaggctctcaataaagggagaatgactaaaaggaaaatggatcaagacctcagaacaggaggtccagcagatcaggtgtaggagcctcacacatcttctgccctcgggtcctcccctccaccccccacagatgcccatcctcaccagaaacacgccatgggcgtacaagtggatccccagctggatgccattgacaatcttctcccgggcccacttggggatgccgaaattggcaatcagggccatgacaggaaccgcaaagaacctgaaggggaagtattgggtcagtagagacactgctcctgtcctccaccccaccctatagccccacctcgcctgccatgtacacacgcagaccccaggcaggtcccaaactggagggaagccagtgtgaccttcagaagccagagactgaaatggggcaggactggactgggaaattctgaggggcaagaaggaggttcaatttaactcagttccacaccaccccaaatcctggcatctgataagaaatcaatagacagcccg

SEQ ID NO: 36767 - DNA, 827 bp, Artificial sequence
  DNA replication origin
gagaccatcctggccaacatagtgaaaccccgtctctactaaaaatacaaaaaaaatttgctaggcgtggtggtgggcgcctgtagtcccagctactagggaggctgaggcaggggaatggcatgaacttgggaggcagaagttgcagtgagccgagatcgcacctctgcactccagcctgggcaacagagcaagactccgtctcaaaaaaaaaaaaaaaaaaaaaccacttaaccgggcatggtggcgtgctcctgtagtcccagctactccggaggctgaggcaggagaacctgggaggtggaggttgcagtgagccaagatcgcgccactgcactccagcctagtgacagagtgagactccgtctcaaaaaaaaaaaaaaaagatgtggtgctgtaccctcctgttgccgacccaggagcccaaaagcttcaccctgtgccaccccagatgcttcttcctgaacagtggcctgtgatggcagaatttgggcaggggcagggggagagtggagagatcaaggagggtggggaaggcagtggggatacaaaagagaaatggaagaatctggggacacagggtcaggaatggaaatgggaagggagggcaaagagagaggatgggggttgaggaaagaagccaggacacaaagttggagaggggaacagaagaaaatgggcatgggcccggcgaggtggcccatgcctgtaatcccagcactttgggaggctgagacgggtggatcacctgaggtcaggagtttgagactagcctgaccaacatggtgaaaccctgcctttactaaaaatacaaaaaattagctgca

SEQ ID NO: 36768 - DNA, 1176 bp, Artificial sequence
  DNA replication origin
ggcaggggtgctcagaccgggggtgcagtgcccccggccgtgtgcatgctgaagtattcggtgaagccggtgtgcggcgctgccgtctggggcacgagcggctggtagggcggcgtcgggccgtcccagcccgagtcggccgccttggggaaccgagcgggaagtgggggggaggctgcgcccggctcggccatggtcaccacgcggcccctcggggccaccgccgccgccaccgctgtctcctccacctgcttcccggcctgggaggggggtcagggtcagaggccgtccgggaccctcggggggcagatgcggccccgaaggcccgtccccctcccccggagaacccttccaccccaggtgtggacgcacgttgtcagtcagggaaggactgggtggcggggcgcctgggcagcggggccaggtactcaaagggcggcgtcggggcgcgcggggcgaactccggcggcggccggggagctgggggagagccgcggaaggcgggcggtgggggcacggcgcagggagtctgcgggggtgtgcgcaacagcgccagaacccagtcaggcagggtgggcgcgggcgccaggggacggtcgcggcgcggtgttggggcgcggggagtgcgaaaggcaggaggagggctcaggggtccgggcgctgggggcggcggcggggccgggagcggggtcaggtactccaggggcggcgccagcagctcctcgggcgctggggccgcggggcttacggaggtggcgggcggggggatggagaagagctccgtgaagttgggcaccgagtcgctgataaacgtcacgttcccatagacgtgctgcgggaaggccttgtcagcggattggctccctccgggtccagggactccggctgaagcgatctgcgacgtgcgcacgtggtacgggaagttcttgttggccgctgatgggcgggtcatgatctgaggccagggccaggagcaggtgtgagaggcactgtcaggccggaggctgtccccataaacttggggtccgaaggattccctttcagttgacatccaccacacttccctgaagccattcacactggattaggcgtcccctctgggctctccaaatgccctggaccctcaccttttcccttcaacaaaactcggcctgtgcttcctccatcagaggcctg

SEQ ID NO: 36769 - DNA, 835 bp, Artificial sequence
  DNA replication origin
cagatttctgtctggagtggtatgggggttgggtggaaacagaagaccttcaacttagggaagaacttggggaggcagatggtgagctggcctccagcaggcacttaacaaagatgtacttgtgattccagaaacagagctttatagtttggttgaggctggtaagattctgggaggtctggttgtgtggccgtgctgaatggttcttctgcattccccaaagcatgggtggggtctgtgtctgatgtcttgggggctctggttagagcctgagggagagcttccagctttagtattctgtcttttatgtatttcttcatttcatcatccagcatttcctgagcctttgccaagcccgggtctgggcaatgctgcagagggaattaggtccacatccaggccctgctctatgggccttgtaggctgcagggagacagacctggacatagatgttcctggcccagaggaatgaaggttataatgggatgtgagaaccctggagagggggcatctaacccagctagggggcatcaggaagaggcctggtggtgggaagggataatatgttgcagacagagggagaagcttgtacaaaggcccagctcccattagagctgtaagcagtggggtgatttgagacaaagcgagggtctgaacagcaggttagggacctggactttctcctagggtggtagggagccatgcagggctttggggcaggggagggacggggccagatgttgagttgggaagatcagagactcatgtcaggggaagaaggaggttggatcagtggttctggtgagacaggatgaggccgggcagccagggcaca

SEQ ID NO: 36770 - DNA, 839 bp, Artificial sequence
  DNA replication origin
aggcagataaaggaagaggaagaagaaaaaagaaaaccggagagaaaaggcagaaacagggagaagtaggttcctatatcaagctgcaggaactgtgggagcactaggtgataggggatcattccgggggtccccggctgggtctgattgagtggaaaggctcctccagggcagaggaggggtccataccggggcaggactcaggtcccaagactcccaggtgttggcggagaagttgtataggacgaggtcacccagggcattgttgaggtcctggcctgtggaggggtggatagtctcatgccctggccataggctgccgggcctccagatcccagatactcgccccatctgctcacctccgaaaactgccagcagccctggtggggacaggaaggcgccagctgccccaatacgggcagagaaggcagggtccctggcactcacgttgtgccaccacccagccccctggttctcccacaggtgcaggtcacaggcacgtcccaagaagccaggctcacagcggcatggtcccaggggctgcgggaaaggagacataaaggcagagataagagagggagagacaaggacagagagacaaaggagacacagagaggaaaagaggcagaatgagacagacagggcacaaagggagagagaaagagacagacaggaagggagaggatggaaaaggaaagagagagagagaaagggagacagagagagacaggaagaggggaaaggcaaactgtcagacagaaacaagagacaaagagaaacaatcagaaggaagcagacagacggaaaaaagaagaccaacagaaaaaggaaaagatgca

SEQ ID NO: 36771 - DNA, 991 bp, Artificial sequence
  DNA replication origin
tccgacagtgggcaaagacctctaaagactaaaggcctatggtgttgagctgggcctggcctgtggagcatgggttatgggacaggtcacttaccgggcagtggagggccggtgtccaccatggaccagcagggcacgggagggggcatggaacaccatggagtggccagtggcagcagggggccgtccgcctgccggaatcacctgctcccaatagcccccgctggtgctgtcaaggcggaaacggaagaggccagaggagaagaggtcgtgcggggtgcggcctccagacacatatagccagacatcatccaccagggcagccgcgtgacctgccaggcctgggggccccgaggagctggaggcaggtggtgccaggagctcccagtggcccctgcccagtggactgaaggcccacacgtcgttggtgagcgagccgtcagccagctcaccacccatcagtaccagggagccggcccaggccacggccacatgggagtgacgggcagcctgtgaggaagagaaaagagacagaggtagagacacagcaagagagccagagccaggcttagacagagagatgcagagccagagaaacatggagagaaggcgagataaagacagagacaaagagaaaggcagagaccggcagagagagaaaagaagagacagactcatagaaacagagaaatacaataagagagagaaaaggcaaggagacagagttaaagggacaaatggcagagagaaacagatccagagagatggagacacagaaacagagaacacagaagcccaaaagtcagacagacgaaaacagagacagattgagcaacaggagacacatggaaaaataagatgcacaaaggcagataaaggaagaggaagaagaaaaaagaaaaccggagagaaaaggcagaaacagggagaagtaggttcctatatcaagctgcaggaactgtgggagcactaggtgataggggatcattcc

SEQ ID NO: 36772 - DNA, 950 bp, Artificial sequence
  DNA replication origin
tcaggactctccctgttgtaggggccagagaatgcaactccatccttttccactagcggggagtttctcagcataggcactggagcccaggagtaggccttcaggcctgccacctccaagtgatgtcaggcagccctcgacaccctgcttcctcttgttccctgggagggtttgtttccttgtgagtggcaagggagccgttaagggtccaggctctaagtccctgctctgtctcaaacagagtgaggcttcctatttctctccccccaccccaccaccatccaggagctcaacagaagtcccagaattgcacttctgtggctctggttgggccttgtacaggctcctgggccaatgactggagttgtggggagggaatgtggccccttgcccacctctggatcctgaggattgaataagccccacccggaccacacagaaggggtgctattgcctaaaggagacagtgggtgctgggcgggccgacccatgggtgtctgtggtcgaagggaggggtccagagacgcaggcagctggggagggagatggccttacagggacagtctgcagggtggggcagggggtgggatgggcactgggagtccaaaggaaagggctgagtggggttctgactcctctgcccaactgacccccaggaccccttctgtgagtggcatcagagcaccagccgcaaaggggacgcggcatgcagccggcggggccggggtcggggtgccctgaagagtccagaggagtgtcccccgctctgcagccagtgagtcaggctgggtgcagggagtgggtgggtggatgtgcctggggatgtgtgctggctgtggagtgacctggccccctgctccccaccccaggcgactgacctgtgaggactgcctggccaactctagccagtgcgcctggtgccagtccacccacacctgcttcctgtttgc

SEQ ID NO: 36773 - DNA, 899 bp, Artificial sequence
  DNA replication origin
tgggtgccccatttccatggtaaccagggttacactggggaccctgtcactctaataaggacctagtgtgcaaggtaaaaacccctggctaactggggatgctggttccacaggaggggacccagcgccatgatggcttcctccctccacctccatgtgccccagcctggggcaacatctccatagcaacccccgcctcactcacgtgcggttgcagtgtgagatgccatcaccctggtagccccgctggcagtgacactcgtagctgaggggcgtgttcaggcaggtcgcccgcgggtggcaccgggccaggcccaggcgacactcatccacgtcaggacagcgggcgtatgcccagcgggcagggagggccacgggaagccccaggccctcccccacccacagggagcagttacccccaccgaggggccctgagaagtccccctgtaggcacctgcagggtgggagagtgaagaagcgggggacaacatagaaacaggagccatacatagaaacaatgacagggagagaggaggccaattggaaggagagggatgcaaatacaaatttggaaagagagacagagaaaccaggagaagtcgcagacaaaaacaattttggaagacagaagagagacatagacagagatgcagtgaaagggagagcggagagacagaaacagacaaggagaaagaaaacgaatcgcagagagccggaaaaggaggaaaaatggagaaaaaagagcgggagggtaaaataaacaacagaaaaacagtacggaaaagggaaggtggccatgggatgggcaagagggcagagaagcaaagaggccattagaatgaccggtcatggaggaaggacacagccgggcaccctgcccacccacctgcccgggctca

SEQ ID NO: 36774 - DNA, 1266 bp, Artificial sequence
  DNA replication origin
ccctgtctctactaaaaatacaaaaattagccaggcatggtggcatgcgcctgtaatcccagctactcgggaggctgaggcaggagaatcgctggagcccaggaggcagaagttgcagtgagctgagattgcgctactacactcctgcctagctggaaagagtgagtggtgtgggatcctcacaccaaccacattctatatgccccagagacatgtctcattcagcccttctctctgcagacgtagctcagccggcgcaatcctattttcctctcaactaaggacactgaggtccagagatggtgagggactacatcaccccataagcagcggcagagctgggtcctgagcccacttcaggtggtgagttcaggggcaagggatacatagcccaggactaagaggtcccacttcccctagcccccgtaccagacagggcctgaacagtgaggggcctgtcccgtcgctggccgcagaaggcagctatgaggctgcggtccgactggacaacaccagtgtccaggaagcgtgggaatccatcaaacgccaggacgtagctcagctagaggggtgcagaatcgaggattaggagacaatgaggatgagaacgacacctggggtctgggaggaggaggggttcaagaggggagggcaatctgagactgggaaatgggctgtttgaacatccaggggagactgtcaaactatggcataaggccaccactccccttcctgtgtccaaagtagacacggctcatctatcaggcactcttgcattgagcccctttctcaacatgcagctcctggcagtcagtaccaatcaatcagagttggtgtacaaggtgtaacaatttaccattcctgctctaggaatggggagattgagaatctggagaattggagatgggagctgaggaaataggaagctatctgggaaatgggggggtctgtctgtgggcctaggaacaaagtgctggggatctgaggaggagtttgggttttgaaggattaaaaaaacaaaaaaaaaaaaacagcaatactagggtcagggtctgaggatgcaggctgggtcaggggacacggttctggctcatgcgcctgaaccctcgtttcctcagtgctcaccgtgcagggggtgctgctgtcgggggagaaggtgagggtgagtgggggacagagggtcccgggagcacagggctgtagctcctcagtggccgagacaacccacacacagtaggacaggccaggcccggctcttgcagcccc

SEQ ID NO: 36775 - DNA, 1023 bp, Artificial sequence
  DNA replication origin
aggacccagctctgccgctgcttatggggtgatgtagtccctcaccatctctggacctcagtgtccttagttgagaggaaaataggattgcgccggctgagctacgtctgcagagagaagggctgaatgagacatgtctctggggcatatagaatgtggttggtgtgaggatcccacaccactcactctttccagctaggcaggagtgtagtagcgcaatctcagctcactgcaacttctgcctcctgggctccagcgattctcctgcctcagcctcccgagtagctgggattacaggcgcatgccaccatgcctggctaatttttgtatttttagtagagacagggtttcaccatgttggccagtctggtcttgaactcctgacctcaagtgattcgcccaccttggcctcccaaaatgctgggattacagacataagctgctgcgcccggcatatatatatatataactttattgaggcatattttatatatactaacatatcaagtaattcctgtcacacctacccccaaatcagtatcttttctaaagagatccagtctcatgtaagggcagtaggagttgtggaaggtttggagcttgctgattacagggcccaattcacgttttgaggatcgctgggccaccatgagtggggagtgtaggcagccaggatgaccagtaggggatgggtgccggtgtccaggtgggacaggacttgggcttggatagcagctcaggaggtagctagcagtcggtgagagatttaggcttgaagatcaatcttgatgggttggctgagggagggggtgcagaatggttcatcctggcgatgattatgaataatatggtgccttccttccctgcccagtcacactgggttttcttagcatctgggggtggaaggggccaggaacgtgactttgctaccagcctctggcctctctcttcacagggctgctcgtgctgcactgggaggccaatggctcctcatcctggggcttcaatgcttcggtgggctct

SEQ ID NO: 36776 - DNA, 951 bp, Artificial sequence
  DNA replication origin
cccatgcctggcagaggcactggctctgtccagctccacagatccttcagctgcggttccaggaatgcagacatcctggacactgaaagtgttttcttaggcttagcacagactcacttcgctgcccagtcaccctcactgatatgaggctattagttggccttatttgcccgaagggtgtgttgtcagttactacaggaatgttaatggtttgatttcggagtgctccttaccccagaccccactggaggtattgtgtaacagtgggtacacccactgcttttctaaaatccagaacagtctgaaacgtgtgtacctcttgggatttggggtaagggattgtggaccccccctgtgcaggacagggagccatggaaggcctgagcaggacagggcagggacgggcctgggcagtgagatccctggcgctgttgtgaggggtagagtgacgagagcctgcaggtggggaccaggttgggcaaggggctgcaggggtggggaggaggggacggtcagggagaaatccaggaggcagaaggcttcggtggctgcatgggcaggaggacctggggtgtggtccagcgtctccagcctgggtgacaggtggatgtgggaccatctattaccaaatggtggtggggacagccaggctcaggaggcctgtgctatgtccagcttgggatgcagggttgggggcctgcaggacagtgtctgggaggcagaaggagggggtctggatgggtgtgagtgagccaggcctcatgtcctttaggctgggctgcgggggctccccctgctccccaatgcctcgctccccggaggaatgtcgacgtctccggacctgcagtgagtgcctggcccgccatcctcggaccctgcaacctggagatggagaggtgagtggtggggaaggcagggatgagaagcagcaggtgtagggcagggaggtcc

SEQ ID NO: 36777 - DNA, 1251 bp, Artificial sequence
  DNA replication origin
ggcctggactcctggatctgagggaggagggggtgggagcctggcctcctgggtctgagggaggagtgggtaggagcctggactcctgggtctgagggaggagggggttggtccaggcctttctatgatcacactgtccttccttggccagattgaaaactgggtgacagagggtcctagtgaagacgaggccgtgtgcgtgaactgccagaataacagctatggggagaaatgcgagagctgcctgcagggctacttcctcctggacgggaagtgcaccaagtaagaggaaccgggggggggggggggggggggggggggggaggccggggatcccacccttctcactgggagtagctctggagccaggccccctctttagtcctccacccccagtcaggagaggatgacatccccagggagcgcccaggctggggtcagggtagggaaggagctggaatgtgatgccactccctacctccaaggctagtgctgaagtgcagtccacagagcggccccatcgagaacaagatggggcggctgagggcagaggccttggaacaacctcccctttccatctccttctttctgagtgttcagtgagtgctggagtctgtgcaactcgggttctaatcccaatggtaatttaactgctttgtggccttgggcaaacagcttgacctctgtgaacctcagtttcctcttctggcctgttgcacagagttgagctcacatatggggtgtccatcctggaccactgcaggccatgggggctccgtaaccctcaacttcttccccagatgccagtgtaatggccacgcggacacatgtaacgagcaggatgggacgggctgtccatgtcagaataacacagagacgggcacatgccagggcagctcccccagtgaccgtcgagactgctacaagtaccaggtgcggctgcagaagctagtggtgggccgagggccctacaccttgtggaggtcagggctgggatgaggtagccaggctcgggcaggactgacaacatggttccaaatcagtggttttgggatcaagtgcagcttgacagactgttcctgagccccattcagttacaggccctaggcagtgatgctggggaccaagatatgagcctctgggggactctcagactggtggggagacagtctccattacaggtagtcacagctaaaggtggcacatgccagaaaatctatcccatggtagctcaaccgaaaaaagaaaatg

SEQ ID NO: 36778 - DNA, 1212 bp, Artificial sequence
  DNA replication origin
ggccatcttggtcatctcctgcaagtgccggcgctgctcctgccgctggtccagagcctgcttggccttccagaggagcacacagagtgagaggaagaggaagaagcaggagaagaagacggagaagaagacaaacaggtcaatgtgggcctggtcctgccggaagaagagcaggccctgcgagtcggctgagccgttggcgccgggcccacttgggtctcccacgcccagcagcagcaggtagaagcggctcgacttgagggcatggtgctcgtgtgggtaggtgatgaccagccggtcccgcacgccgcggaccaccagcactgccgacggctccgtcaccgtcacgtaggtaatcaggccccgcggccatacctcccgtacccgtggctctgctggggcgcccggcccactgctggcccctgctcctcctggatccccagccccccggggcccaccatctgcagggggtggtggaggtggtggggctgggggtggctggatgtgtacagtatggacgccagtgtcaggggccacacggaccacgaaggtgtcataggaggtggagacatagaggtccacggccccgaaggtcacgtccagcgtcaggcggatgtccacgttggtgaatttgggctgcacgccaaagaggacagtgcggccggggcctagcgcccggcgtttgggctcatggaagcagttggtctgggacgtggggtccaggcagcactcctgctccaccgagatgaggcggtagcactgctggccgcccagcggactcccgtgaaatgattcccggcacttggcgcactgcgggcagggttagaggcggtgaccatcagggctgagtgcggtgccagcctgtcccccaagcagcagtgacgaatactctatacccactgctaagtagccattgccctgggcctcacccccactgccccagtcacttccctgtgaccccccggaccttctctgccacagtgtagaccttgccaggacctggcactccagcactgctgcccctggtgccaccctagtgacctgagcaccctgatactgaggcctctggcactctgaggcacagcagtgaagaacgcggctgcattctggctctacctccttgttagctgtgtggccttggactagtgacttaacctcactgagcctgagcacacagacttaacccatgagctctgcacacagggagtaacc

SEQ ID NO: 36779 - DNA, 1026 bp, Artificial sequence
  DNA replication origin
ggtgtgatcacatgtctcactgtagcctcgacctcctgggctcaagcaatcctcccgcctcggcctcccgagtagctgggactactggtgtgtgccaccacctcgggctaattttattttttatttttatttttgagacggaatctcgctctgttgcccagactggagtgcagtggcgtgatctcggctcactgcaacctctgtctcccgggttcaatcaattctctttctcagcctcccgagtagctgagtttacaggcgcccgccaccacgcccggtttttttttttgtatttttagtagagacggggtttcaccatcttggccagactggtcttgaactcctgaccttgtggtccacctgccatggcctcccaaagtcctgggattacaggcgtgagccactgcgcccgacctattttttatttttatttttgtagagatggggatctcattatgttgcccaggctgatcttgaattcctggcctcaagggattgtcatgccttggcctcccaaagtgttgggattacaggcatgagccactgcactgggccaggagctagggtttgaagagggagttgggggtcacagtgaggaaagctgagcatgcaaaggggaggttgagggcctgataagttgagtgtgggaaggcatgaggtagtatcctaaggagtgttgggggtctgaggaaagggtgactgttagagtgggaattccaagtccagggaagggaggtgggagtggggttagcaagcggtgggaggaggttggaggtgagcttccctctcctgattccccccaaacccatcttccaccaggcctggagagggagcaggcaggcactcacagacaggcatgtcgttgcagcagtccgtgagacctgtgtgccagtcactgagctgggtctggtagcagctggtggtggcgcactggggctgactggtcacagggtaggacatagctgcagaggtgggagggtaggggtcagctggcagcctcgcagcatctcctgggccccgcacttc

SEQ ID NO: 36780 - DNA, 1202 bp, Artificial sequence
  DNA replication origin
tgaggaaagggtgactgttagagtgggaattccaagtccagggaagggaggtgggagtggggttagcaagcggtgggaggaggttggaggtgagcttccctctcctgattccccccaaacccatcttccaccaggcctggagagggagcaggcaggcactcacagacaggcatgtcgttgcagcagtccgtgagacctgtgtgccagtcactgagctgggtctggtagcagctggtggtggcgcactggggctgactggtcacagggtaggacatagctgcagaggtgggagggtaggggtcagctggcagcctcgcagcatctcctgggccccgcacttcggccacccttccctgtgccgggcagtctgggcggggccgccaggccgcccactgaagggacaccactgtgcctcccccttcccttctgctacatctgggcaccggcaaccccagtctgtccctgttgctgctggctcctgcacgtctggttaggctgggggtgggggtctcctgcacatctgaggaagggtggggaccacatctgggtggggcctggcggtgccgcctcctcctccacgtctgggcctgggttctgggttgcagcatttctggggcctctggggtggaagcaggcgccgtctgtcttcgaagcaagggtgcccaggggagggaggcggccaggttccagtactgagagggttgctggtccacccagcggtcccacctttgcctttcacgttgtcgtgcatctcaaactgcatcttgctggccctgaggaggtggcgttggggacggcagaagtggctgtggcaacagtggcagagtctgtccaagggacgctggatactggggaggtgggggcaagggactggggcactgggggctgggctctcagggggaggggagctggggagaaagaggccaagtcagcctgtcaaccaggagagacatggaatagggaatggatagggcgggggcgagaaactcgcccatgtctttccaactgcccgacagattgcagaggaccctccccatacccgagatagagcttgagggagaacaagaaatggagatggacagagtcagagacaaggggagaaagatcagagccaggtgcccgtagagatgtcaccagtaatgcccacatgtgcccagcactttgactcctctgcaagcccatctcacagatgagcactgagg

SEQ ID NO: 36781 - DNA, 730 bp, Artificial sequence
  DNA replication origin
ggggacggcagaagtggctgtggcaacagtggcagagtctgtccaagggacgctggatactggggaggtgggggcaagggactggggcactgggggctgggctctcagggggaggggagctggggagaaagaggccaagtcagcctgtcaaccaggagagacatggaatagggaatggatagggcgggggcgagaaactcgcccatgtctttccaactgcccgacagattgcagaggaccctccccatacccgagatagagcttgagggagaacaagaaatggagatggacagagtcagagacaaggggagaaagatcagagccaggtgcccgtagagatgtcaccagtaatgcccacatgtgcccagcactttgactcctctgcaagcccatctcacagatgagcactgaggctcagagacatgaggaggaacgccccacgtctgacggcccaggccaagggggttcatagaggtgatgctgggccccaagacttctaaattcagctcagcacaccccagttaagaaggacagatttgggggcattgggaaggacagagatgtcccgagagaccgacaatcagcgatatgaaaggagacagagtgatatgagtgggatgaggaggagggagaacagagcagaggcgcccaacctcaaagaagagggctgcggaggggatgttcctacctgcaggatcgcgatggcagtgatggaggcagacgtgtggag

SEQ ID NO: 36782 - DNA, 1212 bp, Artificial sequence
  DNA replication origin
gctgggccccaagacttctaaattcagctcagcacaccccagttaagaaggacagatttgggggcattgggaaggacagagatgtcccgagagaccgacaatcagcgatatgaaaggagacagagtgatatgagtgggatgaggaggagggagaacagagcagaggcgcccaacctcaaagaagagggctgcggaggggatgttcctacctgcaggatcgcgatggcagtgatggaggcagacgtgtggagacacgggcactgacttctccgtctcagcccagagccacttatatgggcggccacgcagccctgggcggggctctgacagaggtgcccagggagccaagccggtctgatcgaccctctccccacactgggatttcccgccctccctctccactcccatccccccacttctcctcctgcctcagctcccaggacccagggaaaagaaggtggcggggggtgggaggtttggcgggggcggggggccacagccgggtcaatgcgcagagaccaaaagagagggagagacagaaacacagtgtcagaaaggcaggcagggaagtccctctagacagaaaggagagagaggagattcagagagatggagagacgcaggaagatgtagagagatggagaggtgccaagaaacagaggggcacaaaaatgtgaaaagaaataacaagaagaggggagatgggccaggcatggtggctctcgcctgtaatcccaaccctgtaatcgcctgaggtgagaggatcgcttgagcccaggagttgaagaccagcctgggcaacatagggataccccatctctacaaaaaatacaaatagaattagccgggcatggtggcatgtgcctgtagtcccagctacttgagaggctgaggcaggaggatcgcttgagtccagaagtttgaggctgcagtgagccgtgttcccgccactacactccggcctcagtgacagagcaagaccctgtcttaaaaaaaaaaaaggaaagaaaaggggagatgggagacagaagagagacggagatggaaaagtggagaggcaggtggggggatcactgaacaggcttagagggcagggaaatggggagaggtgatgggtggggagagaaaaaggccgggtggagtgggagagagtgctgtgtgggactcccctttcagggtctcgctcatctctctcagtgatatccccacttt

SEQ ID NO: 36783 - DNA, 1436 bp, Artificial sequence
  DNA replication origin
gtaacccggacccacctcccctcggacttcatccaggtacactgccaggagatgctgggtcctcagctcctccccttgaagaccttcggttagctggactcaccctggtcccagggagaccaggctcagcatccatcagggggatataaaagttaaaaataatctctcgggtctcaaaggctccagtgacccaaacaccctacagaactggagcaaagttagcaggaaatcagaaacaaactggcgctcaaaatactgtaaatgcagccgggcacggaggttcacgcctgtaatcccagcactttgggaggcaagacaggaggatagcttgagtccaggggtttgagaccagcctgggcaacatagaccagtctctacaaaaacatttaaaaattagccgggcgtggtggcacactcctgcagtcctacctactcaggagggtgaggcaggaggatcacttaagcccaggagttcgaggttgcagtgagctatgatcgcaccactgcactccaacttgggcaagagtgggaccctgtttccaaaaaaacaaaaactggaaatgcaagctctgtccagctgtgacaatcaactcttggaccaactctctggccccttgtaagccctgagtttggagttgagatgatttatacccaagacatgccttcaaagggcttctgatcctggattcagagagggtggaagaacagacacaggctgtcacagtccccaggggttccacctgtggtagtcagggagggcttcacagaggtggtgatctgagcttgacactacaggatgaacaaaagtctgctaggaagaaaaaacatgccaggttgtgagagccagctggcagtgatcaaagctgccacctggctagaaaaagcttccacctgaccagaaggtcaggtgcaaagtggggaggggcgtgaggggcctggagtggtcagcaggagcagggcctgaagagcctggagtacgatttggactaaactggagggcagtggggagccacaggagcactttgagcaggaaagggccagggtcagctcagggcactgaaagatcctgctgggacactgggggatggacagaaaagggcaaaactggagtcctacaggccaaggaggatgcctgagctggggcaggagccgtaagggtagggagtgtaggtgtagcatcccagagccataaaaggtgggaaggacagcacctactgatgaggttacaggacagcaaggggacagagatgacacccaggtctggccatggaagcaggtggacagtgaagctgtctcttcaatgggaggaggctcaggtgtgtgtgtgacaggtgggacctgtggagggccattctggacatggtgagctggaaggtctcaggaagacaatccaggagacaacaagggtcagaagtgcagtctggggctgggtgtgg

SEQ ID NO: 36784 - DNA, 1111 bp, Artificial sequence
  DNA replication origin
aggcgtgcgcgctggaccccatgctggacgactcggtcatgctcgcgcggcgactgcgcaacctgggccagccggtgacgctgcgcgtggtggaggacctgccgcacggcttcctgaccctagcggcgctgtgccgcgagacgcgccaggccgcagagctgtgcgtggagcgcatccgcctcgtcctcactcctcccgccggagccgggccgagcggggagacgggggctgcgggggtagacgggggctgcggggggcgacactaaaagcctgttgttcccatctgcgccggcctccgtcatgaatgccttccgggccgggcggaaggggacgcgggctgtgccttacttaagtcgggggtggcaagggggcggggcgggggcccgaaagctgagaccctcgccacggggagggggacgcgcacacacaccggtcaccgagacggctggacctgcacgccaccgctgccttttgctgctgctgctgcggcgaccgccgcagggacggggactggccctcccttgcaggtcggtttggtttgttgtaaataaaagtatttaattagtttggcctctctcaaatacggtggggtgtttgcccaccagggggcagcatcggactcaagcggctgggaaccaagaaacctggaatgaggggtatgggggactggatttttgggaccagaagggagtggactccttggtaacccggacccacctcccctcggacttcatccaggtacactgccaggagatgctgggtcctcagctcctccccttgaagaccttcggttagctggactcaccctggtcccagggagaccaggctcagcatccatcagggggatataaaagttaaaaataatctctcgggtctcaaaggctccagtgacccaaacaccctacagaactggagcaaagttagcaggaaatcagaaacaaactggcgctcaaaatactgtaaatgcagccgggcacggaggttcacgcctgtaatcccagcactttgggaggcaagacaggaggatagcttgagtccaggggtttgagaccagcctgggcaacatagaccagtctctacaaaaacatttaaaaattagccgggcgtggtg

SEQ ID NO: 36785 - DNA, 1341 bp, Artificial sequence
  DNA replication origin
cagtccccgtccctgcggcggtcgccgcagcagcagcagcaaaaggcagcggtggcgtgcaggtccagccgtctcggtgaccggtgtgtgtgcgcgtccccctccccgtggcgagggtctcagctttcgggcccccgccccgcccccttgccacccccgacttaagtaaggcacagcccgcgtccccttccgcccggcccggaaggcattcatgacggaggccggcgcagatgggaacaacaggcttttagtgtcgccccccgcagcccccgtctacccccgcagcccccgtctccccgctcggcccggctccggcgggaggagtgaggacgaggcggatgcgctccacgcacagctctgcggcctggcgcgtctcgcggcacagcgccgctagggtcaggaagccgtgcggcaggtcctccaccacgcgcagcgtcaccggctggcccaggttgcgcagtcgccgcgcgagcatgaccgagtcgtccagcatggggtccagcgcgcacgcctacgggacagcggggagggacgtggagagagggtgggggacagacagaccggggtcgggtagagcgaggaggggtttgatgaacaaagggagcgggaaatacggatacagacggagtggacggaggcaggagacatggtgggtgaggagttggggagagaatggagggaatggggggagttgtgggaaggatgggagaatgactttaactgcgatccccggcctctctccagcctctccctccccaccccgccaaacccaccttttttttctcttgattctccaagcccaaggggctgccccactgatcctgtctcttggtactcaaaattgcaaagtaaaacggaggcagccctgactcttgtcctcctcccgttcgttcggggcattgttctcccctggggacacgcctgtccctttctccccactccggagctctttttcccaggtgtacccgtgcccggtccccctcctccccgggtgccctgctcttctctaaatgcacctgtaccggccccctctgtcgctcaccacgatgtgcacaggtggcaggctcttgagcatgctgtcgggtgccagcagcggcgacatgaaggggttcttgactatgggtgaggagtagaggggcatctgtgtggcaccctggctggagcgtcgggggtggaaaccctcggggaaggcggcacggacgcccaggcctctgtccatggggctcagctcatttttggcctcagcctcttcccctgcatcctcaggtggtaataagaagttgacatcggagggtgtggaggggctaagtgtctcagctgacagcgacatctcgggggtgt

SEQ ID NO: 36786 - DNA, 1417 bp, Artificial sequence
  DNA replication origin
gtttgagccactgcactcagcctgagcgacatgacaccttgtgtctgtctgtctctctctctctctcacacacacacacacacacacacacacacacacacacacacacgaaaaaaaagggacaaggagtcttagattcctctgcctggcctctccttcctcagtcacaggagtcctggtccccagcccgtccctgcaggagtcagacatccatgcagtcctgtttccctgctgagggtgtgggcctcaccagcataggcgctgacacacttggagagcacactgaggggcagcaaggggtccatgaggctcagcaggcgggagggagaggcggcaggctgcagcattgtggccgggtaggctgccatgatgccatctggcacccgcaccccgtaggctgctgcccgaagagccacggtgaagcagaggttcccgcctgcactgtcccccgcaaggcagattcgttcccctgttgagcctggtttgggagaggggtggttggtgacaacctggcaggggcagaggcctggggaggagggcagggaggaactcaagctgggagaactgggctctccaaggtggggtgtggggcactccaaggcctagcagactgcagttttagagactggcagactgaggcacagatttgggctcatgtggtagacagagggtcaggatgactcaggacctggagaggcccagggaagcactgggaaagtctgtcggggctggaggttgggagcagggagggcaggtggtgggaaaggggagctgagctcaggcctgttgcaggaggggggcctcagagggcgggaatggaaggtcagggttcagggtcagtacagaggggctgggctgcaagctctgtgccctggggcatggccacactctgctctgtgcctcagtgtcctcccaagatgttgatcttcgaagagggaggtcagagaagctggactgtgggccaggaggctggtaggacaggagagcagggcctggagctatcagagggggacgacagaggcccagggagacaggacggtgggtgggaagtggaggtggaggagatggagagtctgggtgccacagttggggacagaggataaagtggctgaggtggaagattgggcaggacctgggtgagcaggagctgggaggtgtggggggagagaaaggtagagggtgtgaggctgaggctggaggagcttaaagcaagctgggtgggatgggagcaggcgcaggtggctgtgggggcctgaggctcaccaaggagggcgcagtgcttgatggcccagcagtaggcgaagaagcactcctccagcgcacgggggaagggggcctcaggggccagggagtagtcgatggagatgatgggggcgcccagctcctgggcccagctcttgaggtagggctcgtggga

SEQ ID NO: 36787 - DNA, 935 bp, Artificial sequence
  DNA replication origin
ggaagtggaggtggaggagatggagagtctgggtgccacagttggggacagaggataaagtggctgaggtggaagattgggcaggacctgggtgagcaggagctgggaggtgtggggggagagaaaggtagagggtgtgaggctgaggctggaggagcttaaagcaagctgggtgggatgggagcaggcgcaggtggctgtgggggcctgaggctcaccaaggagggcgcagtgcttgatggcccagcagtaggcgaagaagcactcctccagcgcacgggggaagggggcctcaggggccagggagtagtcgatggagatgatgggggcgcccagctcctgggcccagctcttgaggtagggctcgtgggatctggaggtctgggccacaaagccaccgccgtggaagtgcactatcagggaccgcgagcggggtgcctgctgggggcgcggccacagctccaggctccgttggccgttggactttatcaggctgctgagctcctcactgtcctgggggtgaggagggagacggtgtgtgaggttggggagagctggccagggctgcacccctccatggggatgccaaggtgggggctgcccacgctcctcggctctgtccctgtccctggctgaggctggaaccctacctgtccttcacgcaggtcataggagatgagcctgacgaggacgggcccagggcctgtgtgggccagtgggggtgagatggtgaccgtgagcgtggggtcggcagtcagtggcatctcaaaggcttcgggtggcaggctgagcaggcggcttaccctcacggtggccgatgccatgttggccagagactggagggaggggacagaaggggtgctagggaaggtctgcctgcaggggtgcccttcacctctccctctgatccccagtctttccccttgtgtgccatc

SEQ ID NO: 36788 - DNA, 1069 bp, Artificial sequence
  DNA replication origin
ctgtgtgggccagtgggggtgagatggtgaccgtgagcgtggggtcggcagtcagtggcatctcaaaggcttcgggtggcaggctgagcaggcggcttaccctcacggtggccgatgccatgttggccagagactggagggaggggacagaaggggtgctagggaaggtctgcctgcaggggtgcccttcacctctccctctgatccccagtctttccccttgtgtgccatccctgggcctggagccccacagagacctactgtggcctcagatgagtctctgggcctcagtgtccccatctgcaacaggccctcaccgatagcacttccatctcggtgatgttccagaaggctttccagaagtgcacgtccaggttctgtgtgatccgctcaaactcagccccacgcagctcggggtcgatggcaaagcggccgctggtgaagagagagctggcggccacacctaggggtcagaaggggtgtcagggagccccagtgggtcaggctgcttgggcaggagtggggaggagggccaagagagtaggctgcgagtagaacctggctgggactcactgaggcctgtctcgttgcgtttgtagtgctccccgaaggacaccagcccaatggagatggtctgcaggaatggccggatggcaggcgtgaactgtggagagacgcggctgcgtcacccaccgctcaagagagggatggggacagggcaggagcgaggcacagggatgtgcggggaagacacattcattcagtaaacgtttcatgagctcctactgtgtgctgggcatagctctcggctggttcacggacctgatgttctcaaagggaaaacaaatgatcagcagataagcaaagccacgcgcagtatcatgacaaggaatgacgaatggtttggaaaaaaaaaaaggcagtaggtggagagggcaccagtgatgactaggggtcaggctacttagcgggtctcggaggagagatctgactgaagcgaggggagggtgttccctgcacagggaacagagagcatgaaggcttaaaggtgagctcataggaggctgag

SEQ ID NO: 36789 - DNA, 920 bp, Artificial sequence
  DNA replication origin
caccgctcaagagagggatggggacagggcaggagcgaggcacagggatgtgcggggaagacacattcattcagtaaacgtttcatgagctcctactgtgtgctgggcatagctctcggctggttcacggacctgatgttctcaaagggaaaacaaatgatcagcagataagcaaagccacgcgcagtatcatgacaaggaatgacgaatggtttggaaaaaaaaaaaggcagtaggtggagagggcaccagtgatgactaggggtcaggctacttagcgggtctcggaggagagatctgactgaagcgaggggagggtgttccctgcacagggaacagagagcatgaaggcttaaaggtgagctcataggaggctgaggcaggagaatcgcttgaacccaggaggcagaggttgcagtgagtggagatcacaccactgcactccagcctgggcgacagagcgagactctgtctctaaaaaaaaaaaaaggtgagctcatgcttggtgcttgacctgggtagcgacagtcagggggccagtgtggctggagcagagtgagcagtggggagaggggcaggtggtgacattggagaggcaaagggggctcatatagggcctgggcagaggaatttggatttcattcccagtgcggggtggtgccactggtaggctgtgaggtggggagtaggatggtgcagggacttcctgaaagtcagagagaggatggatggggagaggaggcagctggaagacaggaacagggagatggccagagacagccccccaggcacagggacctgaggcagaaagacagtcagagagggagactgaggcctagacataggaccagccagccaccacgggggcagggagagacagcgtctgacagagcagacaggcagttaaggaaagacagtgg

SEQ ID NO: 36790 - DNA, 768 bp, Artificial sequence
  DNA replication origin
tgagccaagatcacaccattgcactccagcctcggcaacaagacagaaactctgtctcaaaaaaattaaaataaaataaataaaaagatgaggagaggggacatttccaacaaaacaagtgactgcacaaaggagtggggaaggggctggacccaggccctagggactccagagctctgccctttgtcctgttccaggcggctccccgaggactgggctgggtggagctggcaggaagggatgctgaggttgccagcaactcgccaggaatccctggcagagggcactggggcaggggtaggcccactggggccgtgggtaaggactaggggagaggtagggcagaggggatttggctttgggtggtgtcccactgactgggcactggacctttctttgccctgaagagtttctggacagctgaatccgactcctggggactgagcaggggtaaggagggcggtggggaaggaagtggggtgggggtggatgggggatggaggaagggccaggtgtggggcctgggaggaagcaaaggcttctgaagccaggaagcctggaatcagatgcaggtggggacaatgagtggctggatccccgagagtgtgtgcataaaagagcaaacgttgcaccaacagcctctgcgtgcctggtctctttctctgtgcgtgtgtgtgtttaatttaaaaatagggatcgagtctagctgtgttgcctagactggtctcgaactcctgtgctcaagcaatcctcctgccttggtctccc

SEQ ID NO: 36791 - DNA, 1608 bp, Artificial sequence
  DNA replication origin
agtcctgcccgaaggacgcttttcgccacccccggggttgcctttttgttggccgcgagccctttaatgcgcggtagggggcggagccagatcttaaattctggcggttgggggcggagcacggcagcggagggagaccagaattggttagggagctggacccagagaagagcaagctcgggattgggtaataggggggcccgacagtagtgtgtagcgaggattggccctccgggcagggcctcgcggctggaattggcccccgcgggaggaccgcggggaattgatggagttggccgggggaacggagcccgccgaggccgctatggccccggcctcgaagaatgccaaagagggctcaaggagccacggtcgccggcggtggcgaaaagacaaggccaaaggtgagcgcgcggagaccggcagcagcccggaaggaacctcgtacatcctacggggcagtggggacagcgtggactggcccactgccacagggagttgggggggtccgcggactggcccattgccgcttgcggggacaacgggatgatccattgtgagaagggggtgatgtgacagccgagaggcccaccctggcacagggactagctgacgcccggatcggcttgggagcagagtccggaatgcgagcttcgtggaccagggttcccgctcggattccgtattcgctgtgtgaccaagggcaacggatgccctcagtgtttcccacctggggaatgcttcaagcgccgatgttcagggctccagcgctcttgagaggataagggggaaggaggttagcaggtgttactcaaagaggaagtctagcggtgagtcaaggagaggtaggaggaaggggtgcccatagtggagagtgcagcggggccagtaaagttcatcgcagtcccggcctcccacccggcaagtcagtccatccatccatccattcattgtcagtcaacccgcttcagccggctccactggggcctagccctgacccctaccctttccaggacaacgggccctggcttggcttcagacctccacacctgcctcagcaaaagggaaggcctcatttctctagggtgtcacattattttcaggtctcaaaaggcggaacaaaggctgacagaccaacagaaatgctgcaagcctcaggcaggggcaggtcctcagttacaagcatttatcaatcagcatggggacccgtgggaggttcccatgcaggaaggaaactaacaccacccctcagccccagggaccccaaactcattgcttcccctgccgtagaacacatcattagcccagaatagacctggagttggcttcagacacacgcaggctcagacaggctcagagggcagacggactggagcccaagggcactcgctgtcacagcaagacactgagcctcacaccagtatagcatacccagaggcagtacagactgtagttaagaaacgtgggcgtcggagatccggttcctcaggctgggagctgtgatgttctgggcaggagactccctctttccctgcctcagctttctgagctctaaaatgggtatgatgataggagtacctccttttgtgaggttagaatgaatgtaga

SEQ ID NO: 36792 - DNA, 1698 bp, Artificial sequence
  DNA replication origin
aaaatcatgggccaaagttgttgttgtaagtactgcagtcccatcaggaatatatgaaaatgtccatctccagtatccccacctttcttggaataatgattgaagtagaaagtgcccgtgttcttgtgcctacctctgcccacacaccgtcttcacttacacttagtcatccaccacttaccctttcactaagtgctattgattatgtccatgtggtggaccagatgccaggagccccaagatgtcctgagcagctccctctgctcgtccttccaagagttctggttccacaggtgacccctgtagaacctgtgattaccactgaaggctgacagtgagtggtgggtgttccaggaggggccgtcacctccatgtacagggttggggagggtggaagggagcaagtggctgatggctttggctgtaaggcaggtggacaggctgatgtgggctcctgggaagggatggagaggggaggggaggggaggggaggagagggaaggggagggaagagaagggaatgatacagaggttggaacctgccttcatggaccaagaacagcagggaggccatccaggctgcagctggggagggaagatgtggggagtagtgggtgaagggagaagcagactgtgattgatcttgggggctgggcggtgagcagaggtgtgttacgtgtctgtccctgccattgatatgaggaggggtggggctgtgggtgacacctgggtcagtgggatttcctagtgtctgctgttccccaaagcctctccatatagagggtcagtatagatctgatgctgtgtctgggggaaggggctggtggtccgaggcagcctgtggtgcttactgaccctagggatgaaaggaaagggatgaggaagcctctttacagtgaagcctcaggtatgtgaagccacaggtgtctcacctggtgactgtcatcagacatgtgccttgggtgacagtttcagggttcaggtggttgttattgttatgatgtttgcctgacaaggacccaggtatccagggatcgagagcacaagacccctggtgaggggagggtcagatgagaatgagcaggttcaagtggtcagagtgggagggattcctggagagactgaacctcaactcttcctgtcaggagctgtggctgtgtccaggagagatgacaagggtgacccaggacattgagtgagtcatcgagacattggatatgaggacagggcagagaggaccctggtgactgctcagatgtgggatgtgaggagggctctgactcatgcaagttacaggatcccccaacccctgagcccacaggtgacccttacactggggattctgagtgctgtgtgtgcccagaagggacactggattggctggacctgagtccctgaagggcagggatggtctgtagggccagagtcttctctgtgggtgtgatgtaagcaggaatgagcaagatgggggtgataaggcttggcttggaggagctggtagaggagcccaggggcttgggtcagctccgcttcccaggggctcagctggggctggaggagcaggatgctgtgctcagggtgtgctccaggcagggtgatgtgtgtggttccagggtcaggcaagagggtaaaaaattaatcatgaaaaattcccaccttttgtaggcagagacagtggcctgagtgtcaggggcagaa

SEQ ID NO: 36793 - DNA, 958 bp, Artificial sequence
  DNA replication origin
gccaccccgtctgggatgtgaggagcgcctctgccccaccgcgaccccgtctgggacgtgaggagcatctctgcccggccaccccgtctgagaagtgaggagcccctccgcccagcagccgccccgtctgggaagtgaggagcatctccgcccggcagccaccccatccgggagggaggtgggggtcagcccccgccaggccagccaccccatctgggagggaggtgggggggtcagccccccgcccggccagccgccccgtccaggagggaggtgggggggtcagccccccgcccggccagccaccccgtccgggagggaggtggggggtcagccccccgcccggccagccgccccgtccgggagggaggtgaggggggtcagccccccgcccggccagccgccccatccgggaggtgaggggcgcctctgcccggccgcccctactgggaagtgaggggcccctctgcccggccagccaccccgtctgggaggtgtacccaacagctcattgagaacgggccgggatgacaatggcggttttgtggaatagaaaggggggaaaggtggggaaaagattgagaaatcggatggttgccgtgtctgtgtagaaagaagtagacatgggagacttttcattttgttctgtactaagaaaaattcttctgccttgggatcctgttgatcggtaaccttacccccaaccctgtgctctctgaaacatgtgctgtgtccactcagggttaaatggattaagggcggtgcaagatgtgctttgttaaacagatgcttgaaggcggcttgctcgttaagaatcatcaccactccctaatctcaagtacccagggacacaaacactgcggaaggctgcagggtcctctgcctaggaaaaccagagacctttgttcacttgtttatctgctgaccttccctccactattgtcctatgaccctgcca

SEQ ID NO: 36794 - DNA, 1226 bp, Artificial sequence
  DNA replication origin
tcccatgtctacttctttctacacagacacggcaaccatccgatttctcaatcttttccccacctttcccccctttctattccacaaaaccgccattgtcatcccggcccgttctcaatgagctgttgggtacacctcccagacggggtggctggccgggcagaggggcccctcacttcccagtaggggcggccgggcagaggcgcccctcacctcccggatggggcggctggccgggcggggggctgacccccctcacctccctcccggacggggcggctggccgggcggggggctgaccccccacctccctcccggacggggtggctggccgggcggggggctgacccccccacctccctcctggacggggcggctggccgggcggggggctgacccccccacctccctcccagatggggtggctggcctggcgggggctgacccccacctccctcccggatggggtggctgccgggcggagatgctcctcacttcccagacggggcggctgctgggcggaggggctcctcacttctcagacggggtggccgggcagagatgctcctcacgtcccagacggggtcgcggtggggcagaggcgctcctcacatcccagacggggtggcggggcagaggtgctccccacatctcagatgatgggcggccaggcagaggcgctcctcacttcctagatgggatggcggccgggcagagacgctcctcactttccagactgggcagccaggcagaggggctcctcacgtcccagacgatgggcggctgggcagagacgctcttcacttcccagacggggtggcggccgggcagaggctgcattctcggcactttgggaggccaaggcaggcggctgggaggtggaggttgtagcgagccgcgatcacgccactgcactccagcctgggcaccattgagcactgagtgaaccagactccttctgcaatcccggcacctcgggaggccgaggctggcggatcactcgcggttaggagctggagaccagcccggccaacacagcgaaaccccgtctccaccaaaaaagtacgaaaaccagtcaggcctggcggtgcgtgcctgtaatcgcaggcactcggcaggctgaggcaggagaatcaggcagggaggttgcagtgagccgagatggcagcagtacagtccagcttcggctgggcatcagagggagaccgtggaaagagagggagagg

SEQ ID NO: 36795 - DNA, 751 bp, Artificial sequence
  DNA replication origin
ccgccccatctgagaagtgaggagaccctctgcctggcagccgccccgtctgagaagtgaggagcccctccacccggcagccgccccgtctgggaagtgaggagcgtctccgcccggcagccaccccgtccgggagggaggtggggggcagcccccgcccggccagccgccccgtccgcaagggaggtggggggtcagcccccgcccggccagctgccccgtccgggagggaggtgggggagtcagccccccgcgcggccagccgccccatccgggagggaggtggggggtcagcccctgcccggccagccgccccgtccgggagggaggtggggggtcagcccccgcccggccagccgccccgtccgggaggtggggggcgcctctgcctggccgccccttctgggaagtgaggagcccctctgcccggccaccaccccgtctgggaggtgtacccaacagctcattgagaacaggccatgatgacgatggcggttttgtggagtagaaaagggggaaaggtggggaaaagatagagaaatcaggttgttgctgtgtctgtgtagaaagaagtagacatgggagacttcattttattctgtactaagaaaagttcttctgccttgggatgctgttgatctatgaccttacccccaaccctgtgctctctgaaacatgtgctgtgtccactcaggattgaatggattaagggcggtgcaagatgtgctttgttaaacagatgcttgaagtc

SEQ ID NO: 36796 - DNA, 1485 bp, Artificial sequence
  DNA replication origin
gccgggcagaggggctcctcacttcccagaaggggcggccaggcagaggcgccccccacctcccggacggggcggctggccgggcgggggctgaccccccacctccctcccggacggggcggctggccgggcaggggctgaccccccacctccctcccggatggggcggctggccgcgcggggggctgactcccccacctccctcccggacggggcagctggccgggcgggggctgaccccccacctcccttgcggacggggcggctggccgggcgggggctgccccccacctccctcccggacggggtggctgccgggcggagacgctcctcacttcccagacggggcggctgccgggtggaggggctcctcacttctcagacggggcggctgccaggcagagggtctcctcacttctcagatggggcggctgctgggcggaggggctcctcacttctcagacggggcggctgccaggcggaggggctccttacttctcagacggggcggctgccgggcggaggggctcctcacttctcagacagggtggccgggcagagacgctcctcacctcccagacggggtcgcagccgggcagaggcactcctcacatcccagatggggcggcggggcagaggcgctccccacatctcagacgatgggcggcagggcagagatgcttctcacttcctagatgggatggcggccaggaagaggcgctcctcacttcccagactgggcagccaggcagaggggctcctcacatcctagacgatgggcggccaggcagagacgctcctcacttcccagacggggtggcggccgggcagaggctgcaatctcggcactttgggaggccaaggcaggcggctgggaggtggaggttgtagcaagccgagatcaccattgagcactgagtgaacgagactccgtctgcaatcctggcacctcgggaggccgaggctggcggatcactcgcggctaggagctggagaccagcccggccaacacagagaaaccccgtctccaccaaaaaaatacgaaaaccagtcaggcgtggtggcgcgcgcctgcaatcgcaggcacttggcaggctgaggcaggagaatcaggcagggaggttgcagtgagccgagatggcagcagtacagtccagcttcggctgggcatcagagggagaccgtggaaagagagggagagggagaccgtggggaggtggagaggcagagggggtgttgccattttttatgtcattgaataccctatgtttagctccctcttatcaggttatggtttttagatttttcttccggtgttaatttgcttaggataatggtctccagctgtgaacatattgctgcaaaggaatgatttttttttcttttttaatgggtgcctagtattccatggtgtgtaggtagggattccttatctaatctactcttgatggacacctagattgatttaatgactcttagacatat

SEQ ID NO: 36797 - DNA, 836 bp, Artificial sequence
  DNA replication origin
ttctataaatacagtgatagctccccctgggcaatacaataacagaacagtggattttgtcaaatgagaaccagtaaacagagccatagaaatggattggttagccgccccgtccgggagggaggcggggggtcagccccctgcctggccagccgccccgtccgggaggtgaggggcgcctctgcccagccgcccctactgggaagagaggagcccctctgcctggccagccgccccgtccgggagggaggtgggggggtcaggcccccgcccggccagccaccctatccgggagggaggcggggaggtcagcccccaaccctgccagccgccccatccgggagggaggcgggggggtgagccccccgcccggccagccgccctgtccgggaggtgaggggcgcctctgcccggccgcccctactgggaagtgaggagcccctctgcccggccaccaccccgtctgggaggtgtactcaacagctcattgagaacgggccatgatgacaatggtggttttgtggaatagaaaggggggaaaggtggggagaagattgagaaatcggatggttgctgtgtctgtgtagaaagaggtagacatgggagacttttcattttgttctgtactaagaaaaattcttctgccttgggatcctcttgatctgtgaccttacccccaaccctgtgctctctgaaacatgtgctgtgtccactcagggttgaatggattaagggcggtgcaagatgtgctttgttaaacagatgcttgaaggcagcatgctcgttaagagtcatcaccactccctaatctcaagtacccagggacacaaacactg

SEQ ID NO: 36798 - DNA, 936 bp, Artificial sequence
  DNA replication origin
tggtgactcacacctgtaatcccagcactttgggaggctgaggcaggtggatcacgaggtcaggagttcaagaccagcctgggcaacatagtgaaaccctgtctctactaaaaatacaaaaattagccgggcgtggtggcaggctcctctagtccctgctacgtgggaggctgacgcaggagaatcgcttgaacccgggagtcggaggttgcagtgagccgagattgcgccactgcactccagcctggtcgacacagcgagacgctttctcagaaaaaaaaaaaaaaaaaaaaaaaaagaaaagaaaagggggggtgtcttgggtggcaagtgggggtggggggtgggcagggtggaggaggggcctgctgaggccaaatgtagactcagacatggtcaagtctgaacctttcaacaaagtctggccttccgaggggagacacagaagcagactcattggtcaagggaatgagggggtgccctggaacgagccagtgccttcacctgcaagcgctactaaacctccaagaacaggagacttctgtgttcacaagctgttccaataaaagaagcgcaaaatatctccctagactctttataacaccagacaaggaaagtggaaagttacagttcagtctcccttaggaagaggaaatagcaaaaaccctgcaggagaacttcttgaaccaaacgcaacagaataaaaaaagaatgcaggataacccagttaatggtgatttcatatcagaaatccgtcctgtttgctcttagaagaggaggggtgcggggattcccgggtggcaggtcggtgggagggatcgggagtgagtggggagggatggaaagggagcggggcggggcgatggtcagggagcagtcaggggagggatggagccagcgagggtcgggatagcgagcgagggtgggagggactcc

SEQ ID NO: 36799 - DNA, 917 bp, Artificial sequence
  DNA replication origin
ttgcacccagccctcccactgctgcggcttcttataagcggttccatcaccctgaagcctcttctctcctgcacttggtccccaacgtcttgttgttcccccagtttctgatgcctggtcttgtgatgctcactgtctgctaaactgctgaactgcacttcaccagggaggcaaaacagcctgcaagatctggctccagtgttgaaagcagatgaatctctatgaacagcactgattggtgcatagtcgctgtgttttatgtggtgcgtttgtgtagtgtgtgcacatgcgtgatgtgtgcaggtatgtgtgctgtgtgtgagtgcgtagtatacatgtggggggtgtggttgtatggggtgtgtggtgtgttcatggtatgtttgtgtggtgcgtgcatgtgtagacatactgtgtgtgatatatgtggtatgtgtttgttttgtgtgtttggtgtggtgtgtgttctgtgtatctgtgttttgcttgcatgtggtgtgtgtggcatgccagatgtgttgtgtgtattgtgtgttgtgtgtggtatgtattgcatgtctgatatgttgagagggagagtgtgtgtggtacctgacgtgtagtatgtggcatacacactacatgtacacgtagtaattgtgcactcgtgtgatgcatttgtgtgtgttgtgcatattgtgtgctctgtgtgtgatttgtgttccataggtggtatgtcaggggtatgggggagtgtgtgtgtggtatgtgatgtgtggtgtgtatgtgtcatggtgtgacgcattcgtgtctgctgtgcttattgtgggctgtgtgtgtggcatgtgttgcgtctgatttgtttctgaaataccttctgggttatcagtgtcatctggtcccagagaccagggccagatccttaacagcagcatcag

SEQ ID NO: 36800 - DNA, 3169 bp, Artificial sequence
  DNA replication origin
caacagctgattcccactgagacatatatttcagaaaggagagaactgatcacagatagaaggtatgggacgcaaaaagtaatgaagagaaaagaaagtggcaaatacacgttaaaatgtaaatgtacttggtataaatagtgctaatgatatctagtgggattatacaaagatacactaaaaattccctgcaaggttagttagtatgtaattcagggtgagtaggcaaattggtgaagctaagtaaatctaaggtcattttattattcaggaaaaaggcaaaggtttaaattgactttagactttgataaatgaattatgcgtgctggaatttctagcctatttcccaaacaaagattatcagagtggattaggaaggcaagatctggcctggtgtggtggctcacacctgtaatcccagcactttggggggccgaggtgggtggatcacctgaggtcaggagttgtctaccagcctggccaacatagtgaatataatgaaaccccatctctactaaaaatacaaaaattagcctggcgaggtggcacatctctgtaatcccaggtacttgggagcctgaggcaggcttgaacctgggaggcagaagttgcagtgagccaagaccatgacaagaacaaaactctgtctcaaaaaaaaaaaaaaaaaaaaaaaaaagaggcaaagacaaagacaagatccaataataaattatttatttaaaaacacatctaaaatggaaggaggttgggtgcggtgactcacgcctgtaatcccagcattttgggaggccaaggcaggtggatcactggaagtcaggagtttgagaccagcctgaccaacatggtgaaaccccgtctctagaaaaattagctgggcgtggtggcatgtgctgtaatcccagctattcgggagactgaggcaggagaactgcttgaacccaggaggcggaggttgcagtgagctgagatcgtgccagtgcaatccagcctgggggacccagcaagactccatctcaaaaaaatacgataaaataaaatggaaggatacacaattgttgactataaaaggatgggaaaagatatttcatgtaataagaaagccagcatataagaggcaggaggatcacttgaggccaggagtttgagaccagcccggacaacataaggagaccctgtctctacaaaaaaaaaaaaaaaaaaaagccagatgcctggctcacgcctgtaatcctagcactttgggaggcaccttgggactgttgaattaaaacaaaacacagcttaggctgctgtgggtattgacgacttgtgatttctgtgcagggcactgaatgtcaaagtgaaggaattcaatgaagcccggatcaagggcaggagcaaccgtgaccctcttaaaagagccaatgccccatgtaattagtgacgcgcgcgaatggatagacgctattcccaccgtccctacatagcatccagcgacaccacagccaagggacaggcttggcggaacctgcgggagagaagaaccctctgagcctgattgaaaggcggtgaagagacaggagagggggatcggtgggcggtcccgcctccatcttcagttcccgcatgggggcgaggcaggtacatgggccttgcgggctgtgggtgaaattccattattaattgttttttcactaacctggtgggggagtcgggcgcgagtttcgagagagactctggcttctggcgccaagccttagccaagctcaccaggggcagcgctagatggggagactgggacacacgtctgaacgcagatgtccgaagggagcgcaggaagacagaagcctcccgttgggcaggagggcaaaagctcctgggtcttggatttgcaacaggagttcagacggtgaaagcagggcctcaggatccttctgaccttttgagttttaaacaaggggtgtcagaaaagtcgtcacagggataactgatttgcagcaggaaagcattcataggaatgaggcttctttttgttttttgtctttgttttttgtttttttttttttttttgacagggtctcattctgtggcacaggctggagtgcagtggtgccaccattgctcactgcgctatgtgagctatgtgatcggcgcttaagtgatactctcgcctcagcctccaaaataaatgggaccgcaggcctgagccaccatgtcctgtggctttttaatccttttgatccttggatgtgggctcttcctatcattggaagacagaattcaccaaggttgggatgttcacccactcagaaaacctgagctggggctggggctgtggctcacgcctataatcccagcactttggtaggccaaggcgggcgaatcacctgaggttggaagttcgaggccagcctggccaacatggtgaaacccccatctctactgaaaatacaaaaattagccgggcgtggtggcgcatgcctgtaatcccagctactcgggaggctgaggcaggagaatcacttgaaccagggaggcagaggttgcagtgagctgagacggtgtcactgcactccagcctgggcaacaagagcgaaacttcgtcaaaaaaaaaaaaaaggaagaaagaagaaaaggaaagaaaagaaagccggagctgggattagaccatgtgagacaggttgatttcacgctagtgagcatgcgtggttgccatggtgctcttgcccagtaccacaggtccccaggttcagacgtttggtgcctgtgcttggatgagggaccactgggctaagctgccatccgtgggatgctgactaaaggcctccaagtcagaatatgcccaggcagaactatagggcagcgccatgaagcctcggctggcctgggatagccggtcgtcgccaacaggacgcagtgcagcagggttgaggccccatgcggagagctcattgtcttgggaaaccggcagtgggaagggtggccggcccctcgcccttcacgcaaggcccattcgtggggaacctggcgctaaaccatccctagaggagctgcttctgggtccgagttttctctgcagcagagtggctccctggatgggatctgttgaaagttagccctccacacaggcgtgtgtccgcttcgcagcgtgtgtgcagagccatcaatccttccttcctcaatcccgggg

SEQ ID NO: 36801 - DNA, 771 bp, Artificial sequence
  DNA replication origin
attaatgaatgcaaaacatattcatgttatgtgatacggtggatgcagaagtggattgtgtctgggccctgtcctccaagtgggaacacagccagttggaaagatcagggcagtaaaatccagagactgtgggaacccagaatgaagaacaatgtcagccagaggttgaggctgcagtgattgcactactgcactccagcctgggcgacagtgagaccctgtctcaaaatcaaaacaaaacaaaacaatcagggagcatttggatctgggaaaataaaaggagctagaagagcattttgggcagaggaagcggcttggcacaaatgcatgaaagttgaaaagtacaagaagtctgggggacaaactccagccagggtggaagaggatgtggtggtgggaagaacgtggtgggagaggacagtgggaaggccagctcgtccagctcacggggggtttggtcaacctggggatatggggagcctcagaaggactgaaaggatggggtaggagctaggaatcatccctctgggagatgggttacaggggtggagagcagctgcctcgggagtcctccaagcaatgagggtgagacctaagctggggcctgggcggtggggctgaaaaatagatggactagacagagaggatcaggaagcagaaaggataggacatggtggttgacgggcttggaggtgagagacagggaagtgtacagggcaaagtccaggactctggcctggtgaccaaagggacagcaagacaaacagtgtg

SEQ ID NO: 36802 - DNA, 1157 bp, Artificial sequence
  DNA replication origin
agaaggcagcagcactgagagcagccgcgacgcggtgaggggcccgagggcgacagcgcggggggcttggaccgacggggacccaaacaggtggccagacaggtagacaggtagagggaaaccagaaagacagagacccggagacagggagagagaccgagtgatagcagagactactgagagagagatacaccaggacacggagccagagaggcagaggcacagacagacagaaaccagatacagagacagaaaccagatagagccacggggaggccccaagaacggagatagacccaaacgggcgacagagacagagagactagtatagaggaaccagataggtggctcacgcctgtaatcccagcacttggggaggccgaggggaggattgcttaagcccaggagttcgagacaagtctgggcaacatagcaaatccctgtctctagagaaaaaaaaaatacaaaaattgtccaagcgcagtgccgcgtgcctgtaatcccagctactcgggaggctgaggcaggaggatcgcttgagcccaggagttgtaggctgcggtgaactatgactgcgccactgcaccccagcctgggacaaagcagaacctatctctaaaaatgagagagagagagagagagagagagagagagagagaccagatagacagacaggagagactacagaacagagagaaccaaacgagtaagagatgcagagagatcaagaagccagacagagacccagagacatggagactgagagacaaagaccccaaaaagacagagacacagtgagactagagtcagagagaggggaatcgagacagagggaaacccagaaataaatggcagagatgctcagagaaacaaatagacaaaaacctcgagagagggacatactccgaggaagaaagatctagtgattctagtggacagatctagtggacagataccgaatctgagagactggggtcaggtggagagacagagacagatccaggcactacaagaaagtgacgccaagagaataggacctgatagagaaaaagaaacacctttcataagtcggctttacacctgctcaccctccatacggtactgcaagcctctgtggtccgtgtggttgggtggtcacgggacttgcaccctccccc

SEQ ID NO: 36803 - DNA, 808 bp, Artificial sequence
  DNA replication origin
ggtcagtagggggcgtgctacgacccggactcaaattccggtcccgtctccggtggcgtgtcgccttggagccatcaagccccgcctctggaaacttcaggacacgcctccgtaacgctcagttccatcctttgaactcttaggccccgcctccttgggggggggtctccgcgccccggagcagacgcgagcggcgctcagccgtcctaggccccgcccccggagcttctggtcccgcccaccccgcaggagtcccagcggccatggggacgcgaagcagccccgaggaggggaccccgccgccgctggtcccggaatgcgacgtggaggtccagccccagggccatcccgaggagtcccgggaacaggaggcatccgaagtcctggcggaaccttcgagccgcgggggagctgagcagcaggcagaggaagaagaagtgggagaaggcagcagcactgagagcagccgcgacgcggtgaggggcccgagggcgacagcgcggggggcttggaccgacggggacccaaacaggtggccagacaggtagacaggtagagggaaaccagaaagacagagacccggagacagggagagagaccgagtgatagcagagactactgagagagagatacaccaggacacggagccagagaggcagaggcacagacagacagaaaccagatacagagacagaaaccagatagagccacggggaggccccaagaacggagatagacccaaacgggcgacagagacagagagactagtatagaggaaccagataggtggctcacgcctgtaatccca

SEQ ID NO: 36804 - DNA, 837 bp, Artificial sequence
  DNA replication origin
agaggggagacgtccccatctccattcctgccttcctttctgaactcccaaggtctggacattagagaggctcccatacagaggtggccaagactcctccaggggggcaggaatgaggggctcgagggagactgggaggtcgcgatgctgagttccacgagggtggggccgggccggggccggtggggccgggatggccggatgccgaggccacgggtggggcaagcccgtggctccctcctccctcgggagctgttggacctgttgtcccccctccacttccgggctgctggggagggggaccgggcggcctctctcctccctcttcccctgccacctgtctcataggcagaagcggccgtgcccagcgcgcagagcggagcgcgccgaagcctgagctcgtgagggggccgaggctgtggggaggtggcagttggacttcggaatctcaaggactccgactcctggcttgttcagagaaggagagccccgactcctggatccctgggtgaggcggcgtgggcacggttgccctgcacagtggggtcgggactaagactacggggctccgggaaggatggggcgggagccgaactgctgagtctcggagggagaagatgggtcgctctaagcgaatccaagagattgtagggggctgctgggagggtacaaggcctgacacctagagatgagggaggggaggcggggtcgaagaggtcagtagggggcgtgctacgacccggactcaaattccggtcccgtctccggtggcgtgtcgccttggagccatcaagccccgcctctggaaacttcaggacacgcctccgtaacgctcag

SEQ ID NO: 36805 - DNA, 1187 bp, Artificial sequence
  DNA replication origin
tcccctcccttggcccctagggttcacagtgtccaccgtggaggaggagaggactctgaaccctcggctcaccctcagctgtgaggagtttgtcaaaatcatgggcaacctgaacttgcctaaacctcagcagataggtgagcagctggggacctggacttctgggtctgagagaggaggggctggggtcttggactcctgggtctgagagaggaggggctgggggcctggactcctgggtctgagggaggaggggctgggggcctggactcctgggtctgagggaggagaggctgggggcctggactcctgggtctaagggaggaggggctgggggactggactcctgggtctgaggcagtaggggctgggggcctggactcctggctctgagggagtaggggctgggctgggggcctgggctcctgagtctgagggaggaggggctgggggcctggggtcctgggtctgagggaggaggagctgggggcctggactcctgggtctgaaggaggaggggctgggctgggggcctgggctcctgggtctgagggaggaagaactgggggcctggactcctgggtctgagggaggaggaactgggggcctggactcctggatctgagggaggagggactggggacctgggctcctgggtctgagggaggagggactgggggaggaggagctgggggcctggactcctgggtctgagggaggagggactggggacctgggctcctgggtctgagggaggaggggctgggggcctggactcctgggtctgagggaggaggggctgggggtctgaactcctgagtctgagggaggaggggctgggggactggactcctgggtctgagggaggaggggctgggggactggactcctgggtctgaggaaggaagggctgggggactggactcctgggtctgagggaggaggggctgggggtctgggctcctgggtctgagggaagaggggctgggggtctggactcctgggtctgagggaggaggggctggggtactggactcctgggtctgagggaaggagtgggctcaggaccaaaactctagtttcctgaagaggaaaggttcctaggatttctgggtctccagtggggcctggaactctacctaggccccttagttttaaccttgatttcttcctttcagactttgctg

SEQ ID NO: 36806 - DNA, 2348 bp, Artificial sequence
  DNA replication origin
aaacaaaagaaaaaggaaaaaaaacggccccgaggctatgagtgtactggggcctctccctgggtttctacttctctccctatctctgttcctacatgagtatgtctgtgtgtctctgagcgtctgtccctcgcactttgagtgtctccctgttctctgttttttctgggtctcaaagcgtccaggcattgcactctggctttcctcggtctcgccctcgccccagtcccgctcggcggtcccccgccctctgccccaggcgtccgtggcccctttaaggcgtgctccgcccccgccccgcccttcccggggtcagtgccgtagcgcccggctcctgcaggcgctcggcctccgctcattcctgaccccgcagtgggcgcgatggcggaggctgtactgagggtcgcccggcggcagctgagccagcgcggcgggtctggagcccccatcctcctgcggcaggtgcgggtggctggacctaggaggggactgctgggcactaggcggcagcaaggacggaactccggggtctcttaatagggagagatccggggggacccacgcctgcatcttgcggaaagcggggtggaggtttagggctggactcttgggtcctttaaaggtgagtggtctgggggcctctgggcttggggccagacccctgggtcctctatgaaagaacgtgctggggaccctgattttgggatgttaggaagttggaactcttttgttctgataggggaaggtagtggggctccggactcccgactcccggggaaagagtgggctggggtttctgcttctggatcttaggaagaggatagggtcagtctggactacttggcctccagtgggtggaagtccggttctgcgccctcacctgggtcccccgttcccagatgttcgagcctgtgagctgcaccttcacgtacctgctgggtgacagagagtcccgggaggccgttctgatcgacccagtcctggaaacagcgcctcgggatgcccagctgatcaaggagctggggctgcggctgctctatgctggtcagtccggggaccaaactcatggatcccagcggggctgggctgcagcgtcagtggaatgggaagctggggcccagaactcctgagtctgagggagaaggatctgggctgggactcccaggtcctttctgtaccctccggacctgtccctcctctctctcccagtgaatacccactgccacgcggaccacattacaggctcggggctgctccgttccctcctccctggctgccagtctgtcatctcccgccttagtggggcccaggctgacttacacattgaggatggagactccatccgcttcgggcgcttcgtgagttgggtgctgggtccccaagagggtggtggcctggacttcttaaacttaagggaagaggggactgggggcctgggatcctgagtccttggggaggagggacctcaggacctgggtttctgacccctgagctcatatttctgggaggggggcaccataaacccaggtggggcactggggcaagaggctctgggcaggtggggcactggcggaactcctaagtcaacagcatttaaggagtttccttcctaaagcttaggggcagccctttggcctggcatgcatctccataaaagttgattaggggctggaattctgagggcagggctgagaaggaaagagacccagtcctgtcttgcggaaacctccgtttgaggaaggagcatctgggtgcttagaacccggagcccaggactaggaaaaggacggtgaggaccctggagtgcaacatttaaggaggcactcgctctcagggtcctgtaagtgcagggtccgcacctgtgagtgagcgcctccttaaatcttgcaccaacagcctcaccctagtcctagccctgccgttgcctcacactgggaagtctaaaggttcctgccttcctcactttatttgccacaggcaccagcgggtttccggccagaattgcaaccaggccgaaggagggagggccaggggagttgccctcagagagagggaaacagctggcagggcattcttctgatcaattgctaaagatgtataataaagtttggctgactttggggacagaatgtcaggtgacagaagacagcctccaggttagagagttttgccaaatagggacagttcatttgagtcagagtgtttagaggaaatgagggctgtgtgtgggaagagagttcagctacaatggttacagaagctttatttcaagcctttctctggaagcaggcaaaaatgcattgtacatgtatgtacattgtacataataggtgctaacaaacatgtct

SEQ ID NO: 36807 - DNA, 1808 bp, Artificial sequence
  DNA replication origin
atggggccgtggaggatagaggggggacctggaggaagatacggaaggaacctggcatgcgtcgcggtccagagacccctaatggacttttccctcagagtcccaagcgtaaaggattcaatgcacccctcggaatcagacattcaggcaccgatgcaccctcccgaggctctggcaccaatgcacagtccctccagcatctccagaatctaggcgtccggaccacaaccgatctccctcggggtgattctggcattcagcctgcaagccaatatccgcgcccgaacccctgcgccctcacctgcaggacggcccctccccgggggcggggcttccggctcctcccgccacggccacggccgcagccgctgtcgccgctgctgcactgccctcggaccagcggagctgccccgcccggcgcgcgtccggcgtcgggggagggcaggcaagggagcgcgcgcaagctgcttagcccaacctcatttccatcccctcctcccacgctggaccaaagggggcgtcagaaagcatgcgcagtgcgggctggcagaggctgcagagagggggaagaaggaatggaaggaggggctgggtgcgccagccaggcaggcaagttcgtgagcaagcgcgaagctaccgtatcgacagaaagtgcaccgccggtggcggggcctacggtggctgactggagtcaagcatgtacaagactaacatggacaaactgcgcttggaaatcagtgcatgcacccgtctttttaatgtccctcttcttttcgagaattccgctgagttccatctccagaggcagtttcaagagctcgctgctaattctacccttcaaggcgtttgcaaaaagtctggccagttcttcgagagagggcgggggcgggactccgggctcaaagagagccagtgcccaataaaaggcacgttatttgcacagcgccttggcacacctcgctattgggtgattcaagattctcagccacgcacccatctaccttccccctcggaagcctgggtggtcccgaggtgccctggcccatgctcttggtgccaggcctggggtggcatgcagcttagcattcttcccgagcagtggcggtgcaccttcctgcctggtgcagaaaggaccaggaaatgcccataaaagtcctctgcatgggtgggtctcagtccgataacccgcaaggtctggcgatccctgggagtttggcggggttatttggactctggagccagattgcctgggtaactggtttggaatacggctgtgccactttctagccgtgtgaccctttctagctctctttctaggcctgtttcctcatctataaaatggagcgtttttaggattaaatatgataatcaatggaaagtgtttagactagaaagtgcctaggccgggctccctgtctcatgcctgtaatcccagcactctgggaggcagaggcgggcgaatcacttgagcccaggatttccaaactagacgggggctaggcacggtggctcacgcctgtaatcccagcactttgggaggcggaggtggacggatcacctgacgtcaggagttcgagaccagcctggccaacatggtgaaaacccgtctctactaaaaatacaaaaattagtcaggcatggtggcacacgcttgtaatctcagctactccggaggctgaggtgggaggatggcttgaacctgggaggcagaggttgcagtgagccaagatcaagccactgcactccagcctgggcaacagagtgagactccgtctcaaaaaaacaaaaaaaccaaaaacccaaacaaa

SEQ ID NO: 36808 - DNA, 942 bp, Artificial sequence
  DNA replication origin
cagcggaattctcgaaaagaagagggacattaaaaagacgggtgcatgcactgatttccaagcgcagtttgtccatgttagtcttgtacatgcttgactccagtcagccaccgtaggccccgccaccggcggtgcactttctgtcgatacggtagcttcgcgcttgctcacgaacttgcctgcctggctggcgcacccagcccctccttccattccttcttccccctctctgcagcctctgccagcccgcactgcgcatgctttctgacgccccctttggtccagcgtgggaggaggggatggaaatgaggttgggctaagcagcttgcgcgcgctcccttgcctgccctcccccgacgccggacgcgcgccgggcggggcagctccgctggtccgagggcagtgcagcagcggcgacagcggctgcggccgtggccgtggcgggaggagccggaagccccgcccccggggaggggccgtcctgcaggtgagggcgcaggggttcgggcgcggatattggcttgcaggctgaatgccagaatcaccccgagggagatcggttgtggtccggacgcctagattctggagatgctggagggactgtgcattggtgccagagcctcgggagggtgcatcggtgcctgaatgtctgattccgaggggtgcattgaatcctttacgcttgggactctgagggaaaagtccattaggggtctctggaccgcgacgcatgccaggttccttccgtatcttcctccaggtcccccctctatcctccacggccccatccaagccagggatgaaatttaacggcaagaagggcgcagttgacgcggcgtcaatgaactgagactaagtcaaaagccgggtaaagctaggtcttcgacgtgaagccccgcccactgtgcccataggcccctcccctgggacggtgatgaaaga

SEQ ID NO: 36809 - DNA, 1370 bp, Artificial sequence
  DNA replication origin
cagaaggtctgatgccccctgtccagtgggggagggtgtagtgggaggatgacatgagtccgctgtggcaccccaaacttcccactcttgcctcttgcaggtacccccccaacacacccacactgttcctgccctcctcacccacccactctccctccttagcaaccccagaccaaaaccaagcccactcaggcagctggacccagctcaccccagaagcccccaacccctgaagagaccaaagcagcctcaccagtgctccaggaagatatagacattgagggggtacagtcaggtcagactctgagggaggaggggctggggcctgggctcctgagtctgagggaggagggcctgcggcctgggctcctgagtctgagggaggaggggctggggcctggactcctgagtctgagggaagagagcctggggacctggactcctgggtctgagggatgaggggctgggggcctggactcctgggtctgagggaggaggggctgggggcctgggcttctgggtctgagggaggaggggctgggggctggactcctgtgtctgagggaggaagggctgagtcctggactcctgggtctgagggaggaggggctggggcctggactcctggatcagagggaggaggggctgggggcccagacgactggatctggagggcagttgaggctgggggcatgagatgcctgggtctgtgccatactgggagagctgccagtcttcccaggagacaaggcagccttgcattgactgagcttctacttgcagaaggacaggacaatggggcggaagattctggggacacagaggatgagctgaggaggtagggctggggctgggggttggggtgtccctggccttgggtgtaggggaggctgctctgcatgctcactctctactcctcttggcacccccagggtggcagagcagaaggaacacagactgccccctggccaggaggagaatggggaagacccgtatgcaggctccacggatgagaacacggacagtgaggaacaccaggagcctcctgatctgccagtccctgagctcccaggtgggaaatccccccatccctcctgaagtggcattttctcttctcagttctcagctgggacttgccctggccagccctggggtcactgctgcccccgtgtcttgcctcccctctccttcctcaacccactccctgcctcagcaccttcaggttctgccaggcttgttcctttcctttcagcatcctctctgtgacttgcctttttctcccctccagatttcttgttctgaccactcccctcgcagccatgtgccaggtgtgacctcctttttttcacgtcaggggtgagggccccacc

SEQ ID NO: 36810 - DNA, 1132 bp, Artificial sequence
  DNA replication origin
ctacaagacctacatggcaccttcaaggaggagaatcccacattcaagaaccagctggacctgaagtttcacaaaagtccatggaaacctccatcacgacccctccctgcccctgagctttctcagcggaccctggcatccaaaatccccagccatgtaattaggcaaacaggcttcatggtggagtcgcttcccgcccctggaagcagctttgctggcatcaccactgcttcttcgtccaactctggacagttccttgggcagtggtcaacatcccgcccatgaaaaaccagggagctgctggtccctcctctctcaggacacaaaagtcctaagtcaaagtcgtggtccgaagaccacaccacccatgactacagcctcgccctctgtctacactgcagggtgcccactacactgcgaaatatgtacggcggcggggagcaggtgccatggccaaatgaagacctgcagcagtgacaaggacacatgtgtgctcctggtcgggaaggctacttcaagtaagaggatgtggcctgggacctggtggggaggtggggtgtaccttcagggtggaagagactaccatgctgaggggggatcatcatggttctcaagacgggagcgtgggaagaaatcagtggagagcaggaaagagggaaagaccatcatgagatggagggaacagaaataagtggtgtgatagaaatcattattgtcacagaattctgaaaatgacactgtcctaaagagaaggaaaatgtgggaggggtgagagttaatagactttcttaggcagaagaggggtaaggaaagacactgtggggggcagagaaatagtgagaggggaagaatctaactggcaggaggtggaaatggtggggagtggatagagaaggaagaggctgggctggggtgggaaagtgtaagtgtaatcagggaagaggtcattcctgaccgagggaggagagatgatggtggagtgttggagtggtggaagagacagaaaagggatcaccccaaacaggagatggatgataaccttgaagtatggagcaaatcattttttttcttttttgagacagagtctcgctctgtcacccaggatggagtgcaatggcgcgatctctgctca

SEQ ID NO: 36811 - DNA, 688 bp, Artificial sequence
  DNA replication origin
cagaagaggggtaaggaaagacactgtggggggcagagaaatagtgagaggggaagaatctaactggcaggaggtggaaatggtggggagtggatagagaaggaagaggctgggctggggtgggaaagtgtaagtgtaatcagggaagaggtcattcctgaccgagggaggagagatgatggtggagtgttggagtggtggaagagacagaaaagggatcaccccaaacaggagatggatgataaccttgaagtatggagcaaatcattttttttcttttttgagacagagtctcgctctgtcacccaggatggagtgcaatggcgcgatctctgctcactgcaacctccacttcccaggttcaagcgattctcctgcctcagcctcccgagtagctggaattacaggtgcgtgccaccacacctggctaatttttgtattttttagtagagacggggtttcgccatgttggccaggctggtctctaactcctgacctcaagtgattctcccgcctcgacctcccaaagtgctgggattacaggcatgagctaccgtgcctggctgagcaaatcatcgtaaagaggagaagcagagacagggagggggagatgtggatgagtaaaatgaaagggaggccgggcacggtggttcacgcctgtaatcccagcactttgggaggttgaggt

SEQ ID NO: 36812 - DNA, 1451 bp, Artificial sequence
  DNA replication origin
ctggaattacaggtgcgtgccaccacacctggctaatttttgtattttttagtagagacggggtttcgccatgttggccaggctggtctctaactcctgacctcaagtgattctcccgcctcgacctcccaaagtgctgggattacaggcatgagctaccgtgcctggctgagcaaatcatcgtaaagaggagaagcagagacagggagggggagatgtggatgagtaaaatgaaagggaggccgggcacggtggttcacgcctgtaatcccagcactttgggaggttgaggtgggaggatcgtttgagcccaggagtttgagaccagcctggacaacaaaaagagatccatctctacagaaaaaaaaaaaaaaaaatagttgcgcatggtggcacatgcctgtagtcccagccacttgggaggctgaggcaggaggatcacttgagcttaggagatcgaggctgcagcgagctaagtgcacaccgctgcactccagcctgggcaacagagggaaacctgtctcagaaaataaaatggaagagagaagatgggcatgagttaaatgaaagagaccaccccagacctgaaaaatgatggaggagaaagggagcaatggaagagaccagtgggggacagagatgtttatacaaagctgaaagagactttcaatcacaggaggagagatgatgaggcctggtgagggaataaaggcgactttgggtgcagggagaaaacactggtcgggagaggctgtgaaaggaaagtgagatcgaaaatcacccagccagcgttggtgggttaaggaaggacctgaaaggcttgaagagaacccccatcccggcatagaagaggaaacgcaccctcgggaagggaggagagagagctgggggacccctcgatggagtgaagggggaacctgtgaattgggtaggaagagaccaccacatggtggggagggggaaggccggggagactggaagaacccaccttaaacaagacctgaaaatagccaagaggggcagcaagagaccctcgttgggaggtctgaggagtgaccatggcaggatctgagagaggaggatgcctgttgctgggaccggggttcattggaagagactacggggtgggcgggggttggcggggagttgaggaggctggaagagaccatttcacgaaggcatgggggtggccataggcggcctgaaatagagtaatcccggaaggacagggagagaggggtggccgtgggtggggtggggtggggtggaagggaccacatccagcaggctgaggttggcaatggggagctggaagagaccaccaaaggccgactaggggctatggcagcgggagggagggctacctaagaaagcactccaggccatgcaccagacagatttggccgcatggctctagggggcttgaaagagaccgccccggccgggctggc

SEQ ID NO: 36813 - DNA, 1103 bp, Artificial sequence
  DNA replication origin
cggggttcattggaagagactacggggtgggcgggggttggcggggagttgaggaggctggaagagaccatttcacgaaggcatgggggtggccataggcggcctgaaatagagtaatcccggaaggacagggagagaggggtggccgtgggtggggtggggtggggtggaagggaccacatccagcaggctgaggttggcaatggggagctggaagagaccaccaaaggccgactaggggctatggcagcgggagggagggctacctaagaaagcactccaggccatgcaccagacagatttggccgcatggctctagggggcttgaaagagaccgccccggccgggctggcgcagtggctcccgcctgtaatcccagcactttgggaggccgaggcgggcggatcacctgaggtcaggagttggagaccagcctggccaacatggtgaaaccccgtctctattaaaaatacaaaaaaatagccgggcatggtggcggtcgcctgtgatcgcagctactcgggaggtggaggttgcagtgagccaagatcgcgccattgcactccagcctgggcaactccgtctaaaaaaaataagaaaagaaagaaaaaaaagaaagagaccatcccaggaagttgtggggttggggaggcctagggttaggcaagaccttgaggcaggggttgaagccagggagtggtcagccagcactgtccctgcctgtccccatcccacagagggcaaggagttggtgcacacctacaagggctgcatcaggtcccaggactgctactccggcgttatatccaccaccatgggccccaaggaccacatggtaaccagctccttctgctgccagagcgacggctgcaacagtgcctttttgtctggtaagaagcccgtggtgtgtggtgtgtgctctggctctccactgacccttgctgtagccacttgctggctctgagcctgtttccttacctgtaaaatgcagtgtctattagcaaccctggtgtttcccggggttgttgggaggttgggggaacggcttaaacatccctattcaccttacacttcatcctcatcctcagttcccttgaccaatc

SEQ ID NO: 36814 - DNA, 1010 bp, Artificial sequence
  DNA replication origin
ttacaggtgcctgccaccacacctggctaatttttgtatttttagtagagacggggtttcaccatgttggccaggctggcctcgaactcctgacctcaggcgatcgacccgctccggcctcccaaagtgctaggattacaggcgtgagccaccgcccctggccaggaatcctgatacctttgggaaccatggtgaatgacatctagacccttctgtcctgaagggagttggtggcccagactctagcagggactatgtctttgtctcctagggagtagaaactggagttactggatgtttagtcctccagggaggctggtagaagtcctgtttcctaattggtggggaggtgtccatgactgggacctgaactccagtataggggagggagacctgagcgccccagggagctggaactcttgggcttcagagcctcagagggaaacagggtctacatttctctgggagaaaaagcctgcacacaggtccccaaggagcagtgggctttgaatcttgatggggtggcggaggcccctggggtctgagacttccggggttctaagatggctgtggaccttggttcctaaatattgggtaaggggaggtctgcatctggaggagggatcgggggcttgtgcgagaaagctggagacttcttgatctctcctggggagtggatgggtttctataattgccctccaaaagcatgtagggagggtggtcccacaaaaatgaggtgaggtgggtaagaggtctgggcatggtgggctctgggagtagccagggaccaggaatgaggtcttttgggtgtggaagggcagtaaagcatacctcagagacagctcctccaaaccttgtattgggatcccggcaactgcctctgtgagtgtgactgggaagggatatgactgccttcatcttctaggtgctgagcaattcaggtgatctctggggagtctgtttctctgtctcttttctttaggagtttctatctttttttggcctttttc

SEQ ID NO: 36815 - DNA, 996 bp, Artificial sequence
  DNA replication origin
acgagacgtgggaggtgctggaggaggcgccgccgccagtgttccccctacggcctggcggactcccagggctatgcgaatggctgcggcgagcgctccccccagcccaggcaggggcactgctgctggcgttgccaccagcatctcccagcgctgcccgaaccaaggctgcggcgttgcgagccggggcgtggaggccagctctgctggctagtctggcggcggcggcggcaccactcccagggctgggctgggcatgcgacgtggcacttctgcggggtcagctggcggagtggcgacggggcctggggctggaacccacggcactggctcgacgtgagcgtgccctgggcctggcttctggagagctggcagcgcgcgctcatttcccaggcccggtgacgcgcgccgaggtggaagcaagactgggcgcctgggcgggcgagggcactgctgggggcgcagcactgggggctctctccttcctgtggcctgcgggtggtgcagcggcgacaggtggcctgggctaccgagcggctcacggcgtcctgctgcaggctctcgatgagatgcgggctgatgctgaggctgtgctggcaccccctgagcctgcccagtgaggagtgggagggggcttgggagtccagactctgacaggggatgcctgggcttaatcctgggtgcttgaaggggatgtggactcttgacttccagctgggatgtgtgacttcttatcacctggattcagagagtctgggggacaggaatcctgatttttttttttttttttcttttttttgtgagacgaagtctcttgttgcccaggctggagtgcaatggcgcgacctcggctcactgcaacctccgcctcccgggttcaagcgattctcctgcctcagcgtccggagtagctgggattacaggtgcctgccaccacacctggctaatttttgtatttttagtagagacggggtttcaccatgttggccaggctgg

SEQ ID NO: 36816 - DNA, 930 bp, Artificial sequence
  DNA replication origin
cccttccctttcctacccctgccccattctgggatcattaggaaagctctgcccttgtcatcatagcccagtccatgtcacccagcccctcttctacctttgaccctgtcccttcttgtccccacaggctcctgccaccggcgcaggatggcttcgaggtgttgggtgcagcagagctagaggctgtgcgtgaggcctttgagaccggcggccttgaggctgcgctgtcgtgggtgcgctcaggcctggagcgcctgggcagcgcacggctagacctggccgtggctggcaaggctgacgtgggccttgtggtggacatgctgcttggattggatcctggcgacccaggcgctgcgcctgcttcggtccccacagcacccactcccttcccagccccagagcgcccgaatgtggtgctctggaccgtgcctctgggccacacgggcactgccaccaccgcggccgccgcctctcacccaacgcactacgacgccctcatcctcgtcacccctggggcccccactgagaaggactgggcccaggtccaggccttgctgctaccagatgcgcctcttgtctgcgtgcgcacagacggcgagggcgaggatccggagtgtctgggagaaggcaagatggagaatcccaagggcgagagcttaaagaacgcaggtggagggggattggagaatgcactcagtaagggaagggagaaatgtagcgctggatcgcagaaagcaggcagcggggaaggtcctgggaaagctggcagcgagggtttgcagcaggttgtcggcatgaagaaatcaggtggtggcgactcagagcgggccgctgcgttaagcccggaggacgagacgtgggaggtgctggaggaggcgccgccgccagtgttccccctacggcctggcggactcccagggctatgcgaat

SEQ ID NO: 36817 - DNA, 1418 bp, Artificial sequence
  DNA replication origin
ccccctccacctgcgttctttaagctctcgcccttgggattctccatcttgccttctcccagacactccggatcctcgccctcgccgtctgtgcgcacgcagacaagaggcgcatctggtagcagcaaggcctggacctgggcccagtccttctcagtgggggccccaggggtgacgaggatgagggcgtcgtagtgcgttgggtgagaggcggcggccgcggtggtggcagtgcccgtgtggcccagaggcacggtccagagcaccacattcgggcgctctggggctgggaagggagtgggtgctgtggggaccgaagcaggcgcagcgcctgggtcgccaggatccaatccaagcagcatgtccaccacaaggcccacgtcagccttgccagccacggccaggtctagccgtgcgctgcccaggcgctccaggcctgagcgcacccacgacagcgcagcctcaaggccgccggtctcaaaggcctcacgcacagcctctagctctgctgcacccaacacctcgaagccatcctgcgccggtggcaggagcctgtggggacaagaagggacagggtcaaaggtagaagaggggctgggtgacatggactgggctatgatgacaagggcagagctttcctaatgatcccagaatggggcaggggtaggaaagggaagggccagactgatggcacagcaaatagaaaccagatagggagaggcagtgatgatatgggtggggcttcaagcaataatggagtcttgattattggacgggtggacataaggtcaggtttcccaccccagcctaaaatggggattgggctaaaacttccatggaatacagtatttgggggcggggtttttccaagggtcggctgtgctgggtgggacaaagctcacagagggtggggcctagaacaaagaatcgcaactgtattgtggcctaaacacaagtccagcactatttgagacaaggtccccaagggcactcttttcaggggctgggcctaaggagggtcagtgaggggagaaatctcatctaccagttcttaccaagggggagtggctaaggtgactcccgggcaggtgaggctaaggaaaaaagatgacagtgtactgggacaagggactgtccctctctgagcctcgttttaaagtctttaaaatgaggaggctggcaggtggtagagcaaatccaggaggtagccagcaagtgggcacagaaacaagagggagctggagaaaggaggtagatgaggatgccccaaaataataaagctcattgcgggtgtggctttaggtgcttgaaaacaaaactgatggtggggagggctcaaagattagagttttcaggtaaaatcttccagggggctgggcagagagtctcacgactgtaatcccagcactttgggaggc

SEQ ID NO: 36818 - DNA, 1205 bp, Artificial sequence
  DNA replication origin
ggacccagccagaaagccggcactcacctccgcagcgcttctgcctggctctgcagcgccgcccggaggcgctctagctcctcgcagccgtcgctgctgccgcagttcgccggtagcacaaacagatccgcagctcctaaccccgcgctgttcagcagagctgctgtctgatcacgggcctgggcggcagtctgtgaatccccaggacggaggttccgcacagccagtagcggggtccctcgggccagggcggccagcgctgcctctcccagggctggagccaacggttccccgttcccctcgggtccgggcagcaccagtaccagcacgttggcttccgccgcccagggccccggcgctgcgggtgggcagctcagctcgcccagaaaaaggcctgggcccgcagctcttaggctgggaaccccggagtccggccgtccctcgggggcctcgagcgtctccacatccttgtcgcacagcgctgcgatcagcgcggacttccccaagcccggaggccccaggaacaaggcggtcacgtcaccctgcggcggaggcatggctggaaagcaacgggtagagaagacctgggtcagggagcacctagccttttcctttcctagccgccccactcggaacccaggcctcagtccttcaccctgtccccttcggttcttgagtgtcactctccaggacctaaaaaatccagagcccagaccctattcccccagaatcccaggcgtcctgtctgtccgccctccctctagatggaaacgtttccctttctgcttcaaaaactctgaaatcaggcgcggtggctcatgcctgtaatcccagtgctttgggaggccgaggccggaggatcgcttgaggccaggaattcgagaccagcctggccaacatgtggggggactctctggtagagtctccgtctcgataaaaaataaaatttagccgggcatggtggtgtgcgcctgtagccccagctactcggaaggctgcggcgggaggatcgcttgagcccaggacttggaggctgcagtgggccgtgatcacaccaccgcactccagcccaggcgacagagcaagaccctctctgaaaaataaataaaaataaaacctcagaaatctggcttccagtccctcctccctcggacacattgttattttcatctttccccttcccccttccaaatcaccaaccgagc

SEQ ID NO: 36819 - DNA, 1014 bp, Artificial sequence
  DNA replication origin
ttcatgctgcatgcccggggtgaggtgtaggcagagcccccatacggggagcttggcagaaggggtggggtgggaggagggggctgaggaaattggggttgtgacagtggtcatgggggatggggtactgccggtctgtgttgtcttagaagtagatgtgtgatggccagaataaaagccaaaatctgtatctgtgtgtgttggttcagagtgtgtgtgtgtgtgtgtgtattcccgcccgtgtgtgtgtttgtgtgtgtgtgtgtgtgtgtgtattccccctgggctccttcttggggaaccttggggtcttttgggaaagataacatttactgcgtgcttgtattcgatgaggtttccatgtatttacttacagaccccataatgtaaaggctctaataatagaattttgtttctcactcacaaaatggtgctgggtgagtcatttggggacccaggccatcccttaagcctgttgtctcccccatggtccagactgggtggccatagcctgggtcctgctggcagaagaggacaggatgcctggtgaggtgcacgtgttgtcttacaagccctggcctgccaggggcacacactgcttccattgacacgcctttgctgagaaattagatatgtggccgcagctaactgcaaaaacaacctgggagaagcagtctagccaagcgcccagaaagcagaaaacagttcatggaggacagctagggctttctgccacatagcctaggaacttccacaaagaggactttaattataatcacagctacgctttctcagcgcttcctgggtatctggtgccagtccaagggctttatatatattgactcatagaaatggtgcatctaggaacttacaaaaatagaaccttaatgataattgcagctgccattttcccagcacttacagagtgctgtacttaatttgcatgagattatcagcttcttagaataaccctgtgagacagggattgtgatccattaattcatttaacaaata

SEQ ID NO: 36820 - DNA, 863 bp, Artificial sequence
  DNA replication origin
ctcagagccggactccgaagaggaagaagatgaggaggaggaggaagaggagaccactgacgatcctgaatatgatcctggctacaaggtgaagcagcgccttggcgggggccgtggtggcccatcccgccgggccccccgtgcagcccagcccccggcccagccttgccagctctgtggccgctcaccccttggggaggccccaccgggaaccccaccctgccggctctgctgccctgctacagccccccaggaagcaccagcccctgaaggcagggccctcggggaggaagaggaggaaccacctcgggctggggagggccgaccagctgggcgggaggaggaggaggaagaggaggaggagggaacctaccactgtacggaatgtgaggattccttcgacaacctgggggagctgcacgggcacttcatgctgcatgcccggggtgaggtgtaggcagagcccccatacggggagcttggcagaaggggtggggtgggaggagggggctgaggaaattggggttgtgacagtggtcatgggggatggggtactgccggtctgtgttgtcttagaagtagatgtgtgatggccagaataaaagccaaaatctgtatctgtgtgtgttggttcagagtgtgtgtgtgtgtgtgtgtattcccgcccgtgtgtgtgtttgtgtgtgtgtgtgtgtgtgtgtattccccctgggctccttcttggggaaccttggggtcttttgggaaagataacatttactgcgtgcttgtattcgatgaggtttccatgtatttacttacagaccccataatgtaaaggctctaataatagaattttgtttctcactcacaaaatggtgctg

SEQ ID NO: 36821 - DNA, 837 bp, Artificial sequence
  DNA replication origin
cccctgcgcgctgtcctaccctacttgcgacgcaggcgcagaggctgggcgtgcagccgccgccgcagagccggagcgggggccgccggcgccggtgagtgtcccgggcaggggtgcgcgaggcatgccgggaagcgggcgctacggccccgctgcatgatgggagcgacgactcccgtcaccggggagccggcggtctggggccgtggtgacccgagggcttctttttctccccctacgcgtttgtgccgccctggggcatcctgggagaaccgagcgctccgccttgaagcgctgtgggagtcggtccgctagtcgtaggcctggtgcatcctgggaaagagtgtcccagatccttgtcgagaccggttccttttatcccacacctgccgctgaccgtcctggaggcttggagcgcttccacacggggagtctgggaaggtggtcgctataggcctaaggcatcctgggaagaactgccacaacgaattgtgggaactggccgttattgtcccgtagtggaaggttttgccctggtctctttgctcgagcattggaacgggtgcctattgtgttcacgcggggcatcttgggaattgactgctataggcccagggcattgtggggtctccagcactgtgtttgcctttcagtttggctgccataggcgtggtaggagtgggacttgtgaaccaagggatggccctacctgacgtctggaatactctggaaggggccttgtgtgacgtgggcttggaaaagtgtaggctgatgggcattgtctcctggtaacttcagggaatgtcttgattgtcccaggtgtgtggttgccgtata

SEQ ID NO: 36822 - DNA, 1048 bp, Artificial sequence
  DNA replication origin
gcacaaacgcgtagggggagaaaaagaagccctcgggtcaccacggccccagaccgccggctccccggtgacgggagtcgtcgctcccatcatgcagcggggccgtagcgcccgcttcccggcatgcctcgcgcacccctgcccgggacactcaccggcgccggcggcccccgctccggctctgcggcggcggctgcacgcccagcctctgcgcctgcgtcgcaagtagggtaggacagcgcgcagggggcgtgaagagcctagggcgcttgcgcggcgagacggactagtcctgtagcgctgtgggaagaggggctatgcgcgtcgggccgtcgacgagacccgcgcggggggcgccgtgctttgcccctcgctgcctgggtttacttggtacagcccgcggcccaaaggaacaagaagctgaagggttcgcgcgtgcgtgtgcggggcaggaacgcgccttacaaaactgggatgcgctgggggtggagggcgctagttcggactggatcctgggcccgaggcctgcttatttgcataatcctagcgcgggacaatgaaaggcctcccgcactggaaggagtgatttgcatattccccggaggggccttactccagagcgcagtgattagcatatggcgggggcaacctgagcaaagcgcatgcgcgcagggactgcagactgacgcgaagtgggtagccttgtcttcgtaggggatcagtttgcatcctgagagagggcacgagggccaggacccctcccaaccaggataaaggtttattgatctcctaggtgtcaggccccatgctggcggattctgtggtttctgcagtgaaccatactcctgtactcacggcaccccagtcgaaggagatacgcacctaattagacaactactacccagaaggtcagacctggagtgaggaacacagggggctgtgggagcctaagaggcgcttgccccggcctctggttctagaaagacttccaggaggtggtgatccttaagccaagtacgaataggagccaactagaatgggaatgggt

SEQ ID NO: 36823 - DNA, 991 bp, Artificial sequence
  DNA replication origin
gcctcagcctcccgagtagctgggactacaggcgcctgccaccacgcccggctaatttttttttttttttttttgtatttttagtagaaatggtctaggatggccaggatggtctcgatcttctgacgtgatccgcccgcctcggcctcccaaagtgctgggattacaggcgagacccagagtctcgctgggtggcccaggctggagtgcagtggctcaatctcgactcaatgcaacctctgcctccagggttcaagtgatcttcgtgcctcagcctcccaagtagcaaggattacaggcaccccccataacccctggctaatttttgtagttttaatagaggcagggtttcaccatgttgcccaggctggtctcaagctcctgacctcaggtgatacaccagcctcggcctcccaaagtgctgggattacgggcgtgagccaccgcgcccagccccatgtactcttcatgccagttacaaccaccaccaactcatggccaatcccgatttatccataactccagtcaaatgtgtaagtgctattatggagagatcaggaaaagcctctcagattgacatctgtaccaagatatgaatggtgagcacaagagtaggtattcaaaggtcagagggaaaagcattttcaggcggagggaacggcaagagcagaggcccgagctggtaaagagtttggggtaaggtggagctggacagaaatggagggaggaggaagtaggtggggtcagaaagataagcacggccagaccaggtgtatagccctgaggccatgataaagatttttggattttttttttttcctaatgggatccctttgggggagttttaagccagaatgtgacaaagtcacttacaggaagactggaatgtagccatagttgaactctaacatcgtctatagaaccatttcccgtctccagttaggttctaggcatactaagctgctcttgcttcctcaatcaaaacatgcgc

SEQ ID NO: 36824 - DNA, 814 bp, Artificial sequence
  DNA replication origin
gattccactgcaggtttctgagggaggaggggctgagaccctgacgcctaggtcctgcgaatacaggcgccttcacaaggctgagctggggaagaattgacgctttgtgcgaggatgttcggactccgccattgatggggggctgaggggggttcagtcaggacgcagggatgtaccacctccctaagggaggaagggggaaggaggcaggatgccaggagccccctggggagcggatacagagggggtggtggtgaccttcccggaactatgaccttgagactcccttgggtattcgctgactcaggacccaggaagcgctccccccaccctgcttagtctccgtggaaacatccaccagctgtgtactctggacccctggctcctgggtcctgaaggaggagggggctggaggcccagactcctgtgtctaagctaggagagggctgggggctctgactcctaggtttgaaggaaggggctgctgacagcccagactcctgggtcctgatcgagaagggggctaggggtctggatttcgggaacctgagagaggaggtggttgggggctgaattcctgggtctaaggcggaaagaagccggggttccagactcctggaacctgatggaggaggggctgggagcctagactcctgggtcctgggagaggaggtagttgggggctggattcctgggtcttacgcattacctgctccgccactctttcccaaaccctccctgtccccttttccaagcaccatccccatgacgactcctggctgtcaacacagtttaaagggccagtgcctcagtc

SEQ ID NO: 36825 - DNA, 1083 bp, Artificial sequence
  DNA replication origin
tttgtgtgtgaggttgctgactcacccctacgcccccacctgatgcctaggtccccagatgggaggggacagaggattgaggaaaggcaggactgtgcttctaggggttgaggactggggagttagagtcaaaagttttcaggagaggaggggctggatctgatggaggaggggctgggggcctggactcctgggtctgatggaggagggtctgggggcctggactaatgggtctaaaggaggagggagctagggtcttagactcctgggtctcaaggaggagggggctgaggtcttaggctcctgggtccagggaggagggggctggggtcttagactcctgagtctgagggaggaggggctggggtcttagactcctgagtctgagggaggaggggctggggtcttagactcctgggtctgagggaggaggggcctgggatcttagactcctgagtctgagggaggaggggcctggggtcttagactcctgagtctgagggaggaggggcctgggatcttagactcctgagtctgagggaggaggggcctgggatcttagactcctgagtttgagggaggaggaggctggggtcttagacccctgggtttaagagaggagagggccgagggctggaactcctgtgtccggaaggaaaagggggctgggagtccacactcctaggtcttgagggaggaagggatgaggatacagactcctgggtcctgagggaggaaggggctggaggcgggggattccactgcaggtttctgagggaggaggggctgagaccctgacgcctaggtcctgcgaatacaggcgccttcacaaggctgagctggggaagaattgacgctttgtgcgaggatgttcggactccgccattgatggggggctgaggggggttcagtcaggacgcagggatgtaccacctccctaagggaggaagggggaaggaggcaggatgccaggagccccctggggagcggatacagagggggtggtggtgaccttcccggaactatgaccttgagactcccttgggtattcgctgactcaggacccaggaagcgctcccccca

SEQ ID NO: 36826 - DNA, 1370 bp, Artificial sequence
  DNA replication origin
gagaagaaagaaagacagtgagaggacagctttgcccctcatcctggccgaggtgaggatggctctgcctcaaaccctggagtggggaacatgtaaccgcactcaacttgccagaaaccccttcacggtctgagctggcgttccctttcatgtcactgagttcaacatcctcactttacagaaagagaaacagaagcctggagagaggaaggtgtttaccattggctgcgatggcaaatggcaagagccaagatttaagcccaggccgccagccccatgccacctggttataactcctctcaccaatctctgccgaacacccagccctcctgcttctgcctagccaccttccaatcctctgttccttccaaaagtggccttatccaccagggaggggtgacccgtggcaggttcaagacttacacagtgtgagagtgtgtgtgggtgacatttcctgaccttgtccccattctcagggtcacccaacctcgggggtctccagcttctcacagtgtgtgatgagggtatgtggatggctccctggatgtcctggacaggggcttctctgtgagtcaagcctgggtgtgtgaatgggtgagcagggtttggagaggcattcgctgaatccacgtgtgtgcctacacgccaaggtcccccattctcacttccccacacacatgcacacagatgttcccctccagggctctttagaatgccctgcctgactgaattcctcttcaggggcacagagggatagagagagggaggaaggtaggatgggaatgggagatcccgggatggaggctgtaagcgtagagagaggaggcacagcagaaagacagggatggagatagtgggacagagaagggggaaagagacaggtgacagaaagggttagagaaacgagtgacagaaagacaggggacagagacaaggggatggggcagataggggacagagaaaaagggacagaaaaacaagggtgacagcgagacagagacagggaccaagaataggggcagagagggagggcagaaatccgggggaaagagaatagacaggatgatggaggggacagagtgacccaggaaaaggggacagagaccaggggacagaggtaggggacaaagacagaatagatgaggaacaccgaggcaagaagagagggagacagacagaaggagggacaggacttcgagactgagggatagaggacaagggtagggggacgaggagccagacgggggggttcagagacgggcggacagagggacgcagagactggacagaaggacagcgggaccggcctggggagggcggacttgtgtgtgtaggggggtctcgggccctttgtccccgccgggatccag

SEQ ID NO: 36827 - DNA, 1539 bp, Artificial sequence
  DNA replication origin
gagggcggacttgtgtgtgtaggggggtctcgggccctttgtccccgccgggatccagcctgcgcgggtgggggggctgcggcacggcggccgggccccgcgccccctcccccgctcgtcgctcccggctcccggcccgcgctgcgctttgtcccggggagggggcccggcccggccccgcgcgcattgttcggcctctgcggccccgaggctgccgggctgtcaccacagcgcgccccccgccccagcccggccggccgaccccggcccccgaccctacctggccccgccgcggccgcccacagcagcagcagcggccactggaagcgccgggcccggcccatggtgccgccgccgccgccgccgccgctcgctcccggcccggcacctgcaccgcccgcgccgcccgccccgccccccgcgccccgccccctgcccgcccgggggcggggcgccgaggccggggcggggccggggaggggagggggagacggaggagaggcccggagacaatcggggggacggcacggtgggggaacggtgcggggtgcgaaagctggagaggagaggggtgaggagggcgggaaggggtgcgcgggagggcgacagcggcgtgggagcaggtgggggatctcggtgagcgcgggaaatggagggtgttgggtgagggtgctgcgtgcgggcccaggtgctgcgcgcgagggtgcggagttgctggcatgcagggtgcttgcgctgcgcggaggggagggtggcagggtgttgctggaggctgtgcgagggtgggggcgcgggcgtcgtggggtgcggtgtgtgcgaagggagagcgtggccagcgtgacgggggagcgtaagggagggagtgcgacgtgggaaaggtgagtgtgagaggcgtgctgcgggcaggtgggtgtctggagtctagcgagaggctgtgagctgagccaccgggacaggggaggctgcagctggaggtccggagggtccggaggtcgaggcaggtcaaggatctcccagggcagggcgaggctggggctcaggagtggggtggggtcagttccctccctccctctctcctgtcctgacctgaaaaccccgtgtttccgcgtcattctccgggaggggccccctgaaagtgaactaactggaaggaagcctgaatcctgggtcccaggagggagaggctcctgtgaacaccttccaagccctggcgtcccctctcctccctgctgtctccctgccccagcctctctccctctctctgcatgtatttgcctctgcccttcctctctccccatctttgagggtgactcacccctccagacttaggtcccttctccctcctgggagtgggtttccctgagcccacttctgtgacaccctgtagacctgatgcgggatcattacctatgggacccagaaagagtgagaaaccatggaaagaaggcctcgacctctctcatgcccatttgtcaggcaaactgaggtccagaagtgccaattatgaacatctttccttcccccctcccccctccccgc

SEQ ID NO: 36828 - DNA, 926 bp, Artificial sequence
  DNA replication origin
atgttggccggttggtcaggctggtctcaaactcctgacctcaagtgatcggcccaccttggcctcccaaagtgctgggattacaggtgtgagccaacgcgcccgtcaggaccactactcttgtgatgtcttcacatggaatggtgggacttaaggatgacaggtgagaaccaaaccaacatctcccaaggttccccttcagctggagcaggagacatctgtcagagcacagagtgagcgggcctattggctcctgcgggaaaaggcaactactagttaccccttggaccagtattccaaaggcagatcaaacattcctctcccatctagcaaaagtcacagaatgtgagccctggaaagaggattagagactatctcttcccaagtctacagaagctgggaagctgaggactgaaaaagaaggaagttgctcagggctatggatctggggacacaggggcagttagaagcttgggctctcaggacagagaggattgctggagccatcgtcctggggacacaggagttgataggagcttggaccctgaggacagagaggatgctgggagccatggtcctgcttcacaggggttgatgggagcttggacctgaaggacagagaggatgctgggagccgtggtcctgaggacacaggagttgatgggagcttggaccctgaggacagagaagacactgggagccatggtcctgggacacaagggttgatggtagctatggttttgaggtcagaaaggatactgggagctgggtactgaggacagaaagggtgtgtgaagctgaagtcccttgtgggactggatgtaaaattttttagtcggaataaaaagtaaggattttcagccaggcatggtggctcacgcctgtaatccagcactttgggaggccagacagatggatcacctgag

SEQ ID NO: 36829 - DNA, 2392 bp, Artificial sequence
  DNA replication origin
cacctgcctcggcctcccaaactgctgggattacaggcgtgagccaccgcgcccggcccaagtgttctttttttaaatggagttcttcgaagcctcttccttgcaatttcaaactaggcgatgggactttattaatttcgtttcgcagaggaaactagggcacagagaggttagataactggcctaaaatcacacagccagtgcttgaatacgcaggatctgaccctgcagcgccccccagcgctctccacgctgctgggtctccccctctgagaaacggggggacaggacccccttttacaaaaggcccaaagggaggctgactgagcggcgcagagccagtgctggagacccgggactgtccctcaggacctttccctctcactgaggcgactctcacttacttccccggaaaatgtggggggctctgggtcgaggaattcgagaaggaactgagtcagggcgggtggccacagggtgttggggccgcgatgaataacccggaaagcgctcgagaccgcgggaggccgggaatgagtaacagctccgggatactccgaacgcgcagctggaaagggatgtccgggaaggcccggaggtcggggaccgggcctagggactgggctgcaatctcggggcggagcctggggcggggagagagtgtcggggaggagccagagggcggggctggaacctcaaggaagagctacgggagaggttacagaccgaggaagagctaggagcggggctagaacctcgaggcggagccagagggcggggttataacctcgaggcgtaaccagagggcggagttataacctcgggaggagctagaaggtgggactagactcttgaggggcaggattataacctcggggaggagctagagggcggggctggaacctcaaggaggggctaggggcggggttataagcttggggaggagctacggggctgggctaggacctcaaggggccaaggggcgggggttacgacctcggggaggagctacagggtggggctgaaacctcaagaagggactggggcggagttatgacctcaggggaaaactaggggcggggagagctaaagggcgaagttagaatctcaaggaggagctagagggagggactaaagcctcgaggaggagctaggggcggggttatggcatcggggaggagctagggggcgggaagataaggtcaggaagagctaaagggcggggctagaacctcgacgatgagtctggagcggggccaaaacctagttggagagctggagggcggagacagaacttcgcgggaaactagagtatctaacaatagaaactccggagggctgatggggccgggcctagaatttgggaataaattagtgggccgggagaggctctggagccgggtagaaccagggggagtgagtggagggatagttccattagggcactgggagtgacggtataacataaagatcgacgcgggtggggcaaggctagaacgtccccagcagaactggagaggcgtaatcgaccgagggccggtgcggtgagaaagacctaataggagcaggaatagaacgtactgatagagagggcggggatacgactgtcaggatatacgcctcacgaggacagaatgaaaggaaaaacgggccaaggcaggactttgggaaaggacttgtgggcagggatagaacgttcagttagtggggtggaggtagaacgtggacaacggacagactggaagtaccgccggccggaacccagcagaacatggacacgaatctgaatggacggggcctggagacttggtgttggtattgggacatgcaggggtgagcgggggtcttggagctaagcgtagttaacctctcctctcctctccctccttcccccagcctcttggggcctgcggtgcatgcagtgtaagaccaacggggattgccgtgtggaagagtgcgccctgggacaggacctctgcaggaccacgatcgtgcgcttgtgggaaggtgagcttccccccaacccacacacccctccagcgcagcatggaacgcgagtgattgagaaaccttcctcaccagtaactgggacatgcaaactaaaaacaaacaaacaaggagagcccatttcacacccaccagattggcaagcatttaaaaatctgacaatacccgggttagtaaggatgtggagttgcagaccgtgtctgtggtgggggagtaaattggcacatcaaccacttagagcgattcggcaatatctagtccagatgaagattaacatatgctacagctcaactcctcgccatgcagaaatgccaaagaaccttggccacatatacccagggacacatgtatacgaatgttcttagcagcaatgtttgtgacatgg

SEQ ID NO: 36830 - DNA, 1238 bp, Artificial sequence
  DNA replication origin
caggaagatgcgagggtcagccacgccggcctcccgcagccgctcggcacagtggtctcggatctcctgcaggacagcggcctctctgaagcccgacggccgctgggtgcgcgtggccgccaggtcctcgtccaccttggtgcgcacaaagtagaacttcttgccctggcacaggatctcagcggccaggcgggtctcgacggccccgcagcggcggggggagaccagcaggaagaagtcatagcggctgaagtctacctgctttaggtacttgtcagccgggcagcctggagagccggctcctggcaggtcccagagggtcacgtcagggaactgtgggtgtggatagggcgacggttgcatcgtggtctccatgacgcccgtgagagccgcgccagggtcctcggcctccaggccacgcagggcattgatgagggaggacttgcccgcgcccgactcgcccgtgacgcccacctccaggcggatgctttccgtggaggccagcagctcctggaggtgagaggcggcctgggggaggtcacccgactcaaaggctgtgcgcagggcctccagcctttccttggccataaggatggtgttttcctcctccccaggcaccacgggcaactttgaagtagccatggtggccagtggttcagagggtggcgggggacaggggagagtcacaggatgcgtgatcctcagcgcctgcagaggagaagggagccattcacacctcctgggccttggcatggggcagggagagacagataccacggatgtgaagggagtcgccctggaagcccacagctctctttttccttcaagaattggggacacatttttggcacaagttagagggctttggggtctggcaggcccaggttcacatcccttttctgccactaacttgctgtgtgaccaggggcaaaatgaagcacctctctgggtaatgggcatgaccaccaagcagcctcttggagcactattggagtctccagggtaacctaggcacaggtcagttttctgggtgtatgtgtgccctggagggttctgtgcttagaatggcccagtgcttggtttaatgctctgctgacactagctgaaattgtttgtttgtttgtttgtttgtttgagacagggtctctctgtcatcgaggctggagcacagtgctacgatcatggctcattgcagccttgatctccttggctctagcaatcctcccacctcagcctcc

SEQ ID NO: 36831 - DNA, 1069 bp, Artificial sequence
  DNA replication origin
tcagtgccgcacccccgccggacgtcccagcgacctttcaatggccaaggcgggggcggggcctgccggagcgccccgcccgccgccggtgcgctagcctcgcgcgggctcgcggcccccttacctaacgcggctgctgattggttctcggggcgcggtgtgcgctctcccgtgacgggagtcgggtgggggcggggaggctgacccaagccacccgcctgcaaatggcgtctgggggccaggaacgtgggaaggagagaaaatgggcactccccactccgaaaccggcctcggcgtccgggttgcagcccctaaggaaagctgggccgaaggaagaagaggaggaggatgtaacgcgggcccgagctgagatcagttccctcaggcgactcgtcctgcgcatgcgctgagggctggagctcgagaactgaatgcgctcgccgggctgagcgtgcgtggatggaggcggtcggcttcagcacgcatgcgggttccggagcgggaggcgggaggacgccgcggctctgactcaatgcgcgtgcgcgcggttggggggttgagggtggggagatgagtagggaaatggatacgccgaggagccggcaggagggagagcggcccggatctggggttcgagttgtgcctcttcggtgatgttggcgggatgcagtggggtgggacgacagggaggaatttcactgttctgggctgagtgccaagaacacatgaatgaatcagacttggcgtgcgccctggaagacaccccggcctgtggagagactgccagggcctcaaatcacttaggaaagggcgcgggtccggttggaccttgaaggacaggcaggcgagggtactccagggaacagctaagcaaaggcggcgaagaccccgggggaagaggtctagactggcttggattcagggtccacctgggtgggaggtgaggcagcagaatgggcaggtcagaccctgaagggtctccagtgtcagttttatccttaaggcctgggagatgcagaatagtctgagacagaactatgtttaaaaccctcgaaggccgcgttggaga

SEQ ID NO: 36832 - DNA, 909 bp, Artificial sequence
  DNA replication origin
tgaccgacaacgggctgcgggactggcgcgtggcgctgaccgggcggcaggcggcgcagatcgtgctggagctggtggtgtgtgggctgcacccggcgcccgtgcggggcccgccgtgcgtgcaggatttaggggcgccgctgacctccccgcagccctggccgggattcctgggccaaggggaagcgctgctgtccctggccatgctgctgcgtctctacctggtgccccgcgccgtgctcctgcgcagcggcgtcctgctcaacgcttcctaccgcagcatcggcgctctcaatcaagtccgcttccgccactggttcgtggccaagctttacatgaacacgcaccctggccgcctgctgctcggcctcacgcttggcctctggctgaccaccgcctgggtgctgtccgtggccgagaggtgagggtgatggaggcataaatgcgcaggggggaaccccggacagccacggcggccgtcctgtgccgcggtgcaggttgaggccccctaggaccaagcagtggagaaagttcacactttgaccccttctcctcttgctggctgaaatttgcccacactcccatcaactggggtgagaggaaccaacagacaagcccccagccaatcctccacctgcagccttcagtctccccaaacgcacacacagaccctagaaagcccctcccttccggctgcctgacctctgcctcaggtttacaggccatctgttcggtctccgaacctatctctgggacctgcctaaagggttgcctctgccttggaggaaggagacatattttcccaattagcacggaatgcactgtaggtaggtgctttttgtgatcctaggaaggggatgatttggaactgctctggaaaataattccaagcagggaattggaactaga

SEQ ID NO: 36833 - DNA, 980 bp, Artificial sequence
  DNA replication origin
cagcacccaggcggtggtcagccagaggccaagcgtgaggccgagcagcaggcggccagggtgcgtgttcatgtaaagcttggccacgaaccagtggcggaagcggacttgattgagagcgccgatgctgcggtaggaagcgttgagcaggacgccgctgcgcaggagcacggcgcggggcaccaggtagagacgcagcagcatggccagggacagcagcgcttccccttggcccaggaatcccggccagggctgcggggaggtcagcggcgcccctaaatcctgcacgcacggcgggccccgcacgggcgccgggtgcagcccacacaccaccagctccagcacgatctgcgccgcctgccgcccggtcagcgccacgcgccagtcccgcagcccgttgtcggtcatgaacagctgccggtagggggccaagaagggaggggtcaggagcaggtcaggcgcaggtcaggcggcggcccgcgcctgcctgcgccctgagataagtggggtgtgccgcctggccaggagggagggagtgcagggcgggagagggatagggagggagcgggacaggacttgaggaagacatctttccactttttcctccttccccaccacccaccccactagtttcagcccacttccagcctttgaacactgactgagcgccgactgtgtgcctgacattgttctatgtgctaaggatacacagtgaacccaacagacccccctgcctccctagagcttgcattccacatgcctggagctcgctcctactcccctttcggttgacacgcgtaataactgtaataataatatcagcaataacaaagccatgggccgggcgcgatggcttacgcctgtaatcccagcactttgggaggctgcggtgggtggatcacttgaggtcaagagtttgagacaagcctggccaacatggtgaaactccatctctactgaaaaatacaaaaataagccgg

SEQ ID NO: 36834 - DNA, 964 bp, Artificial sequence
  DNA replication origin
tgggatgtgtctgggtgagacccaaggtggggtatggatggggagagctcctgggtctggggcaagagggaggttattggcacagagatagggtgattaggagtgggcacccctgggaccggaccaggtgcagtggctcaagcccgtaatcctagcactttgggaggacaaggtgggcagactgcttgagctcagtagttggagaccagcctggacaacatagtgaaaccccgtttctactaaaatacaaaaaaattagctgggcgtggtggcatctgcctgtagtcacagctacttgggaggctgaggcatgagaattgtttgaacccaggaggtggaggttgcagtgagcagagatcgtgccactccactctagcctgggcaacagagcaagaccttgtctcaaaaaaaaaaaaaaaaaaaaaaaaaaaaaggagtgggcagccctaggaccttaggttgcttgaggactggattggggatgccatgtcggagcacagagatctgggaagctgagtgcctgggagcagagtggacagaggcctgggggcggaagcagggctgcaagggcactctcagcatccgtgagtgtgcaagggggggctggggactacaggggaaggcggagctggtgggggaggctctgcctgtctgctcatggttcatcccatctgggtaggtgagggtgtggacgcagcacctagggcagaagaacttcattactcagatcaggaggaggaggagggtggaaagtgtgagctgacagggcgctgagggggttggagggagcaaggcttaggggcggggcctgccctacctggacctctttggcatgaaaggccacgatgaggcagaggagtaagaaggtggaaatgctgatcgtgcatttaaccaggaacaggtagagcgcccactgtcaggggggacggaaaaagcggtgtgagatcccaggtctccctccgcc

SEQ ID NO: 36835 - DNA, 1704 bp, Artificial sequence
  DNA replication origin
agggggagctggggagcctccccctaccctggggcctcccctgcccctccccgccctgcctggccgtcaccactccccagagggcacagggctctgctgtgcctcagagcaaaagtcccagagccagcagagcaggctgacgacctgcaagccacagtggctgccctgtgcgtgctgcgaggtgggggaccctgggcaggaagctggctgagccccaagaccccgggggccatgggcggggatctggtgcttggcctgggggccttgagacgccgaaagcgcttgctggagcaggagaagtctctggccggctgggcactggtgctggcaggaactggcattggactcatggtgctgcatgcagagatgctgtggttcggggggtgctcggtgagtggggcatggtggctgggagctgggactcctaggtctgagggaggaggggctgggggtcaggactcttgggtctgagggagggggggctgggggtcaggactcctgggtctgagggaggaggggctgagggtcaggactcctgggtctgagggaggagggactggggacttggactcctgggtctgagggaggagggactgagggcctggactcctgggtctgagggaggaggggctgggggtcaggactcctgggtctgagggaggaggggctggggtctggactcctgggtctgagggaggaggggctgggggtcaggactcctggatctgagggaggagaggttgggggcctagactcttgggtctgagggaggaggggctttggctgggactcctgggtgctcccaggagacagttgctggggtccttctctgcaaaaggaagggaatatttgtttcagtgtttcagtctttgaagatgttgccattagacggccagaggtccaggacccctggaggccagagggtggctgatcagacactcaagccccccaagagccaataaggggagaggtagccccaggtttggtgaagggagagtggaggaaagacaaagttcttccagtaggcggcagctctttggtccttgtctaacctctaatgtttacccagtgccttagatgcaaaggacagaaaaaactgccttgggggtggggatgggaaatgggaaacaaacctctcccccgacctgcctccccccaccaaccccaacccagtctccactgttaacaagctcaatttctccccaaatctgcatgctgattagtcagggaaatagtggagaggtaggcttacagtggcctggactcctaggtaccaggagaggagggggctgggtcctggattcctgagtcttaaggagaagggggttttgattgcttttggggaagaggggctgactccgaagatgagtggtgagtagggaagaaaggggaaagtggggtcagggcaggtctcagcaggctcccgtcacattccagccctggtcaggccagtgatggggcagatcaaggacaagggttggaataagtggcttgaggggagaacagacttgctcaacaggaaaggaggggctggagacctctctggcagaagggttgtggaactgggctggtagggccagatgcggacactgatatgaagattgggtagattcctgagggtctgatgttccgacttggatctggagggggtggtgggcagctctgaagtgaccaggagccacatggagggtcaggcatgcagct

SEQ ID NO: 36836 - DNA, 792 bp, Artificial sequence
  DNA replication origin
tcgcttccctggggctggtgggtccagggtcccacacgacctaggacacaaggagggggagggttgtgtccgcaggttccttgcagaggggtgtgcatgaggccaagggcagtgtcaccagttcagtgcatgatgctgggaggtgatgtgcgtcaccaggtcagtgcatgcctgtgtgtctccacaggagggtttgatctgtgtcggagcgtatggtgtacagatccatgagtggctcgtgctgcgacacatggagatgtcctatgttgtgtgttgctctgagagtcaccgtgcacattccacactggcatttgctgtatctcacgtcagggtccatgtccctgttgggggcctcttccttctcagcccccagcacccaccctgagtgccaaccaccccaagtgtcttgtgtttgtgtagctgtgtgttatgttgtgtcagaggatacacccccctcccccgatgctggtgttgtgtgggtggcggtagacctcagtgtcagtagtatcagtgagtggtgacatctggtgttttatgggacatgtggtcgtttgtggaaggttgggtgtgttggaaaacattgtgtttatgtgttttgcgttactgtgtgctggtgtattactccgcgtatgttgttgtgtggccacgcatgttggaatataacgtgttgggttgtgtggaggtattgtatgtcatgtttgggtgtggctcatggctcagaggtgatggtgtatgttgcgtttgtttttttgtttttgcttgttttagagataggatcttgctatgttgccc

SEQ ID NO: 36837 - DNA, 921 bp, Artificial sequence
  DNA replication origin
gggctggaggcagctggctgaggagtgaagcagtttcctaggactgacccctgcatcccaggactgcagtttgaaggcaggtgcccttcccactgtaaccccatcactgccacccaggcatgtccatgcccatcctttgctgtttttctctttcagtcatggcctatttggagacaaaatttctctgtgctctaacttccgtgtcttgattgtgttttccggtttctctgcacctgtgggtctctttgattttttttaatacatgcccccaccatccctggctgaatgcctcgaggtctctctgattatctctctctccctctgtgtcagtctctgtctccgtttttcacaagtgcctgaactggggcacagatgccatggcatggccgcagctggagcgctatttagtggcttctgacccttgggtggccacagtctctggatcactggccctcaacccctgagtgggactggggtagaaccggaaggaaccaggctgtccgtagatgtgccagtgaacagcagagagaaactgaggcagagacaagcatagagaggcccggagagagagagagagacccaagaggagaccaggaggcagggagagagtgaaacagagacggagagaaacaccgattcagcaagagacagacaaaaacagagggccctagagacggagagatggagacagagtgagacacgatgacagagacacaggcaatgatgaacacagagagagacatgacagagagacagtgacggggaaagaaggaaacagaggagcagagagggacacgaagatggagaaagggacagagcgatgagagagacacagagaggctaagagaggcagagacagagagacagagtgaagagagacagagagagacaaaggtaccaggagagaagaacagagacaga

SEQ ID NO: 36838 - DNA, 1086 bp, Artificial sequence
  DNA replication origin
ttgtctccaaataggccatgactgaaagagaaaaacagcaaaggatgggcatggacatgcctgggtggcagtgatggggttacagtgggaagggcacctgccttcaaactgcagtcctgggatgcaggggtcagtcctaggaaactgcttcactcctcagccagctgcctccagcccagggaggggccaaggggggagggcgaggtgactcagggcctcagggcttcttgtgactcacccttggtctcaatcctagaatggggagtggagggagagaggggtttgtgtaaaagagagggagagggaatagtagaggacctcaaaatgcctaagaggaagggtccaggaggaagaagctgggggtctggactcctggttctgagggaggagggggtctgagggaggaggggctggggtctggactcctgggtctgaggaaggaggggatggggtctggactgctggtctgagagaggaggggcagggggtctggactcctggttctgagggaggaggggggctggggtctagactgctggtctgagagaggaggggctggatctggactcctaggtctgagggaggaggggctgaggcctggactcctgggtctgaaggaggaggatctggggtctggactcctgagtctgagggaggagggctggggcctggactgctggtctgagggaggaggtgctggggtctggacccctgggtctgagggaggaggggctgggtctcatacactggaagaactgattccagagtctccaggatttttccttggccttgtcccagctgcaccacctctgtcgcagccccatctccgggcctggaaagaacccaggtgcctcggggcccagcaggaaggggccagggacaaagagttgtttaactgggcaggctggtgaaggagagtgaagagggtgtctcaggcggaaaggtcattcatcgcccaaggcttgtgcagggaaaggcagggctgagccccgaggaagagatcctgaaagtcagaggtcagtggcggcaaatcctccaccgccatctctgggaccttggagcctggaagctccagggcttataaat

SEQ ID NO: 36839 - DNA, 1147 bp, Artificial sequence
  DNA replication origin
tgtgctgtccactttgtgagttaagcttggggaaggatgggcagagcaagaatgaatcacttttccttcctattctaagtcatagctagggagagggcttcctggaagagggtggagacctggagtgtcctggagggaaaaaactggactgtcagctgcagagaggtcattactctgccatgagacagacacagctgtgaccagctgcaatagcagcacctggtctctcaaggcgtgtcttccctgggagcagaggggccaggcccgtgtgcctgtcatttgctgggtggagctctgagttcctgggacaggctcacactggccctgctgactctgccacgcctctctccccagggtcccaagccctgcagtgctacagctttgagcacacctactttggcccctttgacctcagggccatgaagctgcccagcatctcctgtcctcatgagtgctttgaggctatcctgtctctggacaccggtaaggagcgggagccgggggacagggatgagagattagggaggaaaaaggggggagaggggagcagaaagggaggggaattgagtagaagatgaaaagataaagatagaaagatggggagggagaggaagaagaggaggaagaaaaagaaaagggtggatgagggctggggcagtggctcaggcctgtaactctagcactttgggaggcagaggctggcgaatcacgaggtcagaagtttgagaccagcctggccaacatggcaaaaccccgtctctactaaatatacaaaaagttagctgggcgtggtggcgggcacctgtaatcccagctactcgggaggctgaggcacgagaatcgcttgaatccgggaagcggaggttgcagtgagccgaaatcgggtcactgcactccagcctggcgacagagcgaggctccgtcctccgccccacaaaagaaaaagtggatgagggacgagcggtgaggggaggaaacaatggggaagcaaggaagagaaggtgggagaggcgcacagggaggaagagtggaggaagagaagaactcgggggaaaaggtctgggggtgagaggaaggagggaaggagggaggggaggaggtgtaggtgaaagtgaaaggatagagggaggaggaagaacgctgagac

SEQ ID NO: 36840 - DNA, 940 bp, Artificial sequence
  DNA replication origin
cacccactacgtgtgaaagctctcatttccccacattctcaacaatattgtgtaccatctacatttttagtttttgaaatttgataactgaaaacgaagtatgccatctgtttccgttatcagtttattgctctcacctccgcacgcactcttcaatatacgctccctgctaaagggattcccccgaagggttcctgcgcctacgcactcggagcacaggttacaacttccagaaacccttgggacgcgccgtcccaaacttgggtttctggcgtctcctgcgtttccggcccgggactacaattcccacaggtcactgggccgaatgagcgtgcgctcctgatccgctttgcgcatcccagtgattcttgggttccgcgtgtagtttcggaaggagacatcgaagcagggcgaggcgcagagggcgttgcggactcatgccccagtcggcagtgcgggtaagggtgggagaagcaatgaggcgaatgcgagcagccgaagaaggcgacagtgtggctgggtatgaagacttgagggagggggtggggcaaaacgaggtcaggcgtctccctggccgcgtgtgatggaccgtccgtggtggtgacagacatggtgtagggggtgtgtgcaatattatgtgcgtgatagagccaaggatgtgccctaccgtgcgaatggtgacgttgcgtctgtatgagagtgcacgtgccacggctgggatgtcttgtgacacagggaatggggtgtgtgtgcatctgtgcacatgaaatggccagggtatgtcttcgtgactgcatgtgtgctcatgacacagcaggtgtgtttctctttgtatgacagactgtgtgtatgtgtcaaaaagaagaaagtgcttggtgtatgacaggactggaatgaatctgtgactgtgacacaagtgtgtgggtttgtgtgtagagtg

SEQ ID NO: 36841 - DNA, 915 bp, Artificial sequence
  DNA replication origin
tttaattcgctctcagtcaacaccaaagaccctcaagcaaaagcaagagctcccgggcgtcttcgaaaaaagcgcctttgacaggtgaagccaagttgcatgctgggagcatccctgctgtccaggtttcaacttccggagactctgccgctgtggactacatttcccagaagtctccggggcacaggccttttaggggcggggcgagcttgcctgccagaagctcctctcccagcctgcgagcatttccaggctcttgtttcccatcagcctctgggtccaaactaaccacaggtctctgggtccttttccggtgtccttaaggttcttggactctgcatggtgagttggtcgtgtctgtagaagtaatcagcccgggtgaagctgggagggctcggctggctttactggggcccgactggaaccggcagtgagggtgggggtggcatcgggggtgctggaggtggggagggctgggtcacggacagagcgtgtcgtgtccggatcctcaagcctgtgtgcacgcgagcagccgagggacagtgtgtctcagacggcgtggcagggacggggcgtgtccccacggaggtgggtgcagttgtgaatgtgtgacgggctgacagggtgcgtggccgtatttgtaaatgtgatttgctttgaccaaatgctctaggttccctttagcctgtcttcgggcctgccacaattaaatgaccgcaagaaagaagtctatgctaagccccataatgaacgtttcaagcaagaaggatgagaattttagatctggaagtgtccgcgggacaggatcttgtcaagacctgatggggaagttctagaggtgggattcctagaagaggggcctctaggagctctttggtggtgagctacatgtttcagagccattgcaagcagacc

SEQ ID NO: 36842 - DNA, 1192 bp, Artificial sequence
  DNA replication origin
tccatttaacccttagtggacacagcacatgtttcagagagcagggggttgggggcaaggttatagattaacagcatcccaaggcagaagaatttttcttagtacagaacaaaatggagtctcctatgtctacttctttccacacagacacagtaacaacccgatctctctttcttttccccacacttcccccctttctattcaacaaaaccgccatcgtcatcatggcccgttctcaatgagctgttgggtacacctcccagacggggtggcggccgggcagaggggctcctcacttcccagacggggcggcggggcagaggcgccccccccacctcccggacagggtggctggccgggcgggggctgccccccacctcccggacggggtggctgccgggcggagatgctcctcacttcccagacagggcggctgccgggcggagaggctcctcacttcccagatggggcggctgccgggcggaggggctcctcacttctcagacgggatggcgggtcagagacgctcctcacctcccagacagggtggcagcggggcagagacactcctcagttcccagacggggtcgcagccgggcagaggcgctcctcacatcccagacggggcggcggggcagaggcgctccccacaccccagatgatgggcggcccggcagagacactcctcacttcctagacgggatgacggcagggaagaggcgctcctcacttcctagactgggcagccgggcagagaggctcctcacatcccagacaatgggcggccaggcagagacgctcctcacttcctagatggggtggcggccaggcagaggctgcaatctcggcactttgggaggccaaggcaggtggctgggaggtggaggttgtagcgagccaagatcacgccactgcactccagcctgggcaacattgagcactgagtgagcgagactccgtctgcaatcccagcacctcgggaggccgaggctggcagatcactcgtggtcaggagctggagaccaggggggccaacagggggaaaccccgtctccaccaaaaaatacaaaaaccagtcaggcgtggcggcgcacgcctgcaatcccaggcactcggcaggctgaggcaggagaatcaggcagggaagttgcagtgagcagagatggcggcagtacagtccagcctcgtatca

SEQ ID NO: 36843 - DNA, 608 bp, Artificial sequence
  DNA replication origin
atttctgggtgcctggaagtgactcctgctgaaatgtgggcgtggtatgagagtagctgggacacagaggagagtccctgagggctggtgaagacatgagagagactggggagtaattgagtgaaattggtgagtttggtggtgattccagggtgcctggaactgactccagctgcaatctgggcgtggttggagagtagctgggacggacaggagagtccctgaggcttggggataaagacctgctagagactggggagtaactcagtgaaagtggtgagcttggtagtgatccctgggttcctgaaaatgacccccgctgaaatgtgggcgtggttggagagtagctgggacagacaggagggtccgtaagggctgggggtgaagacatgagagagactggcgaggatctcactgaggtctgtgagtttgtaggtgtttctggggagtgggagaccgactcccgctgaaatctgggcgtagttggagagtagctgggacagacaggagagtcattgatggctgggggtgagctgctggatgatggcagtaagaacatatggtatattattgatgaatgaggtgactgtgaagaatctccagaggag

SEQ ID NO: 36844 - DNA, 1445 bp, Artificial sequence
  DNA replication origin
gtggagatgggtttggggtcactgagggatacgtgggagccacccctgtatagatacaggtcacagggaaatagtctcgtgaggcctgtgagtgtctagggttctcctgggtgcctggggctgaccgcggcagaaatctggggaaggccagagagaagctgggagacacaggagagtccctgaaggctgggggtgaagaggtgaaagaaatgggggagggtggcagtaaggtccgtgagtttgtaggtgattcctgggtgtgggaagctgactccagctgaaatctggagatggttggagagtaactgagagagacagaacagtccctgagggctgggggtgaaaacatgagcgagactggggagtaactgagtgaaattggtgagtttgctggtgtgtcctgggtgcctggaactgactccagcgggaatctagagaagttttgagagtagctgaaagagacacaacagtccctgtgggctgagggcaaagagctgagagagaccagggaggatctcagtgaggtctgtgagtctgtaggtgattcctgagtgtaggaggctgactcccgctgaaatctgggcgtggcgggagagtaggtgggacagacaggagagtcccaggaggctggcggtgaagacttgagagagactggggagtaactcagtgaaactggtgagtttgtaggtgattcctgggtgcctgcaactgactcccgctgaaatctgggcgtggttggagagtagctgggacacacaggagagtccctgagggctgggggtgaagacatgagagagaccggggagtaactcagtgaaactggtgagtttggtggtgattccggggtgcctggaactgactccagctgcaatctgggcgtggttggagagtagccgggacagacaggagagtccctgagggctggtgaagacatgagagagactggagagtaagtgagtgaaattggtgagtttggtggtgatttctgggtgcctggaagtgactcctgctgaaatgtgggcgtggtatgagagtagctgggacacagaggagagtccctgagggctggtgaagacatgagagagactggggagtaattgagtgaaattggtgagtttggtggtgattccagggtgcctggaactgactccagctgcaatctgggcgtggttggagagtagctgggacggacaggagagtccctgaggcttggggataaagacctgctagagactggggagtaactcagtgaaagtggtgagcttggtagtgatccctgggttcctgaaaatgacccccgctgaaatgtgggcgtggttggagagtagctgggacagacaggagggtccgtaagggctgggggtgaagacatgagagagactggcgaggatctcactgaggtctgtgagtttgtaggtgtttctggggagtgggagaccgactcc

SEQ ID NO: 36845 - DNA, 1174 bp, Artificial sequence
  DNA replication origin
gcaattccacacctaggtatgaaccaagagaaaacatttgtccaaactaaatattgtacaggagtgttcatagcagcattattcaaagaagtagaaatccatcaccttaaacgggtgaatcttatccagggcatccacgtggagacaggggcagacacagggaaagagaatgaggaaatgtctgaaatggaggccgaaagagagacaatgagaaggcctgtgaatggaagaaaccgagcgcagggaaaacagtcatacgtatacatcagagatctgagaacgcgggatcataccgacagtgtcactgccaggaaagggggtcaagctagggatgtccccggtggcgtcgcccgcagaaacacggacaggtttggggttcacgctggcacgggcgccagcagccacgtcagcaggcaggagggtcccactgcacagctgaggggtgatgatagcccaggtggtgatgtcggccatcagaggggcctctcctgccagcaaatgtgtgacagtagcaagtaaaaggacaggtctttgtgtgaggccggaatgcgggaagggctcttctgtggctgagtgtggagtcctcagcaggaatgtggataaatggccaggtaactgcatcacgttggctaggaggatggcaaggacttcgagctgaatgatgataacggggagtgactgtgagaccctgcgaggctctgagtgtaaaagaagatgggtgcggggccccaggggagtatgtgggagccactgctgtgtagatggaggtcgttggggaagaatctggtgagctctgtgaatttccaggggtctcctgtgtgctgggggctgactcttgcagaaaactggggatggttggagagtagctgggagacaggaaagagaccctaaggaatggcggtacaaaggtcagagaggagcaggaggagcacggtgaggtctgtgagtttccaggtgagtcctgtgtgttaggggctggccccaggagaaatctggggattgttggagaggagcagggggatgctggagagtctctgagggatggggatgcagagatgggagacagaggtgaggagcacagggaggtctgtgggttgctaggtgatgccctgagcatgagaggctgactccaagagaaatctgcagatggctggaggggagctgggagacacag

SEQ ID NO: 36846 - DNA, 1107 bp, Artificial sequence
  DNA replication origin
tctggtgagctctgtgaatttccaggggtctcctgtgtgctgggggctgactcttgcagaaaactggggatggttggagagtagctgggagacaggaaagagaccctaaggaatggcggtacaaaggtcagagaggagcaggaggagcacggtgaggtctgtgagtttccaggtgagtcctgtgtgttaggggctggccccaggagaaatctggggattgttggagaggagcagggggatgctggagagtctctgagggatggggatgcagagatgggagacagaggtgaggagcacagggaggtctgtgggttgctaggtgatgccctgagcatgagaggctgactccaagagaaatctgcagatggctggaggggagctgggagacacaggagagcatctgagggctgcagatgagcaaatgggagacatgattaaggagggcaccgacatttgtgagattctcggtgacccccaggtgtggggggctgtgtgttgcagaaaccttgggataatgggagagtagctgggacacacacacaagtagccaagggcctggagtacagagttgggagacatggggatggagccccgtgaggacgctgagtttccaggtgtttctttggtatgggaggctaactagctgagaaaggtggggaggtctgaagagtaactgggaaacgtgggactgtccctagggggtgggggtgaagacatgggacacataggggaggagtgcagtaggaactgtgaatttctgagtgttgcctcggtgtgtcggtttgactgttgtagaaacctggggctggttggagtggagctgggggaaaccagagagtctctgggggatgagtatgaagagatggaacacattggggaggagcacagggaggtcactgagtttctaagtgattgctgcgggagagaggcagaccccgatagatatctggcaatgctgggagagtagctgggacagacaggagagacgctgagggctggtgaggacatgagacagactggggagtaactcagtgaaagtggtgagtttggtgcagatttatgggtgcctggaactgattcccgcggaaatctgggcatggttgaaga

SEQ ID NO: 36847 - DNA, 1208 bp, Artificial sequence
  DNA replication origin
cctccttgcccatcagagagtgcatatagatgagacacagtacacacattgtgagcgtggcaaggaccttctgactcatcaaagactacataagcagagagaaacattataaaggtagtaagtcagggttcaattaggaaaacagaagccacactgtattccagatgatagaggctaactcagcctttgggagggctgggggagcaaaagacagggacgctgccatcgatgaggtcagcatgacaggctgggggttcgcgctggcacaggcgccggcagccacatcggcaggcaggagggtcccgctgcacagctgaggggtgatgattgcctgggtggtgatgtcggccattagacgcgcctcttctgccggcaagtgtgtggcagtatgaagtagaaggacaagcctgtatttgaggctggaatgcggaaggggctcttctgcggctaggtgtgggaccctgagcaggaatgtggagaaatgggcaggtaaatgcatcacgttggccaggagatttgcaaggacttacagctgaatgatgataatggggagtgactgtgaggccctgggagtctctgagtgtaaaggaagataggtgtggggcccccagggagtatgtgggagccattgctgtgtaggtggaggtagttggggaataatctggtgagctctgtgaatttctagggttctcctgaatgctgaggggtgactcttgcagaaaactgaggatgcttggagaatagctgggagacacagatgaggccctaaggaatggtggtatagaggtgacagagataagggaggagcacagtgaggtctatgagtttctgggtgactcctgtgtgttcagggctgacccaaggagaaatctggggatggttggagaggagctgggagacacaggagagtccctgagggttgcaggtgaagagatgggagacgtgatagaagagggccctgagatttttgtctataggtgatacttgggtttgggaagctgaatgttgcagtaagctggggattgagagaatctgggagacacaggagagtacctgagggcctggagtaaagagttgggagacatggggccagagccctgtgaggtccctgagtttctgcttgttacatgggtgtcagggcctgactgttacagaaatctaggaatgattggagagtaattgggagacatgagactccctgagggctg

SEQ ID NO: 36848 - DNA, 1351 bp, Artificial sequence
  DNA replication origin
agcacagggttgggggtaagatcatagatcaacaggatcccaaggcagaagaatttttcttagtacagaacaaaatgaaaagtctcccatgtctacttctttctacacagacacagcaaccatccgatttctcaatcttttccccacctttcccccttttctattccacaaaaccgccattgtcatcatggcccgttctcaatgagctgttgggtacacctcccagacggggtggtggccgggcagaggcgcccctcacctcccagacggggcggctggcccggcggggggctggcccccccacctccctcccggacggggcggctggccgggcgggaggctggcccccccacctccctcccggacggggcggctggccgggcgggggctgacccccacctccctcccggacggggtggctgccgggcggagacgctactcacttcccagacagggtggctgccgggcggaggggctcctcacttctcagacggggcggctgccgggcggaggggctcctcacttctcagacggggcggttgccaggcagagggtctcctcacttctcagatggggcgaccgggcagagatgctcctcacctcccagacggggttgcggccgggcagaggtgctcctcacttcctagatgggatggccgccgggcagagacgctcctcactttccagactgggcagccaggcagaggggctcctcacatcccagacaatgggcagccaggcagagacgctcctcacttcccagacggggtggcagctgggcagaggctgcaatcttggcactttgggaggccaaggcaggcagctgggaggtggaggttgtagcgagccgagatcacgccactgcactccagcctgggcaccattgagcactgagtgaacgagactccgtctgcaatcccagcaccttgggaggccgaggctggcggatcactcaggttaggagctggagaccagcccggccaacacagcgaaaccccgtctccaccaaaaaaatacgaaaaccagtcaggcgtggcggcgcacgcctgcaatcgcgggcactcggcaggctgaggcaggagaatcaggcagggaggttgcagtgagccgagatggcagcagtacagtccagcttcggctcggcatcagagggagaccgtggaaagagagggagagggagaccgtggaaagagagggagagggagaccgtggaaagagagggagagggagagggagaccgtggaaagagagggagagggagaccgtggaaagagaaggagagggagaccgtggaaagagagggagagggagaccgtggaaagagaaggagagggagaccgtggaaagagag

SEQ ID NO: 36849 - DNA, 816 bp, Artificial sequence
  DNA replication origin
gcggccatcccatctaggaagtgaggagcacctctgcccggccgcaaccccgtctgggaggtgaggagcatctctgcccggtcgccccatctgagaagtgaggagaccctctgcctggcaaccgccccgtctgagaagtgaggagcccctccgcccggcagccgccccgtctgagaagtgaggagcccctccgcccggcagccaccctgtctgggaagtgagtagcgtctccgcccggcagccaccccgtccgggagggaggtgggggtcagcccccgcccggccagccgccccgtccgggagggaggtgggggggccagcctcccgcccggccagccgccccgtccgggagggaggtgggggggccagccccccgccgggccagccgccccgtctgggaggtgaggggcgcctctgcccggccaccaccccgtctgggaggtgtacccaacagctcattgagaacgggccatgatgacaatggcggttttgtggaatagaaaagggggaaaggtggggaaaagattgagaaatcggatggttgctgtgtctgtgtagaaagaagtagacatgggagacttttcattttgttctgtactaagaaaaattcttctgccttgggatcctgttgatctatgatcttacccccaaccctgtgctctctgaaacatgtgctgtgtccactcagggttaaatggattaagggcggtgcaagatgtgctttgttaaacagatgcttgaaggcagcatgctcgttaagagtcgtcaccactccctaatctcaagtacccagggacacaaacgctgtggaaggcc

SEQ ID NO: 36850 - DNA, 862 bp, Artificial sequence
  DNA replication origin
tacaggtgcccaacatggaggtgacgcatgtgtcacagctgacttgggcgcggcatggtgaatctggcagcatggccgtcttccaccaaacgcagggccccagctattcggagtccaaacggctggaattcgtggcagccagactgggcgcggagctgcggaatgcctcgctgaggatgttcgggttgcgcgtagaggatgaaggcaactacacctgcctgttcgtcacgttcccgcagggcagcaggagcgtggatatctggctccgagtgcttggtgagcagggggttttggggaggctgaatgaaaggcagagacttggtgggaggatcagggaagttggcaaagagcggggaggcctgggagggagggagattccctccacagcagatcccctggggacaaaaggagggggcagcgcaatgatgtggggtggggtggggggaggtgagtggggggaggggctgcagggcaggaagaaagcagagatctcagggagtaaggacccccaagcctgggatcagaaagccctgagggaggaggaggggtatattggaaagggagctgggaggggactgggaaggaagggaggaggcctgggtggcctcttctgggtccctcctttcctcatctgtaaaagggttggtgacaacagcatcacccttggaaagctgtcctgagtgtcatcactgcctaggaaagagtctgtctgcccccttggactgtgtacccatgagggcagaaccggggctattttgatcactgctgggccccagcactttccaccaaacaatatttattgagcacttattatgtgccattctaagagctttacctgcatattctaattgcctgtgattcc

SEQ ID NO: 36851 - DNA, 1362 bp, Artificial sequence
  DNA replication origin
atttttaaaaacagggaacaatatatagagagttgagattcccaaacctggtgtcaagatggcccagaggaccacagccagctcagagaggaggcgcctgttagcattggcttcaggggagaggctggggacgggactcacccgggctgggtttatggaccttgtgtcactgatgggggacaccaggaggactggagagggcatcacttcatagatgttgttgtcacctgaaacagaggccaggggaggtaccagctgacacatgggccccacaggccactctgactgcctgttgacattcatttatttatttattcaactaacatttgtgcaaacgcttcttctagccaaacccagtgctggggacacagtgctgaccacgacagtcccaggcctgcccttccaggacttacagtccagtgggggacgcagaccagtctccagagtgacaacctggagtgtttagggctggagtcgggggactgggggcgggtgggagcccaagacggggtgcctaagtagcctaggactcagtgagggcttcctggaggagggggcatctgagatagtagagagaagtgagtgaagctaaggcaggagagggtgagtgcagaggtctggtgagagagccagctgtgtttcagaaactgtgtttgatctgtcttgtgaagggccttgagaaccatgttaaggagactaaactttgtcccaagggcacaggggagccatggagggcctttgagcagaggagtaacatgatcagaattttagaaagaccttgtcctgggatgggttggaggggtctggaggctgggagaccagtgaggagctgggtgtggggggtctaggaggctggtagtggcctgtggaggtggatgggatccacttgcatgatgggatggggatgctagccactgagaagaagagaaaaagcaggtttggggtgggtgccgatgcgctcagattatgtgggtgagttcagggggccccagagaggtctcggggcaggtgcattgggaggtctctgagtgagggagaataagcgggcttgtggctataggggagaaaggaggagctgagaggagggctaggtagtgagatctggggctcccgccttaccagcatcatgagcagggcccaattctggcttctctgtggtcgccatcctggggacacatagagggaattgatattaggatagagagacactcaggcggggggagagagacttaagagaagctggaaatcccaccaggtccctgaaagccacatggtctctccttcagagtgagctaggatgaggcctgaactatcccagacttttcttccataatcctcatccgcaatccctcagtttcccta

SEQ ID NO: 36852 - DNA, 1021 bp, Artificial sequence
  DNA replication origin
tggtggggtgtctgccttgtcctaaggggagaagactctgagggtcactagtggagttggggtagggcattgaggacagacagttgggagcccagccaactgcctgggaggcaggcctgaggccaccatcttgtccccagatatccagatcttgggggactttggcatggaaaggggccagagcctgcctttcacaggcacatggcccaggccagcttgcttgaaggaacagaccgaaggcgggcgtgcattcacgggctgcacaaggacctgggcctgttacagtctcctgtccccctgccaggacacctgccccatgtgctgctgagtctttggctgagtccacctcatcggccccacagcccccaatggccttgtcctgctggtctcaggtgtgaggctcccagaggagggctggggccttgtcttctccctggctggcctggcccaggacccatcaggaagttggcaccagctggcagtagggggcagggtcggggtttagcaggtcctgcttggggggaagagagaacagaattatgactgggtggagggggagagtcttggggagacagagagggacagaggatgagagacagcgtgagatggagagaaacccgcagagagaatggaagagcaaggtggaaagagagtgagatgcagagacaagaggtcctggaagagccaagaaatgaggtggacacagtgacagagacaaagaggcaggagagacagagaatggagagagagagagacagagatgcagagaaacgaagacatgtaaagagatgcatcttagacaaggcagcatgaacaaactggaaacagaaagacagattaaaaaggacacagcaagagaaactgagagagagagagagagagagagagagagtccaagaaaggggaagacagacatacagacatatgtaggccactgagagagagagacagaactacagggacagacagctgacaggaggggatggagagggactgagctctgcggtggggtttcactggg

SEQ ID NO: 36853 - DNA, 1180 bp, Artificial sequence
  DNA replication origin
tcccctctcctcccagcagcgtgagggctcgacctccggggagtccccgttctgggttgggcgccactcctccctccctatccgcttcgcgcccggagctctctccggactttaaccctgggccgccactggtggcgacgctgccgataaggggaggtggttggtgcagaggccagcagggcaaaattcccctactcccggtgccaggggagttacccaggtcaggggcgggggcgggggagggcaggggcagaggagcgggcggagggggaggtggaggcatctgcagctggacagagaagtggtgctttgtttctctgtgcctcagtttccctcttggtaaaataggcatggttcctcctatggatgtaagaaggacctaggaacctttgcaagggcagaggagtccgcccctctggtctgactgggagacaaggtgttccccaatctgatggtggggacaaggtggcccaacacagtgggaaaaataaggaaactaaggagctctcaccaaatcccatgagggagacaggactgtccaaatccaatgaagaagataagaagctccagtcctgtgcagcaagaacgagtgtccagtctatatttccagtctgccaggggaggtaaggagcaacattctgatgtgtaagacaatgtatttatttttgtgagtcagagtctcgctctgtcgcccaggctggagtgcagtggtgtgatcttggctcactgcaacctgtgcctcctgggttcaagcgattctcctgcctcagcctcctgagtagctgggattacagacgcacaccaccacgcctggctaatttgttatttttagtagagaccgggtttcaccgtgttggccaggtttgtcttgaatttctgacctcaggtgatcctcctgcctcggcctcccaaagtgcttggattacaggcgggagccactgcacctggccaggagtgatactttgatgtgtgagacaatgcagttctaatttgatgggggagatgggtagtcctagtctgatgggggtgttgaagggctcccatgccttctgggagagctgatgagcttccaaatgaatgatagaaatggggagcccctcaaactggtggggagacaaagagcctgctagtctgatgagggaggtaagaatcttcctgtctgaagtgggagccagggtgc

SEQ ID NO: 36854 - DNA, 1962 bp, Artificial sequence
  DNA replication origin
gaaacttgcctgacctccctctggttgtctcctgccccgccctctgtctctgtctccccatctctgttgctgtctctgtgtcccctgggaccttgaaagtgggtattggggccccgggaagggactttggccggactcgggccccacccgagtggatcgttaacccaggatgtgagaagtggctgtgtggagaggcctcaccccttcccttcctttcgacctctctctggatctcccttatcccccttcatggcgaaacatcccgagcacagacctgtgttaattccacctccaccccttgctcccggtgggacctcagacaagccatcccctgccttgagactcagtttgttcttctggaaaatgggaccaatggcaacccctgcctgctggtgttgtgggggccacagcaagggaagaggggaggaattcggttggacaggctgggggctgtgttccctgcccatccaaccccacccctggggaccctcagacacaggagaggggtgtggagcactatcccaatgcacagaaaggaaagctgaggtttggaggggcgaggcttagggtggggaccctcagaggtagggtgggaaggacacccaagcctgtcccactcctggcatcccagggcagctggtgcagtggttccaacctagcaggactgtagaggggagaagatgtgatgggtccggtgggagcttcgaagggctgggagagacggtgctgctggaagagagggtgctgatggttctctgaggttggaagagggataaaagggtcagaaggaggaggatctgaagaaggaagataggtctgagagagaagtagatggtttagtgggaggagggggagaggatctgaaggaggaggacagggtctgttggaggaggtaagggtctgatggaggaaataagggtctgagggtggaggcgaggtttggagggaggaggtgaaggtctgagggaggagacaagggtctgaaggaggagataagagtctgaggaaggaggcgagggtttgagagaggaggtgagggtctgaaggaggaggtgagggtctgaaggtggaggtgaggttcggggggaggagatgaggggctaagggaggaggtgagggtctgagagaggagacgagggtctgaaggaggtgggggtctgagggaggaggtgagagtctgaaggaggagataagcatgtgaggaaggaggtgagggtttgagagaggaggtgagggtctaaaggaggaggtaagggtctgaaggtggaggtgaggtttggagggaggaggtgagggtctgagaggaggtgaggctctgaaggaggaggtgggggtctgagggaggaggtgagggtctgaaggaggagataagcatctgaggaaggaggtgagggtttgagagaataggtgagggtttgaaggaggaggtaagggtctgagggaggaggtgagggtctgaaggaggaagtgagggtctgagtgaggaggtgagggtctgaggggaggggagagtatctgagggagagggcacagtctgaggaagtctgagaagcactaagtgaggggacgcagctctgagggaggaggagagagttggaggggaaagaagggtctgaggaaagaagatttggagagagtctgagggtagaggccagatctgagggagaagaaagaggctcaggggaaaagatctgagggtccgagggtggaaggcatggactaggggaggaggagctggtggggtggaggggtggagaggcgtgcctccggagccagcagggaccaaggggagggaagggaagggaggctgggaggcagccccgccctgcagctgtctctaatttcccagaatcttctgctctcaggaaagtcccagctcccacagcagcctccctccaatgtcgggaacggaggatgcggaaccaggatggccacccccaccctcccccggctccttgcacc

SEQ ID NO: 36855 - DNA, 969 bp, Artificial sequence
  DNA replication origin
taaaggggctgggggtggggtgagggtggggagcgctccactgattgtgtctctgcactcgttgggggccctgcccccagccggggcccgcggggcaccggggtgggtgctcggaaaatcctaggtgcacagagagaaagagacatggagacaggcgcagagatcttgagagaaagagagatagcaagagacacggacaccaggccagagtcagcgcgaccgaggccggtgctgcaggagcggggagcagtttggcttccccccgacttcccctcccacctcgaggaggggttgatgggtggggaacaggctaggcgggttgggggcatgactcaggctggagatgggagggagggaggagggaggcgggactcttccccgtctcctcccctcctctccctctccccgccccggggtggggccccgaaggtccggggctttcccggatttccctgggggcggggcagccgctggggttgagtccgggtcactgagtcacaggaggcggagagggaggctttggggacacagggggcggggcatgggggctgcaccccggacttgcccagggggcacgcggcgtctctctggttctctcccccggtctccttctgtcttcgaaacttgcctgacctccctctggttgtctcctgccccgccctctgtctctgtctccccatctctgttgctgtctctgtgtcccctgggaccttgaaagtgggtattggggccccgggaagggactttggccggactcgggccccacccgagtggatcgttaacccaggatgtgagaagtggctgtgtggagaggcctcaccccttcccttcctttcgacctctctctggatctcccttatcccccttcatggcgaaacatcccgagcacagacctgtgttaattccacctccaccccttgctcccggtgggacctcagacaagccatcccctgccttgagactcagttt

SEQ ID NO: 36856 - DNA, 948 bp, Artificial sequence
  DNA replication origin
ggcgggctccggggagggcgcgcgcagcgggcgcttgcggagcggcagcgcggcgcccgggagtccggcggccttgggccgggtgcgcaggtccacgggcccctcgtccatggcccccgcggggcatcggggcatggggccgccggggacggcggccggagagcggctgggctcggctgcacgggagggtggtttcgccgggcgccgggacttcccctgcagccggctgaactgaagggacttttgtcggccggggcggtgccggccgcccgcctccccgcccccggcccccccggggccacccgtacgccccaggggtttcctggacccgccgctgctcccgccgctctgaggtgcagcctgccctgcgccccgcccgcgccgcgccccgcttgccccctcccggcccgcggcgcctggggcagccaggcctcggcgggggagggagaggaaaggaggggtggggggagaggaggcggggtcggggggtgggggggtgtccccacccctgctgccaagggccgctctctctgcctctgtttttgtctttctggccctatctctcaacatctctatctctgagtctgtaactgtctctctggttctcctgtctgagtaggtgtttctctccgcaaccccgcgtttgtctctgtgtgctctgttccgtctctgtctctctcttttgtctctttgtgtctgtcaccatctctctgcctctcagttgctgtctgcttctctgtctctcaggaggccttggcatctctgggacggggtttggaatctcggttcccacttactcgctgggtgaccttggccaaacacttcccctctctgagccgtttcctccttagtgggagtgaagagacgcacccggggcagggactggcactcggcaggcggccaggaacgattcctctccctcccctcttccatctctgccactccacg

SEQ ID NO: 36857 - DNA, 1362 bp, Artificial sequence
  DNA replication origin
ggacgaggggcccgtggacctgcgcacccggcccaaggccgccggactcccgggcgccgcgctgccgctccgcaagcgcccgctgcgcgcgccctccccggagcccgccgctccccgcggcgctgcgggccttgtcgtccccctggaccctctgcgcggcggctgcgacctgccggcggtccccgggcccccccacggcctggcccggccggaggcgctttactaccccggtgagtggcccccgagggtccgggccgggtgggatccacacagagcatagggtcaccagagccaggaggcagagcttgaggcacaaaccggtgtctctccagggacctgggggacaagaggatataagcccaggttccaaggatatagatatgagatcatcggggagccagtaagctgtgccttgggatctggggatttggggaccctggggggcaaagcccaggggctgagtgacgtgggggggggggggccagggacaatgcccagtggtacaaatatgggggtgtcagggaatcagggcacagagcctggtatcctaggggcaagaaagtacaagctcttaagccagatgtgtagcgttatgaggaagctgagctgggctggagaaactggggttccctgtatcctgatattattagaatcaaagggagtcagggtaacagagactggggttctaaggagacagatactgaggatctcaggatgtcacaatctcaggaaccaagatatctggagacatgggcattatgaaaacagagatggggttctgagcaccccaatatctgggatcacaaggatccaaggaaatgaaccagagctccagggacccagataccagggggtcttgaggacccaggagaacagagacccgggtttctgggtactcagttatgtggggccacaagtgatcagggtcctatttgaggtcaagatcaggtgggcagaagggatcaggggactgaggatcctaagattgggtaattctgagactttgggtaatttagaggcaggatgaaaatttcaggggtctccagacagaaagcctcaaggcctcaaggcctggtattggagatacgaggacctggaaacttgggagttcaagaacagagggcccacaaggatcagcagatgacgaagaccacacactcttctctccatcctatctccatccctgatctcaagaaggggtgtcctctaccacagctgtggccacgtcaccatccccaattgacccccaaagctgcagagagccgttctacagagccccaaaactttaggtagtttctgcaccctccaccccatcagcgtgacagctggagagcctcaagctatgtgcatcaggagttctgc

SEQ ID NO: 36858 - DNA, 959 bp, Artificial sequence
  DNA replication origin
cacttctgcctcagctgcctgctgggggaaatcccttcccgcagaacttgaccgcaacccagctgctctgcctcccccacgtcagcacccgtcactcactcgcagcctcccccctcctggcgcttcctccaaccttaaccccttccgctggggctgagactttaccggaacgggcagcggcccggccccagcctgcgccaccggctcctcttcacacccgcgggggagggcagtgggggcgaggagggcgggggacgctaagtctgggtccccgcagaagccaaaaggttgggaggctgggcttccatctcctcacaggcgggtacgagccttggggcatttggacccccaagaggttagggactgggcagccagaaacctggggagggggcaggaaggcgggggcggggggggggggtgatgttctgattctcagaaggcagaagttggggaactgtattccttaatctccgaggggatgaggagcagcttggcagcttggggacctggcactcagaggggctttacgggcaggaccagatacagaaatttgcagagtcccttgttcaaaacttaagaatttcacgacagcggcagcaggacgttgggctggtgaaactggtcacgccaaggggcctgaaagtctgtgttcccaaagggccagggtttgaggcgctgtatttctgggtctctgaggggacaaggactggcaaggtagtttgggatcctggagctctgaaggacgggggaagtccttattcttaaagaagagttagggctatttctggctcccaagagatgttgggggtggatgccgggataaggaggacttgcagccagctggagcctgagctctgcggggtggagttccagagggtcccccaggcgggaggactcgggattatgcgccccccctacacacacacacctcaagggagctaggtcttcttgggctgggc

SEQ ID NO: 36859 - DNA, 1747 bp, Artificial sequence
  DNA replication origin
gggaatattgaagctggaatggccttcagcattggggtcaggaggctaggccttctatgctggcattaaccagtgactggatgccattgaagggcagctgcccttgattcacatggggcgtgaccttggacaagcagctctcttgagttgagggtaattcccaaatggtctgaaagctgacaatcttcccagaagctgagggagtgagtccttcagtctagaagggggttctggactgtaccgcctccagaacaatggccccatcccagtttgtcctcacctcccttttagtcaaaacttttgttccagactgggcgtggtggctcacgcctgtaatcccagcactttgggaggctgaggctgaggcaggaggatcacttgaacccagcagttagagaccagcctggccaacatggtgaaaccatgtctctactaaaaatacaaaagttagctgggcgcgatggcacacatctgtaatcccagctactcaggaggctgaggttggatgatcgcttgaacctgggaggcagagattgcagtgagcacaagatagcaccactgcactccagcctgggcgatagaacaacactccgtctcaaacaaataaaataaaataaaataaaagggtccctctggctgttgtgtgggggacagacagtagagcataggtggaagcagagaagccatgaggatggaactgtactagaccagcagggagccagtggtggctaaagcaggatggagggagcgggtggtaaatcaggatggagggagtgggtggggagaagtgtttgaatactggggacatttccaaagtattcaacacattggagttagcattgccaacagcatgagggtgagaggtgaacaacccctaatgcctgtgattccttcactcccccacccccaggcctctccatattgctgtggtgcagggtaacctgccagctgtgcaccggctggtcaacctcttccagcaggggggccgggagctcgacatctacaacaacctacggcaggtgaggctcggtctgagggaggagggctggggcctggactcctgggtctgacagaggaggggctgggggcctgaactcctgggtctgagggaggggggctggggcctggacccctgggtctgagggaggagggactggtgcctggactcctgggtctgatggaggagggctgcgggcctgggatccggggtctgatggaggagggctgggtcctgggctcctgagtctgagggaggagggctggggatctggactcctgggtctgagggaggagggctgggggtctggactcctgggtctgagggaggagggctggggtctggactctaagtagcgaggtgctccaggctcctggttcctggggaagaagggctctggggcctcggactggttgttcctgagagggagggggcctaaagacctcctagtgaggagggagggggctggggacccagaattcaggtactagggaaagaggaggttggaggcccagtcttctgggtcctggggaaggaggagcatggggcccggactcttgaatctgagacaggaggtgtctcaggtttctgttcctggggaagactgcaggatgaggaataagggttcagaaaacctgggggaggcaggactagagagcagggctggacacaggtccctcacagtcactgttccccagacaccgctccacctggctgtgatcaccacattaccgtctgtggtccggctcc

SEQ ID NO: 36860 - DNA, 1183 bp, Artificial sequence
  DNA replication origin
gcctctccacttctcagtatgaaaagatgggcaaggcactttttttcttggtgccagtctctcctcatttctggaactcacacccgcgctttcagaggctcacccactcccctccacgcaacggcacagacaccctcactcctctgcgctctggcacactcgcctgcaaccagcccgcggacacacgtgtgcaaggggcatgtccacagctgccccggctcaccctgcggctgcgcgccaccatgagcggcgtgtcgttgtggcagttcttgaggctgctgtcagcgccgctgcggaccagcgtgcgcaccagcgggaggagcccgcggccggacgctgagtgcagggcggagctgccggagtacatttgcgcgttcacgttggcgccgtgctgcgggacgggagggccgggtcaggagggcgcgcgggccacccggggtaagggaacagaggctggaggcccgggtgggtggccggcacgtggggcggcaccggatcggggtggggtcacaggaaggtaggagcgagagccaagggcaggccaagcgggactgcgttggcggcgatgaattaaccggagctggacaccgaggcccgcgccccaaggagtcgggggagctggaggggggaaggacaatgcgtggacagggcctagctggaaggcggggtcagccaggccatcgcagggcggggcctaggccgttgaggtggcagaggaggaatgggacaagttcgtagccaggggcgtggagcccgagggtcgagaaaactaggccttaaaggatcagagctggacgcggagcaggagccggagccagaagtggaaggcggggtcagagctaggggctgaggccagagccgggttggggtcagaggatagggtgggcgcgaggctcaggggggctgtacgcacctgcagcagcagctgcaccatgctaaggctgttgttttccacggcgtggatgagcggggagcggccgctcttaatgtcctgcggcggggagggaaggtcttagtttctccaagctctgctccagcagccggcgacccgcatcccgtccacatcccattcgcggggtccagcctctctcttgggtctgatactccaagccccaccccacccgggtgctctcccacgccagccccacactggccccgcccccgccaagaccccgcccctgct

SEQ ID NO: 36861 - DNA, 1621 bp, Artificial sequence
  DNA replication origin
ccatgcacccaagggatatggtacaaaaatagtttattacaaaagaaatccaaccaaaatgcttaataatttacatcgtgatccgtgcccgttacggcccacctctcccctcctcagttatctggtagagagtggaggggagtggctgttccctgggtccaccagctctgggaggggacatggaaatggaagatgtgggtggcattccggacagggactggtgcctgagaatgctggggtcagagtcctgggagggagcgagatgggggaacatctgtgctcagaagagggggtgtatgggtaggtgcatgtgcttctgtgcaaatcctggtcccgaagatggggggggggggcagagtgagatcttcacagtttccagaagggttgaccccacagggcaggggggcccctcctcatgagtccaagatctgcccccccatccccctcagctgcctcctggagctggggaggggggcaccggccggccagggcctcggaggaccccagcaaagggcaggaaggcgggtggagatggggaaggaaggaagaaattgggaggagccatggggaatccaggggggtccctggggggagactgggagggtgaggaggatggtgatgcggagagaagacctgaggaaggaagagagacagaggggtgggtggtgagaggctagacccagagagcaggggctggggcctgagatctgggtctgagggaggaggggctgggggtctggactcgggtctgagggaggaggggctggggatttaaactcccgggtctgaggaaagaggcatctggggacctagactcctgggtctgaaggaagaggggccgggggtcagaaggaggaggggctgggggtgtgagggaggaggggctgaggtctgagggaggagggtctggaaatctggactcctgggtctgagggaggaggggctgaggtttgagataagaggggctgggggtatgagggaggaggggctgaggtctgagggaggaggggctggggggtctgaaggaggaggggctggggtctgagggaggaggggccaggggtctgagggaggaggggctatgggttgggattcctgggtcagagggaggaggctaggggcctggactcctggatctgagggaggaggggctgtgggttgggattcctgggtctgagggaggaggcgccagggctggaggttgggaacggtttctcaccattggagctgaggcggctgctgctctcgggggaggtgttggcgctccggtcaggggaggggtctggctgggaggtggaagcaggccgggtggccttccccctcaggatgtcgatgacctgtaggaagatgggcgtgaccatagagccacccatgcctcacagtcctctctcccatccctcctagctcactggatccaggtggtggcctctccacttctcagtatgaaaagatgggcaaggcactttttttcttggtgccagtctctcctcatttctggaactcacacccgcgctttcagaggctcacccactcccctccacgcaacggcacagacaccctcactcctctgcgctctggcacactcgcctgcaaccagcccgcggacacacgtgtgcaaggg

SEQ ID NO: 36862 - DNA, 948 bp, Artificial sequence
  DNA replication origin
aaccgtgtctctactaaaaatacaaaaaagaaaaaaaaattagctggtgcggtttgagtttgattctcaaaaaggagcagggtggggtggctttggtgggtagcggtaggagggggcttctcagtgtgtgggtgggaagtgcaggtaggatatctgggtcccttcagagaggggcaaggggctaggggaggcctgggactttttttttttgagacagggtcttgctttttcacccaggctggagtgcagtggtgagatcttagctcactgcaacctctgtctcccaggctcaagtgatcctcccacctcaccctcctgagtagctggggtcacaggcgcgcatcagcagtcctggctattttattttattttattttttgtatttttagtagagacggggtctcaccatgttgcccaggctggtcttgaacttctgagctcaagcgatgcatccgcctcggcctcctaaagtgctgggattacaggcgtgagccattttgccctgccacgggactcttcttggagaggggaggggaagggctgggagctaccgagaggtgggacttggacacagcgccttgtcgaaggtatgggtctttggtcgtggcatgggattaaaggtcagataactgagatttcaaggaggaaccggtcagggaggcattgctctctctctgtctccgaggaaggaggcacagagccaccaggcccttgggttccctagaagcaagggtttgaaagtgggtgtctgagggggcaggaatttggcaacaagatttctgggtgcccctaatggtgtggcatgggagaaatcaggccagagttaagatactcctgagtcccgaagaagccaggcgggaggatggcgttcaagactgtgggggcggggagcaactcatttgtgtaggggtggccgggcgtggctttcacccaacctgtagaacctgt

SEQ ID NO: 36863 - DNA, 808 bp, Artificial sequence
  DNA replication origin
ggggccaccgccagagccatgggagcctcgcgtgtgccgggaaggaccggtgcggctgggataggggcggcctcgcccagagtgaaaggagagggcgggtcctagagaaccggggaggggcctgcaggtaccagtgtctccaaagggggcgggggctggaggacctggcacgtgggtcttcaagaggtgggatttggaggccgggagcggtggctcatgcttgtaatcccagcactttgggtggccgaggtggaaggatcacctgagcccaggagttcaaaaccagcctgggcaacatagtgaggccctatctctaaaaaatttttaaaaataaaataaaatgtggctgggcgcgatgactcacaactgtaatcccagcactttaggaggccgaggcaggcggatcacctgaggtcaggagttcgagaccagcctggccaacatggtgaaaccgtgtctctactaaaaatacaaaaaagaaaaaaaaattagctggtgcggtttgagtttgattctcaaaaaggagcagggtggggtggctttggtgggtagcggtaggagggggcttctcagtgtgtgggtgggaagtgcaggtaggatatctgggtcccttcagagaggggcaaggggctaggggaggcctgggactttttttttttgagacagggtcttgctttttcacccaggctggagtgcagtggtgagatcttagctcactgcaacctctgtctcccaggctcaagtgatcctcccacctcaccctcctgagtagctggggtcacaggcgcgcatcagcagtcctggctat

SEQ ID NO: 36864 - DNA, 1260 bp, Artificial sequence
  DNA replication origin
gaccttgttctgggctctgggccccaaacctcatctgcctggtcactctgagattccttcctcagtgcagaacagcagaggggtggcctccaggcaggtcctgggtctggagccagctgttcctcaggaactaaagaccaagtgggtagtccaggcagaaaccgtgatgggggcctaatgatcagtttctttgggtgtgtccatctacctctcctccacctaggagcccatggggtctccacattctgaggcctgatcctcccagctgggcctcccaaagagctgggattacaggtgtgagccaccgtacccagccagaccaggccaagttctgatcacaaatgtgcacacatctagaaaactttgaatcagagaataatagtaatagctaacttttattttatcctcagtgtaggaaaccccatggggtccctgaattctgagatagtgggatagtgggaaccagaattgggctgctgggtgaccaaggaaatggcaaaatcgggctgagggcatgggtgcccaaggaaggagaaaactgggtggcccattttccaggttcccttaggaaggaggggctggggcctggacccctgggtctgagggaggaggggctggggcctggatccctgggtctgagggaggaggggatgggggcctgagtttctgggtctgagggaggaggggctggggcctggacccctgggtctgagggaggaggggctgggggcctggacccctgagtctgagggaggaggggatgggggcctgagttcctgggtctgagggaggaggggctggggcctggacccctgggtctgagggaggaggggctgggggctggagccctgagtctgagggaggagggggtgggggcctgagttcctgggtctgagggaggaggggctggggcctggacccctgggtctgagggaggaggggctgggggctggagccctgagtctgagggaggagggggtgggggcctgagttcctgggtctgagggaggaggggctggggcctggacccctgggtctgagggaggaggggctgggggctggagccctgagtctgagggaggaggtggtgggggcctgagttcctgggtctgagggaggagggggtgggggcctaagttcctgggtctgggggaggaggggctgggagcaagacctgggcctcaccccagaggactttgttctggggcgaaggctcacctgagtctggagcccgcccggaagagctcgtcgttggcactc

SEQ ID NO: 36865 - DNA, 1412 bp, Artificial sequence
  DNA replication origin
gcccccgcccacaccttctggagggaaagttgcggagcccggtgagtaagcccttgtcctcagctcccggagccccatcctgccctggcccagggacccaggggtccaggcccacagctgcttctttcctggagaccctcccatcataggctctgggaggcctcagcggtgtctcccccacccctctcccacccaggtgtgtgctgccctgggctgagtttgagtccctcctgggcacctgccaccctgtggaaccaggctgcacagccctggccttgcgcaccaccattgacctcacctgcagcgggcacgtgtccatcttcgagttcgacgtcttcaccaggctctttcaggtcagggaaggccaaggctgggagctagacttgggtccaggaggaagtagagggctgaatcctggattcctgggtctgagggaggaagggccgggacctggactcctggatctgagggaggaggggccggggcctggactcctgggtctgagggaggagggggctgggacctggactcctgggtctgagggaggaggggctgggggcctggactcctgggtctgagggaggagggggctggggacctggactcctgggtctgagggaggaggggccggggacctggactcctgggtctgagggaggaaggcctggggcctggactcctgggtctgagggaggagggcctggggcctggactcctgggtctgagggaggagggcctggggcctggactcctgggtctgagggaggagggggctggagacctggactccagggtctgagggaggagggggtgagggcccggactccagggtttgagggaggagagggcggggggcctggactcttgggtctgagggaggagggcctggggcctggattcctgggtctgagggaggagggcctggggcctggactcctgggtctgagggaggaggggctggggcctggactcctgggtctgagggaggaggggctggagacctggactccagggtctgagggaggaggggctggagacctggactcctgggtctgagggaggaggggctggagacctggactccagggtctgagggaggagggggtgagggcctggactccagggtttgagggaggggagggctgggggcctggactcttgggtctgagggaggaggaagctagggtcccaaactcctgagttctggagaaagaagagcttggggtcttgtaaaagggatatgcctgaggcccaccatgggtgtgaaggaggtggttggatcctcgagccctagggactacttagggatgtgagctgcttccctggtcgctccctgacccaagccctgccccaccccagccatggccaacactcctcaagaactggcagctcctggcagtcaaccacccagg

SEQ ID NO: 36866 - DNA, 2216 bp, Artificial sequence
  DNA replication origin
gaatgaaggacagagagagggatgagcacagaccgtggcaaggcaaggtggataaccatcagggaaatgtgtggtccttttgaccagggacttaacctggatatctgggtctaggtccagggattttttttgccatgatgaagcaggagggttggatgcccgattctcagaaaacttgggattctggacttctaaatcctgagagcaggactcctgggtatcacagagaaggctgggggcccagtttcttttttttttttttctttttttaagacaggatctcggtctgtcacccaggctggattgctgtggcacaatcacagctccctgcaacctcagcttcctaggctcagtctttcccacttggcctcccaaagccttggaattacaagcgtgcgccaccgtgcctggccccagattccatttgaagatctgagggtggaggggctggggacctggactcctgggtctgagggaggaggggctggggcctggactcctgggtctgagggagaaggggttgggggtctggactcctgggtctgagggaggaggggctggggcctggactcctgggtctgagggagaaggggttgggggtctggactcctgggtctgagggaggaggggctggggcctggactcctaggtctgagggaggaggggctggggcctggactcctgggtctgagggaggaggggctgcagtatggactactgggtctgaggaaggaggggctgcagtatggactcctgggtctgagggaggaggggctgcagtatggactcctgggtctgagggaggaggggctggagtatggactcctgggtctgagggaggaggggctgcagtatggactcctgggtctgagggaggaggggctggggcctggactcctgggtctgagggagaaggggctgcagtatggactcctgggtctgaggaaggaggggctgcagtatggactcctgggtctgagggagaaggggctgcagtatggactcctgggtctgagggaggaggggctggagtatggactcctgggtctgagggaggaggggctgcagtatggactcctgggtctgagggaggaggggctggggcctggactcctgggtctgagggagaaggggctgcagtatggactcctgggtctgaggaaggaggggctgcagtatggactcctgggtctgagggaggaggggctggagtatggactcctgggtctgagggaggaggggctgcagtatggactcctgggtctgagggaggaggggctggggcctggactcctgggtctgagggagaaggggctgcagtatggactcctgggtctgagggaggaggggctggagtatggactcctgggtctgagggaggaggggctgcagtatggactcctgggtctgagggaggaggggctggggcctggactcctgggtctgagggagaaggggctgcagtatggattcctgggtctgaggaaggaggggctgcagtatggactcctgggtctgagggaggaggggctgcagtatggactcctgggtctgagggaggaggggctggagtatggactcctgggtctgaggaaggaggggctgcagtatggactcctgggtctgagggaggaggggctggagtatggactcctgggtctgagggaggaggggctggagtatggactcctgggtctgagggaggaggggctgcagtatggactcctgggtctgagggaggaggggctggagtatggactcctgagtctgagggaggaggggctggggcctggactcctgttgttcaggtggggaccaggcctggggacggccctttcccagtgcctgctgccctctgctgccccctgctggccactgcactcttcctttgcaccctggaggacagaccaggcttggcagtttatttcggtttcacaacccccttccagcccttggggctcccttgagcagcacatctgggtgccctgtaggcggagagaggggtgggttagatgaggtcacctccaggtggaggagggtggagtggggtggagtgggccagggagggttagggaatggactcacctggccttcaggccggggcagggtcctggggtcccagcgcagctggaggggagttcccctttaggagtctctgcaatggagatattttgagagggcggttgattcccggcatccaatctttccctctgccc

SEQ ID NO: 36867 - DNA, 1554 bp, Artificial sequence
  DNA replication origin
gctgtccccagatctctctcactggaaggcgtaccttccaacactcccatatccctcctccttggggtccccacattttgcttcctggggtcagggtaaagccctttctcctcgctttcccggggtccccaggggcctctccccagtcccaccttgccctcagcccgagccatacctgggtgcgccgccagcaggactgcgagcaacagcagccgcggggccccgcgcgcctgggccggtgcgtccgggggctccatgttcacggcggcggcggagactgagcccgggctgcagctcggccgctgcggggctgggagccagaggccccgcccccggcagccccgccccgccccgccctccaggcccccctcgtcccccgatgcccgggcgcggggccaggacctcccactgcccggagcggacctcccagtgcacggggccaggctcggggctcgtccgcccccaagcctagagctgtccgggcttactgaccagcgcctgcagcggggggcctgatcgaccagcgtagccagtgacccgagctgggatctcaccaggcaatcgcggaccttctcctcgttattctgaccaggggccttggggactcgtccccactgtgaccagcagcctgggctggcatcgtcgattttaaccagaggaccccactgcaacctgtggcctgcgatggcctctcccagtgtaactaatggccccaagcgtgccgtccgagtggcctgcactggcctctcccagtccaaccagtgacccccgcagcctgaccagtggcccccagcagctgctcccagtatgcccggagatgttttcccctgtggtcagtgctctgggctgctttcctcgtctgaccagtagcctggaatcaaccggtttaatctcttattttcaatggtcttcaaatccaggtcctcctaggccgcttcgatgatggggctgggggtggggtacggggtgccctctctgcttgctcacccatggaaggccctcccactcttccccctatccagggaatcccaggaatgccaccctcccttcctccttcccgctctctccttcattccctcccaaccttgtggggaagggaggagtcagactggccagagcaggtgaggagggcaggggaagaggccagggcacctgcgggaagggggaggagtccagccactgctaggaagcgtgggtcacaggtccgactgcccaaggcccctacaggccaggtcagactgggacaaaatcccccactagatgtcactagttgcccaggacagtggtcagaacgtgggagggtggggggtcgctggccacactgggagaggttacccaagcttctgatcagcctgggggttgaggtagccctggagctgggctttgcctgctcagacatacagagaaggcttggattacaggtcagcctgggagttattagactggtcaaggttactttatccattggtcatacaggagaccaacgttttttttgtttgtttgttttgtttttgacagggtctcgctctgttgcccagccgggaatgcagtggg

SEQ ID NO: 36868 - DNA, 2130 bp, Artificial sequence
  DNA replication origin
gttgcagtggggtcctctggttaaaatcgacgatgccagcccaggctgctggtcacagtggggacgagtccccaaggcccctggtcagaataacgaggagaaggtccgcgattgcctggtgagatcccagctcgggtcactggctacgctggtcgatcaggccccccgctgcaggcgctggtcagtaagcccggacagctctaggcttgggggcggacgagccccgagcctggccccgtgcactgggaggtccgctccgggcagtgggaggtcctggccccgcgcccgggcatcgggggacgaggggggcctggagggcggggcggggcggggctgccgggggcggggcctctggctcccagccccgcagcggccgagctgcagcccgggctcagtctccgccgccgccgtgaacatggagcccccggacgcaccggcccaggcgcgcggggccccgcggctgctgttgctcgcagtcctgctggcggcgcacccaggtatggctcgggctgagggcaaggtgggactggggagaggcccctggggaccccgggaaagcgaggagaaagggctttaccctgaccccaggaagcaaaatgtggggaccccaaggaggagggatatgggagtgttggaaggtacgccttccagtgagagagatctggggacagccaggcaggagagctggggatacccaggcggtggatcagagacaaccagagaagtcagcccccttcccactcagcaccctggaatctgggtcccacctgcctcctccctcagaccctggaatctgggcccccagcccctctttcctcagacccaggagtccaggcctccagtggctagaatagcttcccccagggcacagaggatcaaaaccccagggctctctccctcaaaggtcctcaagttttgagaggtccagggaccccttagagaagcgaggaccatgtgtccccacaccagcgatccacatgtatttaggagtttccagagtccagtataaagaacccgcctccctcaggaaagggctggagcaccagccccgggcagtgacagtggaacaaagtgtttccaagtgacaggcccccttcctggggcctcagctacatttacacacctgcatgaggatagaaggagaggaggccgggggctggggggtgggggtgggggtgctggggacagagggacagagagatgagagagattggggaagagagaggaactctctgcctccacttgtctgcagatcagacccagccttaggcaccagcctggaccccgtcacccctccctggggacaggctggggccagaggtgagcgcttgggaatccaggcccctggcacactcatggtcaacagtgggtccccaggggtagggctgggccagattgagcagagaagggaagggagtttctaagaagcactgagagctgatgccaggatgccagcccagagggtgagggagggtggtggtttttctacaataactactccaccaggccccagcctcctcttccctctgatcccaggagtccaggtgcccagcttcccaagatcctgggcctcaaccttatccttttgcaagatgactcgacttatcccgtttgctgttgtatcaaactgaggggggccaagaggcggctgggggctctggctccaggccgggcaggtctcagccagcctgtccctcccacattcctgaaacctgcccagccctgtcccccctcaccgcccccacacatccatcccgcctaagctccgggcccagccgcagcccacaccccagcccctcactcatgggagagcggaagagacccagggactgagtggtgcaggtgcagagagaggcagagacagggacagagatggagacccaagaggagagacacacgcaaaggtggagaccaggatggagagaaacatttatccatcatcacagaggtggccctgcccagggtgctggaggcaaatggctgagccaggcctggccctgccctggggggtggcgtgtgctctgttgggataagcaaaggctggtgcagtattaccccaggagtgttcagcggaggccacagggccctgtgcagcccagaggaggagccctgagctctgcaagtgcaggg

SEQ ID NO: 36869 - DNA, 1147 bp, Artificial sequence
  DNA replication origin
ccacacatccatcccgcctaagctccgggcccagccgcagcccacaccccagcccctcactcatgggagagcggaagagacccagggactgagtggtgcaggtgcagagagaggcagagacagggacagagatggagacccaagaggagagacacacgcaaaggtggagaccaggatggagagaaacatttatccatcatcacagaggtggccctgcccagggtgctggaggcaaatggctgagccaggcctggccctgccctggggggtggcgtgtgctctgttgggataagcaaaggctggtgcagtattaccccaggagtgttcagcggaggccacagggccctgtgcagcccagaggaggagccctgagctctgcaagtgcagggagagatggatttgagacccagagatgcagggagaagggatggagggcgaaaggatctcagggaggaggggctggggcctagactcctgggtctgagggaggaggggctggggcctggactcctgggtctgagggaggaggggctggggcctagactcctgggtctgagggaggaggggctggggcctagactcctgagtctgagggaggaggggacaggggcccagattcctgggtctgagggaggaggggctggcacctggactcctgggtctgagggaggaggggctgggacctggacgcttgtgtcctgggggagaggggaccctgtctggagggctcttcctgttggtgtggtggatgatagctcagttgctctcttgcagatgcccaggcggaggtgcgcttgtctgtacccccgctggtggaggtgatgcgaggaaagtctgtcattctggactgcacccctacgggaacccacgaccattatatgctggaatggttccttgtgagtgcttggggctggggggcctggagtcagggcacagcagggcagcaaaggttcattctctcatcagtgcctaaggcctgtagagatccaccaagccacactccttgttacagatggggtcactgagtcccactgaggggaagggatctgcaaggtgccccgtgtctaggcacagccaagtctagaatgacattgacctgctctggactgcgggctcttgagagagagaacagagacagacatcaaga

SEQ ID NO: 36870 - DNA, 805 bp, Artificial sequence
  DNA replication origin
ttggggctggggggcctggagtcagggcacagcagggcagcaaaggttcattctctcatcagtgcctaaggcctgtagagatccaccaagccacactccttgttacagatggggtcactgagtcccactgaggggaagggatctgcaaggtgccccgtgtctaggcacagccaagtctagaatgacattgacctgctctggactgcgggctcttgagagagagaacagagacagacatcaagaaagcagaagccaggcacggtggctcacgcctgtaatcccagcactttgggaggccgaggcgggtggatcacgaggtcaagagatcaagactgtcctgaccaacatggtgaaaccccgtctctactaaaaatacaaaaattagctgggcgtgatggcatgtgcctgtaatcccagctactcaggaggctgaggcaggagaatcgcttgaacctgggaggtagaggttgcagtgagccgagatcgagccaatgctctccagccaggcgacagagcaagactctatctcaaaaaaaaagaggaaagaaaatgagagacaatcgggagagggagagaccaagaggagaagggatgggaccggaatgagatggagaaaaggagacaggaaaaatcaagaactgatagggaatgggggcaggagaaggtggggagggacagagggaccagggagacccataacaagaggaaaagaggcagagccaggagctgcagagagaaaggacccagagagagagagactgaggagcgctgggacacccggagctgagagcctgccccgcgccca

SEQ ID NO: 36871 - DNA, 2448 bp, Artificial sequence
  DNA replication origin
cccaggctgggccttgggcttgggtccaggagctattctggggcctgggagagtcacattccctggaggaaggccccctcccacccacccaccctccctctccttccctcccggaggcaggcagccactgtgggtccctgccttgccggcagaggaaggaagggagggctgggcagggagagggaagagggaagagggaaggcgggggcgggcatggcgtgagcagggctggttctctgatgcctgcagctccaggtccagggacagcctctaggaggttcttggctcagcactggggagcggatggagaggtcagcctgtgcccacgggcgtgctccactgcccagcaggtccctctcaccagggggcccaggccctcacccacctcgtctccgaagcccccgctgccacccctggctcctccggaggcacctcccatgagaaggccggtctgctctggttgctccgaccccgagtggctcagccctggctcccctggcggcctggggggaggaggcagcgggcggaggcgtcgtgttggaggtgcacacggcagggggaggaactgaggatgggggtgggtgggactaggatgcggctggggatggaggtgaggatgggggtgtgctgggtggggatggcatagggatggggtaggggctggtaatggcactggggttagggttgggcatggggatgcagatgctattggggttggaggtgggaatgtagctggagttggctttgggatcggtctgggatggttacggattggaggtgaggacggccatgtggttggggctggagacaaggttagatgaggaggagcttggggaggcttaggggttggatttggagtcaggaatggggacaagattggggatggggacatgggtgaagttggcttcgggacggtggaggactagggttgggaaatggctaggtgagggctggatggtgagagataggcttggaggataaattggagttaagggtgagctcagggggatgatgggtgttggggctggaggttgggggaggatggggatgtggccagggctggagaggagcttagttgaggatggtttgaagggggttatggattggagttgaggggagattgggggcagggttgggattggagacaggcatggagttggggatgaggctgagctaggggcaggagaggtgattagggaaggggatggtgttgagtttggcttggggatgggtttggggatggccctgggttgggtttggggctgcagttggggatgaggatgagttggggatggctgtggattagtctggggctgggtttggggctgtagttggggatgaggatgggttggggatggaggtggatgtggtgggatgtggggtggaggataagatgtggttgaggttatgggttgagcttggggttgagggtggggatggggttaagctatggtggtcattgcagatagcaggccactcacggagcccccttctcccgccgctggcggcagcaggggccccctttgcgtctcacgcagtagaagacagcaacgacgaggagcaggaggcccacgctgacggccacggccatgacggccactccagcctgggaggtctgggggctcactgcagggacaggatggagagaggcgtgggtcaggcagtgggctctgtctgccccacacccggctcctctgccaccacctcagtcactcaccggtgccgaagtggaagacatggcgcttgttcccgtgggggttggaggcttcacaggagatgccatcgcggctcagggcgctggtcactttcagggtcagagagctgctcacccaaccctgccgtccggggattggctctgcgggctatggaggctccgatcaggccccggctggtggggtcaaggggtggggtcaagggcagaggtgaacgacgtccagtctcccaggaagtggaaaggagggtgtgatacttggatgagtgagagggggctcagggtggagaggaaggtcccttacgctgccccccaattggctccagctgagtttggggtctggatggccgcgggcagagcagatgagtgtgacttcgtctccttccctccagctgccatctgccttgggctctatttccgctgtctttagctctggcgagcctgtgggtggtggggatgggaagaaagtgaagggagaggagagagagagagaagagaggcatcgagcagaagatggagtccccagccagggactcaggaactcgtcctgtttgtccaggtcccacaccccacactgtccccatccaagcccaccccctccctgccccctgaaccttggaccagcagcgtgaagttctgggtgcggctgaggaccgggactgtgggcagggaggcctcacatacgtaggtgccattggaatcgaaggtgatagaactgagcgacagcatggggccat

SEQ ID NO: 36872 - DNA, 1016 bp, Artificial sequence
  DNA replication origin
tgatcacgccattgcactccagcctgggtgacaaagcgagacttcatctctaaaaaaaaagaagaaaacaaaaagaggccaagctcagtggctcaaacctgtaatcccagcactttgggagaccaaggcagggggatcactttaggtcaggagtttgagaccagcctggccaacatggtgaaaccccatctctactaaaaatacaaaaaattagccaggcatggtggcgcgagcctgtaatcccagctacgtgggaaactgaggaggagaaaatcttgaacccaggaggcagaggttgcagtgagccgatatcgcaccactgcactccagcctgggcgacagagcgagacactccgtgaaaagaaaagaaaaagaaatgacagcatgagagcgagtgagcacgcagagggcgacttagctggccgggggtggacggaaagatgccaggtcccgagggtgctgggcttggcccccgaggaccagcgtctgcctggagatgggtgctgtccccttaagtaaaagttcccagtctgtcttgccagagccccagagggaattgaaactgggcgaggaaaagctccctcttagctgtagagtcaatagaattagggatggagccacctcctctggggaggagtccctggggaaagcggggagcttggaggaatccagagaaaagggggcctggggcagagaggacacacagacattacaaggccaagaaagagggacgtgagaaagggatggaaagatttagggggaggcaagagggatgggttgggaagctccgagagagccctggagtaagagacaaaaatagatctggggagacagacaaaaagagtagtgggccaggtccagtggctcatgcctataatcccagcactttgggaggctgaggcaggaggatctcttgaggccaggggtttgagaccagcctgatcaacataccaagaccccatctctacaaaaaataaaaaattagccgggcatggtggcacacgactgcagtcctc

SEQ ID NO: 36873 - DNA, 1775 bp, Artificial sequence
  DNA replication origin
gcctctgctacttgaaacctagtccttctggggaggaaagcccaggtgtgtggcaggtggaagggagggcgagcctaggtggtcctcttgctagggcaagaagcccccaagcacctgcccccagctgagcagctccgcgcctcctggccctggacgaacttgggcccagactggcgctccgtggcaccccctcccccggcctcccgcttcgcgccctcatcccgccccccggcgcggcctcaccagctccccctgggcagcccaaagaatgcgaagaggtaggtgggggtagggaggagggcgagccgctgggagagacaaagggcccgagtctgagcgagagacacaaagacgcgaggaggctggggagataggggaagtgggacaaggacgcggggagtgaccaggtccggaggccggactggagcccagccccacccagcccggccgggccagcgcagcgcgggggccggtctctgctgccccctggcgggtggctgcggtgagaaggcggcgcggagcaggtgttgggaggggaggaccagggcgcgcagggaggtagggagggaaggaagcagagaacagagcagggacagagagacagcgagagagactcgcacgcagagacaagagacgccgagagggagacacagagaaagagacagggacagagagacacagatagagacagagagagacacacggagagacagagacagagaagcacagagatagagaggcacagagatagagacagagaaacacagagacagagaggcacacagagacagagaggcacagagacaggccgatagagacagagatacacagaaatagagacagagacagagaggcacacagatagagacagagagacacagagacagagtcaaaggatggaaagagacatggggaccaagtgacccagaaacagtgacagacaggccgggcttggtggctcacgcctgtaatcccagcatcttgggaggccgagccgggaggatcgcttgaggccagcctcagcaacatagtgagaccccgccgcccccccgccccgtctcttttattgaaataaagaaacagtgactgacaaaggaagaccagaaacagagcgacaccgaagcatgaggacggaaagacccagagaggcagaaatacagggacagagaggaagacccaaagagagtgagagagacacaaagacacgtaagagagacagagaaatccagaaagaaacgagtgcagcgacacctagagttcggggcagagattagaaacgcacgagggtacgagaaacaggctcagggcgatgggctcgacctgcggggaggtcgcacaaccgggacgtgctgggggcagaaccgtaaagccccacgtgcctcaggcaactgtgatgagaggacccgggcaggcaggaaagggcaggattcgaactgtgggtgggacagaggccaggacggactgagctaagagaccgagagaactccggctagggcgaggggcggggctggtggaggcggggctggtgggggcggagtcggccggaagggccgaaaggggcgtggcaagaccttggcgaggcggccggtaggcagggggcggggcgtgggaactactcgggagcagagggggcgtggctagaccttagggggcgtggtttaacgccgggagcgaaggagacagaattctttggcaggggcgaccttagaatcctggggaggagcgagaatggaatcccggggaggaacaggggtggaatccggggggcggggtca

SEQ ID NO: 36874 - DNA, 857 bp, Artificial sequence
  DNA replication origin
ttctgtttggatctcagaagacgttcctctgcctacaattaagtctgaagcccacgagatcgagtctcctgtcccccggttctgccgggaaccctgaaaacgaagccccctgcccacaattaaatccagaagctacaagtttgatcctctctcgcccccagttttacctagatcccagttagacttagcgcctagcctccattctaccagggaccctgaagacggagcccccggcccctaatttttctggagtccacggagtcagaacccccaactccctgaggttcggggttggagctccgagctcaggcccttccccctaagtcgccagaactcttatccttagccctccaagggacccgaatcaggtccgcttgtcctcagttctctccgggcctcagacgcccaagccgggaagaaggaaaaataggggagggaggtggtctcgcctcttcctcgagaccttactgcggtaggtggggggaacattccccacattcctgagaggggtagaggagacagagacccagatccgggtgaactactcggcgcggggtggggagggggcaccaggccttcctgggatttaaccctttcggcgcgggaatccgagaaatggggagggggacagacaagcaggcgtaggatgggcaattggattaagaaggatgggggtggtggtgagagagatgcagaaaggaggggtcagagtctcctcgagagaatcggacgtgtagggggtcggagtctgtggggccagccaggaagggggcacgcgagagggggctcggggagccgggggtgggcggggaaggtgctcggcttccccagctcggaaggtaaggttggagggggtc

SEQ ID NO: 36875 - DNA, 924 bp, Artificial sequence
  DNA replication origin
ctttggggctccctgcctgtcaccaaacccctttccttttcctgtccctgccttcatctggtatctatgtctagctcccttcccccaccctcctccgtcccattccagtgtctttcagcctcatccctgtgtcggtatttcactcccccgaccctgtgccggcatttcactccccttctatcctctgattccattcctacacgtgtctctgaccccattcctaaatctgtgtctgaccgcttccctctattggcctctgtacccatccttgtagctccagcctctctatatacccaccccccaacttctcctctgcccagtcccccttccctaatgagaggagacagccaggctgccgtccctctgctcccctccccctccactacgtggggctgcctggcggacatggacacacggatgggcagggaagaaagctgggggaggggagccggcccagctgggggcccaggtggtgcacccgcattccccgaggaggccaagcgggggaggcagtggagctagacaggtatacagagaaagacggagaggagagagagagatggggagaggagaagagagaaagagcttggagagggatggagagagaaagggtgagaaacgaagagagatgaagagggggaaagaaagtgagggaaggaggaaaacagggagggggaggggagagagagagagagggagagcgagcacatgccagccggccagccagtggacagcagaggcgaaggattggggtgggggtggtcaagaaaggggccgacagctccttctccaggggctaagaggtttcacagggaatcagtggggcctgggagccttccggatggtccgcagggaaaggattgttatctcagtttttttacgagggaggaaatggaaactcagaggcacttcctggagcccacc

SEQ ID NO: 36876 - DNA, 1830 bp, Artificial sequence
  DNA replication origin
attccctgtgaaacctcttagcccctggagaaggagctgtcggcccctttcttgaccacccccaccccaatccttcgcctctgctgtccactggctggccggctggcatgtgctcgctctccctctctctctctctcccctccccctccctgttttcctccttccctcactttctttccccctcttcatctctcttcgtttctcaccctttctctctccatccctctccaagctctttctctcttctcctctccccatctctctctctcctctccgtctttctctgtatacctgtctagctccactgcctcccccgcttggcctcctcggggaatgcgggtgcaccacctgggcccccagctgggccggctcccctcccccagctttcttccctgcccatccgtgtgtccatgtccgccaggcagccccacgtagtggagggggaggggagcagagggacggcagcctggctgtctcctctcattagggaagggggactgggcagaggagaagttggggggtgggtatatagagaggctggagctacaaggatgggtacagaggccaatagagggaagcggtcagacacagatttaggaatggggtcagagacacgtgtaggaatggaatcagaggatagaaggggagtgaaatgccggcacagggtcgggggagtgaaataccgacacagggatgaggctgaaagacactggaatgggacggaggagggtgggggaagggagctagacatagataccagatgaaggcagggacaggaaaaggaaaggggtttggtgacaggcagggagccccaaagactccagctgtgggacagcagaggtgccgtgacccacggaggtcagggtacagggggcctcaaggccagcgacatgtgggggccacagggagtgatgaacacagaagggacagggagctgggcacatgggccagctcccccgcccctgcctgggacgctgttacatttttaatgtcccagcagtgctgacaaatggagcaggaaggggaggagaagaggggacccagcaagatgggccaggctgtgagaaggtgtgtcagaaatatggggagacagggcactggagacccaggaggcagggagactccacagtcagagacagaaacagagacgtagaccagaaggcttgtgagaagagaaccccaggaatcaaggcagagagccaggttccagacacagggagacccagacggagaaagagaccggagatgtcagacatacagaggaaagaggaagagagtgactaacggggacagggtatcttctcaggctaatgaaaatgttctataattgctcgggtgatggatggctaactctgaatatacaaaagccactgaactgtacactttaaatgggtagattgtatggtatgggaataatgtctcaataaagctgttacaaagagacagagaatataagaggcacagagcagagaccagagactctgggggacacagataagagtgacagaggccaggcacattggctcataccagtaattccagcactttgggaggctgacgcaggagaatcgtttgaaccgagttcaaggctgcagtgagccctgattgcactactgcactccagcctgggccacagagcaagaccctgtctcaaaagagaaaagagtaacagagaccccaagagagaccctgggaattggagacacagagggacagggaccctaagaactagacacagagagagatagaagaggccccggaagacacagataagagacgctaagagacagcagggataccattaaaagactttcaagaagccaggcatgg

SEQ ID NO: 36877 - DNA, 1030 bp, Artificial sequence
  DNA replication origin
acttggaatgggaaagcaggaccagcggtgggggtgacagggagaagctgggagggttgggacttggaggctgacagggctgcggaggtaaaggggacaggggtgagggccgctgcccagacgctctgcatgtcaggtggaggcaagggagatacagccaggaggttggtcagcctggagtgagcccccatcatccagcacactgctaggcaggggctgtgccatgaacttggccaggacatggccagcaccatagccaggggactgtggccatgggaacaccagcctccctcagtgtcactgggcaagccagactggtgacagcttcatgaagtgtgagctgggtccccagacacacttcctctccctgtggactgcacctgcaggcttcctgtggtggcagagtggaggctgcccagggtgtagtgtgagcccatgggagaacaatggggacagacacagcttgagaccccgagatccagggatgggtagaccaaggcagcgaggagggtgcagagtgacctatggaaccctggaggagaggttgggggcttggactcctgggtctgagaaaggagggggctgggggcctggattcctgggtctgagggaggaggagctggaggcctagactcccaggtttgagggaggaagagcagggggcctgggctcctgggtctgagggagcaggggactgaggctggacccctgggtctgagggaggagggactaagggcctggactcctgggtctgagaggggaaggatgggggcctggactcctgggtctgagggaggaagcactggtggcctggactcctgggtctgagagagcagggatgggggcctgaactcccaggtctgagggattagggatgggggcctggactcctgggtctgagggaagagggctggggcctggactcctgggtctgagggaggagaggctggggcctgggcttctgggtctgagggaggcggggcctgaagctggacacctgggtctaggggaggaggagctgggctcctgg

SEQ ID NO: 36878 - DNA, 719 bp, Artificial sequence
  DNA replication origin
gaggcgggaagctcgactgagtccaggagttaagagaccagcctgggaaacacagtgagaccccgcctctacgaaagttagccgggcgtggtggcacgcacctgtagttcagctactctggaggctgaggtaggaggatcgattgaggccagaagttcaaggctgcagtaagctatgatggcgccactgcactccagcctgagtgacagagtccaaccttgtctttaaaaaaataaaaattaaaaaagcagtaacgaaagtataagaggctcaagtttaatgaataaacggcaagtaaaagtagactaaaggcaaaatcatgaataatgttgtaataggagcccaaggcatgacggataataaacctgaatgaatgggccagaggcagagtgatgaataatggaaaaatagggaccgggggcaagggaggtaacggacaggagttcatggatccaaaacatgatggctaattagagaagggccggaagaacgacgaaagtgagcaggcaggctggagctaaaagtagtctgggcaatgaagctcaaatgaatggggcagaggcatgatgggtaatgggagaggaatgaatgggccaaagatagaagccgcagtgacgcgaggaacaagaggcatgatgggtaacgaaaggggtgggtctaaggcaactgtttcgctaagaggtgatgagggcattgtgggtaacgaggagcagcgcagg

SEQ ID NO: 36879 - DNA, 1647 bp, Artificial sequence
  DNA replication origin
gcggggcgacggtggtggcggcggcggcagcgggttcggttgcgcgtggcgcacggggtgggagcggagcccaggccgggagcaggcgccgccgccagtgagaaccggggccggagccgggtgcggatttgctggggctgagtcgggggcgcgcgggccctgacctctgccctctgacctctcccctagcaggcgaccatggggaacgtgttggctgccagctcgccgcccgcagggccgccaccgccgcctgcgccggccctcgtggggctgccgccacctccgccctcgccgccgggcttcacgctgccgccgctgggaggcagcctgggcgccggcaccagtacgagtcgaagttcggaacggacccccggggctgcaaccgccagcgcctcaggggccgccgaggatggggcctgcggctgcctgcccaacccgggcacattcgaggagtgccaccggaagtgcaagggtgaggggcgaggggcccccgctgggctgcgatggcctggatctcgggggaagggggaggacactggggactctgggatttggcgcgcaccattggaattatttaacagcactaggaggtgatgttgggatcgaatggtggaacgttggacttggggcttagaatgatggaatcaaatgctggaaacgggatggaatgtcatagcagtagagaaaagcctttagggacctgaggagccccgggatcagccaagccagacttctcttgtgatcgggaaggcaactgaggcccaaggtcacggtgtcagcaaggtgtcagcgaggttccttgggtatgggacccaaagcctccggatcccagcctggagcaattagagtagtagtagtggtggagatttatggagttctgttctggtgttcattatacgttaactcattagatccttgggacaattctgtgtggtgagggtcccatctttcagatgatgagtttgacctaaagttgctcagcttggtggcagtgagatttgagcaagcaaaggccctggccctgtctaactaggctgtactgcctctttacaggtggaatcctttgtgagatgttctgctgtgggtctctggagagagctgggggtggtagggaaggaagagatgagagttggtgtggggttggagtggagtgtgacagcgtttctcttctccagagctgtttcccattcagatggagggtgtcaagctcacagtcaacaaagggttgagtaaccattttcaggtgagccttcctggtgtccttacccaccagagatcgtccccgccgtccccctccctgcatctgcacactcggcccaattactcctccctcaagagctgggctccctgatacttgaaaagactcggagatatagtgccagactgactactcagtttggggacctagaatccagaggtactgtctccccatagcagctaggctggagtgaaggaacaggtctgtgggcctaccggcagcacctcctttctctgagtctcttagtcaggccgtgcctcccagtcttcatcccctgcccagcccagagaccttgtccttgccctcttcagtgggcaagcctatctgtccagtatcgtcacagctctcgctttccttccaggtcaaccacacagtagccctcagcacaa

SEQ ID NO: 36880 - DNA, 883 bp, Artificial sequence
  DNA replication origin
ccacgtatattttttgttgttttttgttttttttctgtaaaatgtcccggttcttccataacttataaacatgatttataccgaggagatgggaaagtggacggggcagggtggactgaccggggatggggaagctcctctcgctgccccctcggggcgggcccaggccctttggaggatggggacgccaggacactcctccctgaggttgtctggccgcctctgcccctggtgctcagaatcctgcgtgcccctcaattccggaatccctcccgggaccccaggcccactgggcatgctgcccctgctactcagaatcccgaagcgccattcagttccagaatcccctcctcagctgctggggtggcggggtccctcctttccaatgtcccccccgacccccaaggggggagggaagggaggggggctcaggtctcccctctgtggcagggggaggtggaggtggaggtggaatcggaagggcgtggaaggcgggggccaggagggctcagccgatggtgaggccaaagccacactgaaacttgttcttgcggtgattcaggaaggccccaagggccagtgtcaggggcaggggtgggagcttcttctccagcgtggcacccacgatccagttgctatccacagagcctgcagggaagagctgaggtgagaggcgtgccagcttcccaccatatccatgcagagttcctggccaccttggataccagccacatgccgacagcttccagacctttaaccacactgctcctgccaccctgaaaccccatcacaccaacaacttcacgctggagcaaatggctcactcctcctctgctctccgctcagtgacccctgccctctgaaaagccctctagacccctgg

SEQ ID NO: 36881 - DNA, 1327 bp, Artificial sequence
  DNA replication origin
ccagccccctctccagattacattcatccaggcacaggaaaggacagggtcaggaaaggaggactctgggcggcagcctccacattccccttccacgcttggcccccagaatggaggagggtgtctgtattactgggcgaggtgtcctcccttcctggggactgtggggggtggtcaaaagacctctatgccccacctccttcctccctctgccctgctgtgcctggggcagggggagaacagcccacctcgtgactgggggctggcccagcccgccctatccctgggggagggggcgggacagggggagccctataattggacaagtctgggatccttgagtcctactcagccccagcggaggtgaaggacgtccttccccaggagccggtgagaagcgcagtcgggggcacggggatgagctcaggggcctctagaaagagctgggaccctgggaacccctggcctccaggtagtctcaggagagctactcggggtcgggcttggggagaggaggagcgggggtgaggcaagcagcaggggactggacctgggaagggctgggcagcagagacgacccgacccgctagaaggtggggtggggagagcagctggactgggatgtaagccatagcaggactccacgagttgtcactatcatttatcgagcacctactgggtgtccccagtgtcctcagatctccataactggggagccaggggcagcgacacggtagctagccgtcgattggagaactttaaaatgaggactgaattagctcataaatggaacacggcgcttaactgtgaggttggagcttagaatgtgaagggagaatgaggaatgcgagactgggactgagatggaaccggcggtggggagggggtggggggatggaatttgaaccccgggagaggaagatggaattttctatggaggccgacctggggatggggagataagagaagaccaggagggagttaaatagggaatgggttgggggcggcttggtaaatgtgctgggattaggctgttgcagataatgcaacaaggcttggaaggctaacctggggtgaggccgggttggggccgggctgggggtgggaggagtcctcactggcggttgattgacagtttctccttccccagactggccaatcacaggcaggaagatgaaggttctgtgggctgcgttgctggtcacattcctggcaggtatgggggcggggcttgctcggttccccccgctcctccccctctcatcctcacctcaacctcctggccccattcaggcagaccctgggccccctcttctgaggcttctgt

SEQ ID NO: 36882 - DNA, 1263 bp, Artificial sequence
  DNA replication origin
caggcgtatctgctgggcctgctcctccagcttggcgcgcacctccgccacctgctccttcacctcgtccaggcggtcgcgggtccggctgcccatctcctccatccgcgcgcgcagccgctcgccccaggcctgggcccgctcctgtagcggctggccggccagggagcccacagtggcggcccgcacgcggccctgttccaccaggggccccaggcgctcgcggatggcgctgaggccgcgctcggcgccctcgcgggccccggcctggtacactgccaggcgcttctgcaggtcatcggcatcgcggaggagccgcttacgcagcttgcgcaggtgggaggcgaggcgcacccgcagctcctcggtgctctggccgagcatggcctgcacctcgccgcggtactgcaccaggcggccgcacacgtcctccatgtccgcgcccagccgggcctgcgccgcctgcagctccttggacagccgtgcccgcgtctcctccgccaccggggtcagttgttcctccagttccgatttgtaggccttcaactccttcatggtctcgtccatcagcgccctgcggccgagagggcgggagggtgtcgcacagtgggaggcggggagaagggctgggatggggcgggcgagatggggatgagccagagagacccaagagggagagaaggaacggggcagaggccgagagaaggagacagagacagatgcagagagcagatgcagagggcagaggcagagacgaagaaggagctaggaggccgggcaaggtggctcatgcctctaatcccagcactttgggaggccgaggcgggaggatcgcttgagcccagaagttcaagaccagcctgggcaacacagtgagaccccatctctctgtctctatataaaagagctagggaaggacagagacagagccaggacgagtgtgagagactgagtcagaagggaagagagagagacaaagctgagagagagaattccagagagctaaagccaggagtcagaaatgggaagaggaagctagaaccagcagagacccaggccccccaagacttagcgacaggggcagaatgaaacctggacctggggaggtatagccgcccaccaggagggtcaagggccaggatggggacactcacctcagttcctgggtgacctgggagctgagcagctcctcctgcacctgctcagacagtgtctgcacccagcgcaggtaatcccaaaagcgacccagtgccagttcccagc

SEQ ID NO: 36883 - DNA, 1373 bp, Artificial sequence
  DNA replication origin
cagaggggtgggatggggtgcagggtgggtgggaaggaggcagatatcagataagactggaggagagaagggggagaataatgacagcagaaaaaaaatgaaaatagcttagaataaaggcaccaatctcaggtcatttggagttgcaactctgaggaacaagtattattaagttgggcaggccgggctcggagccccatgcctggaatcccagcactttgggaggccgatggcggaggatctcttgagcccaggggtttgagactagcctgggcaacatattgagaccttgtctctacaaataataataaaaagctgggtgtggtggtgctagccagtagtctcagctactcaggaggccaaggtgggagtatcgcttgagcccaggaattccacatcagcctggccaacaaagccagaccccatctccacacacaccacccccccccccaaattaatcctagtggtatgcgcctgtagtctcagctactggaaaggctgaggcgggaggatcacttatcacttgagtccaggaggtggaggctgcagtgagctgtgatggcgggtgacagggtgagacctttccctgccccctaaaaaagaaagaggggcagaggccgggcatggtggctcaggcctgtaatctcagcactttgggaggccggcgggtggatcacttggtcaggagtttgagacctgcctggccaacatggtgaaagctcgtctctactaaaaatacaaaaattagccgggtgtggtggtgtgagcctgtaatcccagctactgaggcagcagaatcgcttgaacccaagaggcagaggttgcagtgagccaagatcgtgccactgcactctagcctgggtgacagagccagactccgtctaaaaaaaaaaaaaagggcagagagaaagatacacacagacacagatggagaggagggggctgagaattgtgtggccagtatgtgggcagaaagagaaactgaggctggggcttagaggaaatcacagggggaggccagcagatgcgtgaaacttggtgaatctttattaaactagggtccaccccaggaggacggctggggcggggacagggtctcccgctgcaggctgcgcggaggcaggaggcacggggtggcgtggggtcgcatggctgcaggcttcggcgttcagtgattgtcgctgggcacaggggcggcgctggtgcccacggcagcctgcaccttctccaccagcccggcccactggcgctgcatgtcttccaccaggggctcgaaccagctcttgaggcgggcctggaaggcctcggcctgcaggcgtatctgctgggcctgctcctccagcttggcgcgcacctccgccacctgctccttc

SEQ ID NO: 36884 - DNA, 923 bp, Artificial sequence
  DNA replication origin
ttttagtagggacagggtttttcaccatgttggccaggttggtctcaaactcctggcctcatatgatctgcccacctcggcctcccaaagtgctgggattacaggcgtgagccactgcgcctttctttgtatttgttcaagtaatatactgaaatatgtactgtgcctcccactttatggaggaggaaactgaggccagcaaatgaggctgtcatgggaggtggagacaggatttgaacctgcctcagtgcaggaggctcaagagcctctgtcttctctcagggcactgtgtgggagggtgagaaggagggaggcccacagaggcatgacctctgattgccactgtcacctgggccctgctctctgaagtctctgccaagcggggaggtggccgggggagggccctgctctgtgcagcctcccctcccccggcccgcagagttgagcacagagggacagaggcacggaacccccagaaatgtccctcctcagaaacaggctccaggccctgcctgccctgtgcctctgcgtgctggtcctggcctgcattgggggtgagaagaagtgggtggagggatgtggggcccacacctggtgggtgtgagtgtggctgtgtgtcctgtggctctgtagccacgtgagacatgagtacggagtgtgtgcgtttcatggcgtgcgtatgcatgtgcgtgtcggggagtgtgtgtgtcggtggctgagagtgaagtgtgaatgtcacattggtacaaactgggatcatctgtgtgtgtgcacgtgcgtgcgtggaagtgggagtatgcagtcgtggtaaaaaagtgcatgtctgtgtgcatatgtgtatttgtgtgcacctgtctctctgtggggtatgtgtgtgcaaaatatttgagtgtgtggacatgtgtgagggggtgagtgtgtgc

SEQ ID NO: 36885 - DNA, 1191 bp, Artificial sequence
  DNA replication origin
ttatttattgttactattcactgctttattcccatggacccatgggttagagctccatacataaagtaggtgctcattaaatgttggctggactgagtcagcccctccatcttggcccttgagtcctcagaaaagcagtgccatccatgagaagcaacttgaattgtattttttattgaaaagaattcaggctagagttgggaggaggatgcaagagctactgggaagggggagctcagtctgaacctgggggatcaggggagtaggggactctccccttgtccactgatggggggtctggctgttactcctctcccttcagcacagaaagaacttggtcagtaaaaatgcctgtgtaagtgctcatggctgctgtgcttttgctgtacaagtccctggggagaaagcacagatggttagagggaggaggggctgggggcctggactcctgggtctgagggaggagggtctggggacctggactcctgggtctgagggaggaggggctgggggcctggactcctgggtctgagggaggacgggctgggggcctggactcctgggtctgagggaggaggggctgaggcctggactcctgggtctgagggaggaggggctggggcctgaacttctgggtcctggatgcagtcggtggtatgggccagaccccatttctccaggggcaggtgctacctgagtttctcatctacagcgggcaggtatgtcttctcgtacaggttctgggcggctgtctttgctgactcccagtaactggagagagattccttcacctgggtgaggaaggtcgggctaggcatctcatcttgctggggctgttgggtcccctggacctctgcagggggagagtgtgtcaggagagcccgtggggctgcagcagggggaaaggaggaaggaagaagaggagagggcagaggcagaggtaagaagggcctgggctgggaagatgcttggagctcattcccctccccaaggcttccctccccggaagcccacactcaccaaatcccaataccaggaggacaagaaacagagctgggaggagtcgtgtgcccatagtgtccagagacctggaacattgagggggtgtcatgtggcaggctgactggaggcggctgttcctgtggtcacgccccactctggtgggggggactgagatcctgctctgtgtga

SEQ ID NO: 36886 - DNA, 1368 bp, Artificial sequence
  DNA replication origin
cacttaagcatgaggcccagggcctgatgttttccattcgccatctaactacgtcttcccaataacacagcggggcaaaacgggaagacgaagaacgagtacgattatatccctggtttataaaaggggagaaactgaggctcaaacatagatgtcacttgtcaccagcctggccaacacggtgaaactccgtctctacttacaaaaaaaaaaaaaaaatgggaggctgacgcaggagaattgcttgaatccgggaggcagaggttgcagtgagccgagatcgcgccactgcactccagcctgggtgacagagcgagactccgtctcaaaaaaaaaaaaaaaattagccaggagtggtggcgtgctcctgtaatcccagctactcgggaggccgaggatgcagtgagccgaggttgcagtgagccgagatcgcgccattgcactccagcctgggggagagtgaggctccgtctaaaaaagaaaaaaaaagagagagagagacgtcacttgtccaggatatcttatccagtcagtagcaccacaagggttagaaccctggccagacatccacccaatttcacgggtgaacagttaacagcctctgagagtcttgtcctctctgggcctccgtaacaccctctccaaactaagggtctctcagcagatggccgggtttagagctgtacgaagacacacagctaatgaaaaattgtggaattctcagagcccgtgaagcctagcccacggatgcgaggtttggaccactgagggaacgcgcatgcgtgctaggcagggcagtccgaaggcttgggggtgtatcatagggtctcatcggaggtttgttggccgtaagacccctggaattggaactctaaaaacacagaaaggatatgagctcaggagacttgaacgaaagagttgtcttaggaagaggggtcagaagacaagggtgctgggcaaaaggctagttcttcgaatcagaatacggtggccagaaaggttcctctgacgaaagaggggcgtggttcgaagccgtacagtggccggtaaagctcaagaaacatggaacgaaaaggacgcgaagaatcggcagggagaagcggacaggatgtcccgaaaggctcatataaccgaaaaggcgggttaatgtgaagggacggaagggacagaacttgcgggaggcacatgctggccgagaaagtcctggagttcggagcatacagtgtttttattaggtggaaacaaacgggctgggagaaagacgagtacggtggccaggttggtccttccatagccggaagtggccttcctgagaggcgtggctgcggcactcttgccggatagggtggcccggcggggctaggaaag

SEQ ID NO: 36887 - DNA, 1046 bp, Artificial sequence
  DNA replication origin
gttggtccttccatagccggaagtggccttcctgagaggcgtggctgcggcactcttgccggatagggtggcccggcggggctaggaaagcgtgaaatctcgcgcgattgcgctgcgaagtcggggacggggcggggctggcggcgggggcggggacccggagcgggaagatggcggcggcgcaggaggcggacggggcccgcagcgccgtggtggcggccgggggaggcagctccggtcaggtacggaggccgagaggggactgagggggttcttccccagccggggggcctcccacggggcgtgtcctacctcttgtcacggaatcccgtgcactgggggctccttggccagagggaccttgaatacccggcccaggcagggccggaccgcccgggaggccggacggtgccgggaacagggccctgttgcgggtcggttcccctgcacgctcgagccgggcggccaccaggctcattgctcgatccggggagacagtggctcggaggggcgcaggcttgtaccttggcgcgctgggttctcaactccgcgattccatgctctgaggccgttcctagagtggtctggcgttcaggtctcgttgtagtgtttgaggtgtgcgcagtgattaattgggagttttctagctgtggggaagtcagtattagcagggcacggccgacagacccattttacagacgggaattcaaggaacagtgagactaaggcgcttctagaaggtcatcctggttaggtttgtaactttatgtagaagttacaagacactgctgacacagggactggtatggttgtggttttaatgtaaaatagttctatgggttaattagtcctggtgcggatgacttctgccccactgctgtcttaacacactgcagagcataccatttcaggcagctaccgttcaggcatttggggaatagatggagagacatgaaggtgctgtcgacccacccactgggatgtcactgacatgtgggaggcagctcaggggaaaggagtgcgggttgagaggggagaatgaagct

SEQ ID NO: 36888 - DNA, 1710 bp, Artificial sequence
  DNA replication origin
tcaggaaccctcactctgcccccgcgaaacccttagactcccataggaacccccagactactccgggaccgccagaatccccgcatctccagccccgccccagacccctctcctgaaccccagccccgcttacctaaggcccccagctccggcgcagccggcggtctggcgacgcggcgactcggcatggcccggccagtggggacggacggcccagaggctggcccagaccgaagcatgcacgcgggccggccgggcggccgggaggcacggtctggtggacgatcgcgggtcggacgagcggcgcaagggctggggccgcaggccgggcaggacgcgcggcgcccggggctgcgcggggcgcggggccgggccgggcgggcggcgggcgggggcggggcggcggaattccccggcgccgccggcctgcgcgcccattggtctgcaccccgccgtgacgtcacgcctggggaacgggaaaacccccacgcgtcacgtgatcgcgggggcggggccggccgggaaagggaggctgggcgctcaggaggggttgggcaggcgtcgctgcccattgctctggacgagacaactgaggcctgcttagagccatcacgccttacccattgagcaagccggcaaactgagccgctccccgctttggtctcccagtgggacttgaacctgccgtttctcaggctggaaggggagcttcaggatcgagaggttggcagggctctacacctgccatccataataatatttcggaaacctccaaggtctcgctacacctcagtttcctcaaccgtaaattgaggatgaagatatttaaggaacgtttaaagctagcgtgtcagcttcagaatttatgttttgtgcgttgttgtaaccccaacgcctagaccagcgcctggaacaccgtaggtgcccaataaatgtttattggaggccgggcgcggtggttcatgcctgtaatctcagcactttgggaggccgaggcaggcacatcacgaggtcaggatttcgagaccagcctgaccgacatggtgaaatcccatctctactaaaaatacaaaaattagctgggcgtgttggtgtgcgcctgtaatgccagctactccggaggctgaggcaggagaatagcttgaacctgggaggcggaggttgcagtgagctgagatcgtgccactgcactccagcctgggcaacagagcgagactcccatctcaaaaaaaaaaaagtttattggatgaatgcatggatgttttatttattggtttgttcctccctgcagcccctgaaagttacccataaatagcccagaccactttgagctcaaaagctcagttattcagtctgcgaatggcagcagtgtagcctccgtatacatcctgagctgtgtgcctaaaccctgagctcatccctatcaccagcgccagaagcatatgataggattattgcagaagggactcaggctgaaagaggggcagccatttggctagatcacattcctaagcctctcatattcctgagaacgactaggtgatctattaggttctaagttggatgccaggcgctctcagaccacagatgcagggtttgttgtctttcctttgcttgtataaaatttgggtgttctggctaggcacggtggctcacacctgtaaccccaatactttgggaggccgaggcaggaggattgcttgagcctgg

SEQ ID NO: 36889 - DNA, 1955 bp, Artificial sequence
  DNA replication origin
tggctctaagcaggcctcagttgtctcgtccagagcaatgggcagcgacgcctgcccaacccctcctgagcgcccagcctccctttcccggccggccccgcccccgcgatcacgtgacgcgtgggggttttcccgttccccaggcgtgacgtcacggcggggtgcagaccaatgggcgcgcaggccggcggcgccggggaattccgccgccccgcccccgcccgccgcccgcccggcccggccccgcgccccgcgcagccccgggcgccgcgcgtcctgcccggcctgcggccccagcccttgcgccgctcgtccgacccgcgatcgtccaccagaccgtgcctcccggccgcccggccggcccgcgtgcatgcttcggtctgggccagcctctgggccgtccgtccccactggccgggccatgccgagtcgccgcgtcgccagaccgccggctgcgccggagctgggggccttaggtaagcggggctggggttcaggagaggggtctggggcggggctggagatgcggggattctggcggtcccggagtagtctgggggttcctatgggagtctaagggtttcgcgggggcagagtgagggttcctgagacactgtattagggcgtaggaagaaggcagagggtgatgagggggtacggcccgaggttcgagcgaggcgtcccgctgtagagtgagagggggcggggcctgaccctgaggcaaagaagggggcgtggcctgactcagagaaggcggagcgaaagctgctcttgggcggtatcggggcggggccgggcccagagagggagaagaggggcgggatccgacccggactatgagaagagggccgggcctgactcaaaaaaggaagcagggccctacgctgaggggtgagggggcggggcctggccgtgagggcaggaagggggcggggcctgagttggccgaaagaaggggaaggggcggggcctgactctggccgagtggaggggaagggcctgttacccaaaaaagcagggcggggcccgacacagagaatgaggagggggtggggcttgcctccagacggagaagcggagccttgacattgaaaaaattaaaagtggtctgaccctgacaggaggatgtttttttttgtttgttttttgtttttttcttttgagatggagtctcgctctgtcgcccaggctggagtgcagtggcacgatctaggctcactgcaacctctgcctcccgggctcaagcagttctcctgcctcagccccccgagtagctggaattacaggtgcccgccaccacacccggctaatttttgtagttttactagagacggggtttcaccatgctggtcagactggcctcgaacttctgacctcaggtgatccgcacgcctcggcctctcaaagtgctgggattacaggtgtgagcccttgtgcccagcgggatggggactttttaaactgagattgagatggggtcccctccaggcccaactttaagggagaaaaggagcgggccctgagtgtgatgaagggtggggcgaaccacagaaactaaaggccaggacctgtccatgatttagctggtaagcctggccagacgcaggggggcagtcagggcgaggggcctgatccagaggggaagggctagaagaggaaggggtggggcttccttgggatattctctggtcctctggctgccccccatcacctcctgagacgtttctccttctctgcagggtcccccgacctctcctcactctcgctcgccgtttccaggagcacaggtgagcagccctccacagttcctgcccactcgctcatgcaggatgaggttgggaggactccacagagatgtctctgtttgggggttcacgaggtccacctcagctttctcctgacagggtgcatccctccctgccagttgagatgggccccctaggttttcttacctc

SEQ ID NO: 36890 - DNA, 1292 bp, Artificial sequence
  DNA replication origin
tgggactacaggtgcatgtcaccatgcccaactaattttttttttttgagatgcaatctcactctgttgcacaggctggagcgcagtgacgcgatctcggctcactgcaacctccgcctcccgggttcaagcaattcttctgcctcagcctcctgagtagctgggattatagtcgcctgccactgcgcccagctaatttttgtatttttagtagacagggttttggcatgttggccaggctggtctcaaactcctgacttctcaggtgacctgcccgccttggcctcccaaagtgctgggattaccggcatgagccaccgtgcctggccacccagctaatttttaaattttttatagagacagggttttgccaagttgcccaggctggtcttgaactcctgggctcaagcaatcctcccacctcgacctcccaaagtgttgggattacaggcgtgagccacagcgcctgagccattcatgcctctgtaagcgggacattctgacacctgcagccaagggcaatcctaacggccacagcactctcaactcactcttgtcatagacgggctcggaaagcacaggatccatccggcgcatctgtccctgctggtcccgatatgaggcctggaagcagatcctcaccacattcatgtctacttcctgatggttcttcagggacccagctgtcgggggagatatggggaggctgagggtgggaagtggagaccctctctggggtacaggggaacggggaagggatggggctggaggagacggtggggcctggagtggtgaggggaccagggtgagcacggaagtcaaggggtttgggaggacgggatggtcaggtcaggcagggggtgctcaccgttgtaggggtcaatgcccagttgaatcttccgctcaatggcagcctcaatctccttcttcctcacacactggatgcccaggttgttaaaactgagggggtgacgggggagggagaggagtgctcgtgagcaggcaagtgtggccctaacctgcaggagggctctggcagatgctgctgtggggctcaggctctcaggggctgacatcccaggcccaggggtcccagcattagaaacggtctggggtttaaacctctcagaaggccagcgcggtggctcacacctgtaatcccagcactttgggaggccgaggcaggaggatcacttgaggtcagtagttcaagaccagcatggccaacatggtgaaaccctgtctctactaaaaatacaaaaattagcagacatagtagtgcatgcctgtaa

SEQ ID NO: 36891 - DNA, 1056 bp, Artificial sequence
  DNA replication origin
ttccaagcccagattttaccaggatgaccagctgtgccccccaacccagggtccctcaccccagacaaaaggccagttactcacgatcttttcataatactcccgtctccgctccgccctcttcttgtagtcgaccatcatgcctcgaagcttccgctcatgcttccgagcctcgtgccacattgtggtgaggccaagcctggggcctcaacctgagggatgaagggaccaggaaagtcagatggtctgtgaaacccgtatgggcagaatcaaagtcatctaacaagttggtggcagagtcgatcccaaacaacacatctcttagcttcagggagcagaagtgaagctgcagaacagtatgccagatgttcaagtccatccctaacaacttcgatctagaagcttgggcattctgaaaaaccctcaggtgattctgaggtgagcatcactgggaaaggggtgtcctagattccacgcgctggagtcgggaatgaaaggttttgaaacatcagcagtgtttgaagtagggtcagaaggcaaaccctgagcacttaaggctggagctcaagagaaagagaagaactgaaaaggctcccactaggggccatgcgtggggttgggtatgagtctgggtggtagagggataaggagaataaggatgaaggcaggtggaggaaatcggagaaagcttttaagggaacagtgcagttgtatgaaggtggaggtcgaggacaggtgaagggcgtggcggaagatgaagatgctagagggagtgggaacacggggagggagtgttgcaaggagaccagagtgaagctgaggtctaaagatgggatctagatggcggggtggggagagcatccaaagaaaaagagcgtagagcctgagagaggcggagctggctgacaggagggcgtgggctgagcttgggggcagggcttgcgggaaagggcggagaccgaaggtttggacggggcttgtggatcgcgtcgcggcctgaggatttgggctgggttttttttttgttgtttttttttttgacaagggggcggggcc

SEQ ID NO: 36892 - DNA, 1008 bp, Artificial sequence
  DNA replication origin
gggaggactgaacaggggcggaaagatggcggctggagatcacggtgggtggcaggcagggtgtgggtcacaggtgtttggaagcagggcgtgtgataagccagaggaaggagggctgggcggaggtcaatgtgtggctccacagagtgtgaataaagagccagctactgggctgagcgcggtggctcacgtctgtaatcccagcactttgggaggccgaggcaagtggatcacgaggtcaggagttcaagaccagcctgaccaatatggtgaaacccccgtctctactaaaagtacaaaaattagctgggcgtggtggcgtgtgcctttagtctcagctacttgggaagctgaggcaggagaatcacttgaacccaggaggtggaggttgcagtgagccaagatcatgccactgcactccagcccggtaacagagcaagactccatctcaaaaataaataaataaataaataaaaagagccagttgctggagtaagaaccaggatgagaaaaacagagagacttgggggtggtttgatcagtgggaatccagaggggaggtgaatggcagagaggagggtgaacagatgcctggcggatgggggctgactctgtaagaggatgaacacttgttttccagaggagggaagagagcaggagagaggggcaaaggcagagagaggccggcccaagtggaggagaatggagccaacacctaggaggggaaaagatcatagaaatagcaccctagaaatgagagatgagtgaggcagaggaaggccggaacggaggaggacaggagtgagacaggggcagcaggaggctggtgtgccctggggcggggtagggagagagacacggttcgtaagcacggggtgccccacagagggtgagggacgagacacagaaacgatgcccagggactgcaggtggggagggcagagaggggaccccaccgatgtcggggatgacctcatcttcgtccgagttgctctcctcctcggccgc

SEQ ID NO: 36893 - DNA, 930 bp, Artificial sequence
  DNA replication origin
gagtcagattcgccccaggtcgcactaagtagggcaggctgggtgacttgggtgcagcctgtttctgcacagatgaagtggggccacgaccaccataggctcagggacctgcatgtgtaaagtcctgggcccagggccaggcacacaaatgctcacaaacaggatggctgtcaataccgggagtaatagtgagatgccagggtggggcccacagaatgggtaggggtgtcagcaggcaggcctcacctgacgaagtcaccgtcggccatgccataagtcgtggcctgtttgttgagatctgccacctgctcctggttcaattcatccacgtccacctccacgtctgcaccaagagaaaggctgtcaggagccacggccgagcgagaggacaggggagaaggggcagtgctccaggaggcggggatgatggggcgcccgccagactgagggattcttcaggaagggatggcatcaagtctggctcatcttggcatgccctaggctggcactgggcttgccagaggtgagcacaacacacagtggacagaggcagctcggggacagggcttgaaggggcagatgaacggagggagggaaagagaagggagagatggacggatgggtgcagggatggatgaagggatgcagggatggatggatggatgaatggaatggaggcaaggaaggaaggagggatgggtggatggagggagggaggaatggatgagtgaggcgtgtggtggggttgacgtgagagggaggactgaacaggggcggaaagatggcggctggagatcacggtgggtggcaggcagggtgtgggtcacaggtgtttggaagcagggcgtgtgataagccagaggaaggagggctgggcggaggtcaatgtgtggctccacagagtgtgaataaagagccagctactgggct

SEQ ID NO: 36894 - DNA, 1209 bp, Artificial sequence
  DNA replication origin
cttctccccaggatcggagaccgcgcccccccagcccctcccacctccacgcccagccacacacacctgcttctgcgccggggcccgtaaccaccacgccgggcgggcgagcgggagtaccggtgtccgtctcgggagcccccacctgagtgccgccggccacggctacgggaccgggaatagcgccgggagcgggagcgggagcgggaccaggagcgggaccgggagcgggcgtggcggccggaacggtagtagcccccaccacggcgagagcgggagctggagcgagagctggagcgggagctggaggtcctcgaggcagaagaggaggaggaggaggaggaggagcggcggctgcaggcggggcacggagggccggtcagcgcaggcctgagccgcggcccccctctgccccgggtaccccccatggtgaccggggcgtagggcgggcggcgtgagcgttaccgaccgggcgctggcattacgtcccggggcggggccgccaggctggggaggtgcggggggcttccctgtggtgactcctgatgctgctgcggcagcagcggctgcggctgcctcctcatcgctgcccccaaaactggtgatgaacgtgatcttctcctcgcggcccggggtcggggagcgggagcgggagcgggactctgagctggactccgagggtgacctgcgggtagggaggaggaggctcactagctcaggctcccggagcctcttcgggaacagcacacacagcagatcaacagcagcgccagcgcgggccacagcgacccgggaaaccaggcgggtggatggagcctggagggcagtggagacccagctctggacaaggacttgactcacaaccatgcagccttcgctaaataaccaggaaggacaatgacacacaactgctctgattttatgtggctatgaaaaatggatgagcaggccgggcgcggtggctcacacctgtaatcccagcactgtgggaggccgaggcaggccgatcacttgagaccaggagtttgagaccagcctggccaacaaggcaaaaccctgtctctacaaaaaatacaaaaaaaatttgccgagcatggtggcgcgcacctgtaattccagctactcaggaggctgagggcacgagaactgcttgaacctgggaggcagaggttgcagtgagtccaggtcacgccactgcacaccagcttg

SEQ ID NO: 36895 - DNA, 1213 bp, Artificial sequence
  DNA replication origin
ctgccgcagcagcatcaggagtcaccacagggaagccccccgcacctccccagcctggcggccccgccccgggacgtaatgccagcgcccggtcggtaacgctcacgccgcccgccctacgccccggtcaccatggggggtacccggggcagaggggggccgcggctcaggcctgcgctgaccggccctccgtgccccgcctgcagccgccgctcctcctcctcctcctcctcctcttctgcctcgaggacctccagctcccgctccagctctcgctccagctcccgctctcgccgtggtgggggctactaccgttccggccgccacgcccgctcccggtcccgctcctggtcccgctcccgctcccgctcccggcgctattcccggtcccgtagccgtggccggcggcactcaggtgggggctcccgagacggacaccggtactcccgctcgcccgcccggcgtggtggttacgggccccggcgcagaagcaggtgtgtgtggctgggcgtggaggtgggaggggctgggggggcgcggtctccgatcctggggagaaggtgctcagagggaggaaacctggccgtccagctcagagaacaccccatctaaggggacaggcacaggccactgctcttccgcaggaagcccttggttggaaagggcaaggcatgggtgtttgcgtgcgcgttctggtggcagtggaggtggatcccagccgctgttttccacgacagggtgtggagaggagactgtgcatctctctctcctcaggagactgtttttgctgtcaggggttccaggtggaggggagtagaaagcgcatggacgctccagggttttctgtagcttgaagggacgggtccgggccttgagggctgggaaaccccttgcggagggggaggggcgcgttcctgtgtggccaggagcggatggggaagcgaagcgggtggaaaaaatcaagacagctctttggcctggcgtggtggctcacacctgtaatcccagcactttgggaggccgaggcaggcggatctcctgagctcaggagttcgagaccaccctgggcaacatggtgaaaccccgtctctactgaaaaaaaaattagctgggtgtggtggcacacgcctgtagtcccagctacttgagaggctgaggcaggagaatcgcttgaaaccgggaagcagaggttgcaatgagctgaaatcgtgcc

SEQ ID NO: 36896 - DNA, 1225 bp, Artificial sequence
  DNA replication origin
gtgcagtggcacaatctcggctcactgcacctcctcctcctgggttcaagtgattctcccgccgcagcctcccaagtagctgggattacaggcatgcgccaccacacctggctaatttttgtatttctagtagagacggggtttcactgtgttggccaggctggtcttgaactcctgacctcatgatccacccacctttgcctcccaaagtgctgggattacaggcgtgagccaccgcgcctggcccttgttttcttaataatgacaacaaatttttattttataaaaacgcaattcaaaaattagccgggtgtggttgtgcacatctgtaatcccagctattcaggaggctgaggcaggagaattgcttgaacccaggaggcagaggttgcagtgagcccagctattgcaccactgcactccagcctgggcgacagagagagactgtctcaaaaaaaaaaaaaaaaaaaaaaaaaagagcccaagcagagtcagcgtgtggcccagaattggcttccaggtcatatattccttgtagcttacccagagcaatgacaggagaaaggcttgggggacaggtgggacctgggcacatcttgcatgccagcctgagagtgggcagtgggtggagagtcccaccagtgtcctgagcagggagaggatggggttccgcatccccagactggaacttgtgggtctgtgctgagactggtggaggacaaggggtggtccccactattgtcgagaccctggacacaagcaggatgaggtggtgggtgagggtgtagatgaggtcaccgtggaacactgttgtgcctgagctggacacggctcataaagggggagccagccatccctcccagagctcacctcccgggaagttagcaagcgggtgtctagtgagggagaggtgacgtgggccaggcagggctcatgatggcaggactgcccttaggctgagtgtatctagagcgccatctctgtagccggagggaggccggaatgccgctctgggacattttggagggagagtagcaggagaggagagtcgagcctgtcaccctgggccttgcaggaaggaggactgtggatccggacccagggtggggtgcggttggggtccctggagcctcacagtcctcctcccgccctgctgcatccccaggagccgctcccactcaggggaccgctacaggcggggcggccggggcctcaggcaccacag

SEQ ID NO: 36897 - DNA, 1243 bp, Artificial sequence
  DNA replication origin
agcaagcgggtgtctagtgagggagaggtgacgtgggccaggcagggctcatgatggcaggactgcccttaggctgagtgtatctagagcgccatctctgtagccggagggaggccggaatgccgctctgggacattttggagggagagtagcaggagaggagagtcgagcctgtcaccctgggccttgcaggaaggaggactgtggatccggacccagggtggggtgcggttggggtccctggagcctcacagtcctcctcccgccctgctgcatccccaggagccgctcccactcaggggaccgctacaggcggggcggccggggcctcaggcaccacagcagtagccgcagccgcagcagctggtccctcagcccgtcccgcagtcgcagcctgactcgcagccgcagccatagccccagccccagccagagccgcagccgcagccgcagccgcagccagagcccctcgccatcacccgcaagagagaagctgaccaggccggccgcgtcccctgctgtgggcgagaagctgaaaaagtgagcggggcgggtctggaggaagagggctgccaatctcgggtggggagggtgaacatcactgttttctttttgaggggaacttagccctaccctgggaggtctggggggtggtgtatggccctggcctgggagggtggatttcagggggacacagccctggcctggggggtctgaggaggacacaccaaatcctggaggatctgcacaattagaaccttgtcctgggtgagggtcagagggggacaggtccctgtcttacaggttctgtggggtctgagagggacatggttgcaccctggggcatctgaggcccatgccttggctacctggtctgagggcagtgctgaggctggggtcagaggtggcagctgccctttccccctcccaaccatgtcctctggccctgcccccacccaggaccgaacctgccgctggtaaagagacaggagctgccaaagtcagtaagaatttggaactcgcccgtctaattcccgtcagcagcagtgcccaagagctgggcccggtgggcctgcaggggggcccgggtgggctgggagatccagccccagggacagggaggggaggggaagggtctgcccctgtgagaaccatgtccctctcccctcctcactgtacactggggctccacctgtcactgaacctctgggagcctcagggctgtccacagcctgcccctcct

SEQ ID NO: 36898 - DNA, 1592 bp, Artificial sequence
  DNA replication origin
ctctccctgaatttcctcccaccatttcgacctgcctcccgccaccgcgacctcctcccagctcttccagcctccaagtgccagtcacctttgctgtttttttggcctggcaagctgttcctgataccccttccccactcacccaccgccatgggtctttctcctgtcccagcctcagtttgcttatctcctaaatggagatacagtcactgtcccacctcacaggctgttgggaggatttgacaagatcaaggccaggcacggaggaggcacccagtagacgtagccattgggttgccaagcctggccactgtgacggagaccatttcaacactcactgtgtgcaggtgccccagtgcggcaggaaatgatgggactatcctgcctccctctgttccccaggctttcctaggaaggggctgggattccagtcagccccgccagctggggtccctctgaacctggggctccctttccaagcggggattggtggcagtaccggcccccttggtttactgtcttcctcggagtagggtgttggaagcacctgccctccctgagttcagtgtgtccagtgttcccggccagatgctcatgccatgccttcgcagggagcgggaacgccgagagaaggagagagaagagtgggaacgccagtacagccggcagagccgctcaccctccccccgatacagtgagtgtccccaccaggctgcagggctctggggctttaaagaaaagtgtcaagcagggttaccaaaaaaaccatagtacagccgggcgcggtggctcacgcctgtaatcccagcactttgggaggctgaggtgggtggatcaatcacctgaggtcaggagttcgagaccagcctgaccaacatggtgacacacatacgtacacacacacacacacagattgctttagtcacaaggtgattgcagcaattagaagtgctcattccggcatgggctggtgaggggcacagatggcagccactggactctctggaaatgtcccctcatttggagacaacccctgaagttcagttttgaggacctcaccccaggtcaaggaagaggccctggccctggatgtttgctcgctcttcacctgttgttttctttccaggtcgagaatacagctcttctcgaaggtaaggaagcccatgaccctccactttcttggaagtaacacttgtcctttgatgggaggtcctggctgtcattcctccagcctcaccctgtacccacctccagttggaggggctggtctcatcccttggggaacatccttccctccacagacaagtgccccgatcactgaagcatccacggccccaggtgtgttgatgtgtgtatgccccatcctcacggcccctccctttctctttccaggcgctcaaggtcccgatcccgaagcccccattaccgacattaggcagaagagtggggggtggggaggacaagggggtgggtaaggggctcaagctgtgatgctgctggttttatctctagtgaaataaagtcaaaagttatttaattcccgtcacctgtctcagtgtcatctgtgtggttggtgcagggctctcccaccc

SEQ ID NO: 36899 - DNA, 1111 bp, Artificial sequence
  DNA replication origin
aagggggtgggtaaggggctcaagctgtgatgctgctggttttatctctagtgaaataaagtcaaaagttatttaattcccgtcacctgtctcagtgtcatctgtgtggttggtgcagggctctcccaccccagggcccatgggccagcagagccagctgggagggcgcttgggtttacaggccagatgccagtgctgcctgtgtgggacatcttgcccccatctgatggctaagtggcaggcccctgttcatcagaacctgccatggctcagtgaggcctgctcaggaggccagggcacagtcccaagggagagggcccagacctgcccgcagatgtggacatagggtgtcggcccagcatgtcccacatgggcccctttgcccagggcctctggcgacaggtccgggcctctccccgccctcgcctcagcccctgccctggcctcgcccgcactaggaactgggagcgcagctttctgtgccagtcctgctgcgccccaggcactgggggctggccgttccctcaccccctcactccaaaccggtctgtccagccgtccaccccacggaggggaagcctcctgccccacctcatgcaccccaagaaagccagagtccagacgggtgtaaataaaagggaaaatttacttggagaaggcgggcaaaaacgaggaggtcaatgggtgttggcagcggtaccagggacagtgaggggggctttcctgggctcaggcctcgccggccgcctcagggtgcttctgccgcaggtgtttgtccagggtggctcgcaggccgaagggcacatggcagtgggggcactcgaagcgggtgctgccaggcgtcatgccgtgcatgcggcggtggcggttgagcttactgctctgggcgcaggcgtagttgcagaactcacaggtgtaggggcgctccccggtgtgtgagcgccggtgcaccgtcaggttgctgctgttggtaaaatgcttcccgcagaactcacagctgcccccgggcccgcggctcttgccccctgacttgggcatctttttgggtgatgccttctggctgtttgcagggtcagttctttgttccgtggtgatggctccccaagtgtct

SEQ ID NO: 36900 - DNA, 1570 bp, Artificial sequence
  DNA replication origin
gcccctcaggcccccttctgaccttcggtttcccctctccttcagcaccctcagcccccatcctggccccaccccacgctcaccacccgcttcctccctgcagaccgccagccctggaccgacaaacacccagatctgttgacctgcggccgctgcctgcagaccttcccgttggaggccatcactgccttcatggaccacaagaagctgggctgtcagctcttcagaggccccagccgcggccagggctcaggtgagtaaagccgggtgcagtccccctctcaagttcgagggctgggcttcctgctggaaaggggctgggctggacggcagggcactgagcactacttcccctttctcgctccccatcgggtgcagcctaggcgtggccagggcctgcccgtcctagggcagggaccagtggtggcggtggagggggggcggggggggactgggcagggaaggagggccgcctacagggtgtggccagccccagaagactagcccgggattttgccccccccaacacacaccccaacctggtttcacttctccttccccttggccagaaataactggccaggtggctggaccagggtggcagtaggaggggacctctagggagggcagcggccggggggagggggagtggaggccagctggaatggggaggttgccaccccctcctgtctctctctgtcaattctgattgaggtgctagtacagctgagtgttcagagccaaggaaggggcttctggcttccctcggtgatggaatctcccagccccgcgtgctgggaatcccctggtttgagcgagctcccgggtgctggacacccgggttccttctcttgggagggaattaaaagccttcacatggggcttgaccctcggtgagcttttggtcagtgttggctgcagggcttaatccaaacctagtttccagccccctggcccttgcccttctgagacttttgagaagtggaattatttagggttgggccagggagggtctggtggtgggaaagaggaggggcttgtgactgattgaatcagctttagagctggagcatggagagtggcctggaggagcgagcgaggggctgtgatggaatcgctggaacaaaacactacagggcttggagaatcatgggcaccttggtttcacaggctctgctgtttgagcgcttatgtggaccaaagctctcaaccattccccaagcgaggtcacaaccacccttgaaagggaggggatctctagggtccctgaattctagcaactgaggcacacagaggactatgtcttgcccaaggtcacacaattagggagcagagaagtctgaatttgaatgcaggcctgtgctcttgacccaggactggttgtatcacaaaggttgtcccatccaagactctagaatttgaaaaatggaaaggctagttcacctaggaagtgtccactgagagtaccccgaaggtccagatagaaatccaaattcaggtttgggggctcaatttgagatccatgcagagggtgggggacccaggtcactaccacctctttactaggtgg

SEQ ID NO: 36901 - DNA, 1020 bp, Artificial sequence
  DNA replication origin
ggcttttaattccctcccaagagaaggaacccgggtgtccagcacccgggagctcgctcaaaccaggggattcccagcacgcggggctgggagattccatcaccgagggaagccagaagccccttccttggctctgaacactcagctgtactagcacctcaatcagaattgacagagagagacaggagggggtggcaacctccccattccagctggcctccactccccctccccccggccgctgccctccctagaggtcccctcctactgccaccctggtccagccacctggccagttatttctggccaaggggaaggagaagtgaaaccaggttggggtgtgtgttggggggggcaaaatcccgggctagtcttctggggctggccacaccctgtaggcggccctccttccctgcccagtccccccccgccccccctccaccgccaccactggtccctgccctaggacgggcaggccctggccacgcctaggctgcacccgatggggagcgagaaaggggaagtagtgctcagtgccctgccgtccagcccagcccctttccagcaggaagcccagccctcgaacttgagagggggactgcacccggctttactcacctgagccctggccgcggctggggcctctgaagagctgacagcccagcttcttgtggtccatgaaggcagtgatggcctccaacgggaaggtctgcaggcagcggccgcaggtcaacagatctgggtgtttgtcggtccagggctggcggtctgcagggaggaagcgggtggtgagcgtggggtggggccaggatgggggctgagggtgctgaaggagaggggaaaccgaaggtcagaagggggcctgaggggcaggacggggcgaaggagataaggcagggcgaggggcccatgcccaaagggaagggtcccacccgagggtcaaaggtaagggaggctgggcccagggcccggggtgctcaccgggatagttcggggtcaacggcgtccacagggtccacg

SEQ ID NO: 36902 - DNA, 1723 bp, Artificial sequence
  DNA replication origin
taaaaatagaaaaattagccgggcatctgtaatcccagctactccggaggctcaggcaggagaatcacttgaacccgggaggcggaggttgcagtgagctgaggtcgtgccactgcactccagcctgggcaacaagagtgaaactccatctcaaaaaaaaaaaaaaaaaaaaagagtaaaataagggcaatgggatagtgggtggctgggttgccatggaacttaaaattgggtggtctgaggctgagtgcagtgtctcacacctgtaatctcagcactttgggatgctgaagcaggaggagcgcttcaagccaagagtttcagaccaaccagggcaacaaagcgagtccctgtctctatttaaaaataattttttttgaaaaattaaaaattacaaaaaaaaaaagggtgatcagaggaggcggcagtgaagaagaaaccacctcagataaccctctagttccaacctgccctacctcctttgacagatggagaaagtgagatccaagagggaactggggacagatggaggtcatggagtgtaatttgcaaggccttcagcagggtggggctactttagatactgttggtcagggccctctgctctcaggaggacaatggaacccagacctgaataacaatgtgcagaactccaagagatcagcatctgaaatcagcatctgggctgaggacagctgggggaggacaggttcttgccctgacctcagggggcttgcattgggtgggggagaggacagtccacaagccgttctatactgtcgtgcagtcggtgccaggaagaaaagaatactcatcagggattgagggtggggcagggtgtcgatgccacttcaaacagtgagcagacagaactgcttaggggagggaagttcaaggaggcggagtggaggcaggtgagctgcttggctatttggttttaatggcgacttctggtctaggaacagagtcgatgtgtatgattacagtcctcctctgctcaaaaccctcctaaggctccggtctcaggaaaaccaaaagaccttaaagcgatcaaaagattgcttggatctgcccccatattttcactgaactcaatccccaacccgtattgcctctccctttccttgtaattcctcaatgcccaggcccactggctgggcttccttccctccagcctcagctccaccatgccctttcccatcataggggagaaaattgaatccctcaaccccagtaaccctctccgcctttccagctttcttttgctccatggcactggtcatcatgaagggccatctatattttacgtaattatgtttatagtgtcttcccccaccgtctgaactccgtgcaaacaaagattatcttctgtttattccctcctgtattctcagggcttcaaacagagcctggcgcacaggaggcactcagtgaatgcttgcaaaatgaatttttattgtaatgcatttaatgaaatagcccagattactatcaggcacctaataagaaacgtgaccgactatttttctcgcttgggggtgcgtgtgggcatgccgtgtctcagtttcacccgccctaaaacgggatcagggatagctgtttcaatgccttgtgggaactcggtgtgattaaatttggtcactaagccaaacgcacgggacactgcctagattgagttaggccgccgtcagggccccagcagggcggctcggtcccctcccat

SEQ ID NO: 36903 - DNA, 1148 bp, Artificial sequence
  DNA replication origin
cgtggggcagtggcggcggcgcgggcggaacccaggctccgcggcttgcggcctgcccgggcctctgcagcgggggcgccggcggaagtggggacaccagtagccgcggacctcggtgagtacaaggtggtggggggtcgccagcaggttccctctccccggccccagctctggacgctcaccccagtgcaacgccctgagtgacggaaagaggtaggaccgcgcctgcagcgccggctggagggacgttctggtccccagacgctcctatcagggactgtttgatcccgatcgccggcagcgggaatgccccacgcgggtggggtgaggagaagggagaaggagaaaaacttcccctccggaaaataataaatggccacgataacagaagcatcggtggcagtcatcccgctttacctggagcggaatcgctcgctcagtctgagcctggaggtgggaagaaggtccagtccgaacgcccagggcggtgtggggagtggacgcctgggggccgggaggacctacttagtataagaaaaggagagcaatgggtggtcagggcggaattgaaaggaaactgaccggccccaggggagaaggggaggggagagattctgtgcttggggttctgaccctctcgggtggccccatttagctaatttgcatcaagattcagcagccgatgatgtctgtatgtgtgtgtgtgtctgtggacacgtcaacaccttggttaattaattaggtctggcggcttctctgttgacaactcagctggttccacaccctggcaattgtgaagagttggccaaatgtttgtccactgagctgatctcctctctggagcaccggggccaccaggagggaggtctgtgaaacccctgcccctgccattgacctaagtgttgggctcttgaatctaacagactagtttttcaagtcgtgggggatgggcttgggcatttttccctgaaaccttcggaaatccttgccttggagactgaaaggataaaggcctctggggccaggtcaccagggacaatggataacgcctgcctctaccctcctgggcacaccctgtgtgatctttcttaaaccagtttcttatcaggtcacaccttggctccacagtctgcctttctacatggggc

SEQ ID NO: 36904 - DNA, 802 bp, Artificial sequence
  DNA replication origin
cgcttgagcctggtaggtggaggctgcagtgagccataactgtgccactgtactccagcctgggtgacagagtatgagaccctgtctcaaaaaaaaaaaaattcactcatccacattatctagcattgttagcacatcatctgagtgcctgctctgtgcatgacccacattgggcggtcttggaaacacgtctaggactgagagcccagttccgcctttgtgggctcacagtccaataggggacacagacctgtccttaggcagtgatgacccaaagtgagtagggctggaatgaaggagtccagaggagacacctgacccagcctgggggatagagggtagtttcaagggagcccaggaaagatccctatgataagattacgtttgagcatagacctgaatgaaattaggaatggagccatgtggagattccagtcagaaggaagagcaaaatgcaaagatcatggaaagggtggctttggggcgtagcaaggccagtgtggaggaggtgggggcagggacagagagagtgccttgtgggctgtgatgacaatttgggtctctactctgagactgaagccactggacagttctgagtgaaggatgggcagaatctggcttaaggtcctcaggatcctctgcctgctgcatggacaataaacgagattgaagggagacactaggaacgcaatgaggaggtcactgtagtggtccaggtggaagaagatggcgtctagtatgggctggggacaatgggaatggggagaagtggtcagattaggctatgtttgaaaggtcgagg

SEQ ID NO: 36905 - DNA, 1144 bp, Artificial sequence
  DNA replication origin
cgccagcctcgagcgaaagtgtgactgcgaacgggcaggcgcgcgcggggctcggcggaggcgcgcttgggctcccggcggcgacgactacgaccactaggagagcggacggaggcggcgcctgaagcggcggcggagcccatgccccgggacggcgggcggacccggagagacaaatccggggcccggggcatgtccccggggcccccgtgaggaggcggcggcggctatggagatcgcgccgcaggaggcgccgcccgtgccgggcgcggacggcgacattgaagaggccccagctgaggccgggtctcccagccccgcgtcgccccccgccgatgggcgcctcaaggctgcagccaagcgcgtcacattcccgtccgacgaggatatcgtgtctggagcagtggagcccaaagacccctggagacatggtagctaccgcgggtgaagcgggggcgggctcgagagggacccgggagtcgggagggatcggtgcagggcccggctcgaggtggcgttcaatagattgcacctaatggtgaataaggggacagtcgtcagtttagaaccgtagtctgttagaaagggggtggctatggagttgggaaggtgaaaagtatctggtttctgccgcaccccacccacccgagacaaagatggtgatcgttttagggtttaaaacgatgagcaattaaagaaagtttggtgttttgtcagatgtagagtgtggcagcctttgcgttcgtagttccaccagagaaggagagaaggagcagttgagaggaggagcgggtcaacactgggcctgaaagggcagttgaaagagtttgatgggtctatgggggtaaaaagaggttaagttgctggtctgcaagccttggggcaaggagtggtcgtgttggccactttcttggctggaaagagggagactataaacttggactgtggctatagaggacttggtaaaaaggagtcaagataaggtcccagaagaggagcagaggtggtggtcaatttgtggttgggtgagggagaaagaggcagtgtggtttttatgttttcttttttattgagacaaggtctcactacattgcccaggctggtctcggacttctgggttcaagctgtcctccctccttggcct

SEQ ID NO: 36906 - DNA, 1200 bp, Artificial sequence
  DNA replication origin
ttaagacagtgttggtcatcttgggctggtgtggaggagttcatgcatggggtggggcctggatgtggctgcttcagaggcttccaggagaggggagagatggcagtcaatgcgtgggcctggagtgaggtgcgagggggaagatggtcagtttgtgggctgaagggtcaggggtgagggcagcaagagagtctggcacagattgggctttggggggtaaagtttctggtctgcagattcccagaacaggtttggctttcattcagtaagccacttttcctctccaagcctctgtttctttctctgcaaatggaggtgctaatttttaccatggggtagttgtgaagatgaagtaagatagtcctcataaatttctgccacataaatagcagctgtcatccaggcagatttgttttttgtttgtttgtttgttttcacgtgcagtcttgaagaggcagtgaaagaactggagaggcagaaggctatctgtcaagaaaagaggggcagttggagcctggctgggaggagtttagaggaggggtgccggttggtctgtcctgggtaaggggtagagtgggtaacactctccaggctgggggagtctctcattccagcggttgagagaggggcagtaaggtctggttgggactcacactctcgaggagtccgtgcgtctgagctgcagaggtgatgacatggactggactggaagaattggtccatcctgtttgggaagagggcttgaggagttggcttggcagtgaggagttggatgatcttgggcctgggcaggggaggggtcattggtgaagttggtgagtttggacaaagggatttgcaggacagaaaacccaagggcctgggaacagcaaggagcaggggttaggctccatgctggggaggacgatggagtggttcactggccatggggctgtgggaggtggagggttcgccagggtgaagaggaatcgtggtacagaaagtgggtctaaggggaggcccaagtgagaggcccagagggtctggggctggaggactgcagggaggggttgcttggtcttggaacagaggtaggagatttgttggcatcaatctcataagctgtggggagggacagggggtgtcatttgagctgtggatctagtggaagggtggcgtgaccccaaggccaaggggtaacagaagagctgacaggtctga

SEQ ID NO: 36907 - DNA, 1398 bp, Artificial sequence
  DNA replication origin
ctcacagcgacagacaccacagtgacgtccctagactcagggagcccttggtctaggacagaaaacgagcaagtagatccttagagattgggacgtgtccagtgaggaggcagagtgttgtctgggtgtggtgtgggggatggggatgggggtgctgctacagaaaggggtcaggagaggcttctcagaggaggtgactttttttttttttttttttgagacagagtttcgctctttttgcccaggctggagtgcagtggcacgatcttggctcactgcagcctccatctcccagctcaagcgattctcctgtctcagcctcccaagtatctgggactacaggcacgtgtcaccacacccggctaatttttgtatttttagtagagatggggtttcaccatattggtcaggctggtctcgaactcctgacctcaagtgatgcacccgcctcagcctcccaaagtgctgggattacaggtgtgagccattgcgcctggccaggaggtgactttcgagttgagatctgaatggcaagtcagctgcggcttaagctgcaggaggggagggaagctgtcagagggagggaagagcagttgcagacccggaggcgggaacaaaccacaaagcctgtagagtggctgaggaggcgtgggcgagccgagggtgagccccggtggagtgctggcatcagggggccttgtcctgggctgaggagttgaggttttactctcagtgcagggacaggtggtgccgagtgaaagcctgtggcagcaaccagcccgctcctgcacggtctcctaagctaattgtgcgcctgctttgggtctgaatggcggggactgcacaggacgtgggttttccttctacggtgggaggtgatctcagggagtctccctgcaggtccccaccaggtcttctgtgtgcctaccatgggcatgcagttctgaagcgctgactggtggtgggaaacctagcctggagattgtcccagccatcccacccaaggcagggacaggccagtggggctacccgagcaaaggcttagggcagctggtagaccgggctgcaagaatgaggccgcagagttagtcttagagtagcacctggcaggaggctggctccgtaagccagtgctcgtccttggcattgttgactcagtggctcagctgatgagcccgaggctgctggggaaggtgtcctcctcagccttacagctccagcccccgcgtgatccgcgtttctcaggcctctgggttactgagaggctgttgggggtggaggtgcccagcggttgttcactgggaagaagaactcaccaccagcgtcccttcatttttcccaaggagtcacaggcagaggtttttccgaacaggctcagcagccagaagtccccgcctg

SEQ ID NO: 36908 - DNA, 1151 bp, Artificial sequence
  DNA replication origin
cctcttgccctgcaagaggccccgcccttgcgccacccctcagcctttgtctaggggaccccctcctcctgcagtgtcctctccccacccaaacctcgaaggggcccgggagctcagggagccaagtgggcggtggcagggccgctcacatcttcatccaggtttgtctgctccaggtccacgaccttgaactgcagcctcttgaagacctcttccagggcctcacaggtcttgtagtcaagcttctcacctggggggagacagcagccgtgcgcatgtctaagacagtgcacctttgcatggctggaagggccctctgcccccaacctcccaccccccaccaggcccagcccctgccctggctgagctcagctccagaagccgctaaccccaggcaggtcctcagacccagctctagggagcccccgacctgcccatgacccaagggctctcaacccctagccagacacacacctttcaggtccagacagtcgaggcggtgcccgaggtctgtgaattcctgagaaagtagagtggggttaaggcaggaagacacttgaacaggggggcagccgaggccccaaatggctgctatgcctgaggtcaggcagggttctggggtggggtttgggcgaaggcactgaacagaggctcagaggccacccaccagctggaacctggggtacagggccttagacagcgagagaactctgcacccacacaactgaggaccagccagcactgcagccaggcaggcctgggcgaagccctctgccccagcgggaccgagtgagggagtgggcccagcatctctgggtatgtcccagcagaggagggagtctgtgcaaaggctgtgaggcaggaaatgagcctgggaagatggcaaggctgggcacaggaggcttcttggtgaaggcagggcctggggcccagcacccagtcagaacccaccgtcccgcagatgccagcacccgcgctctgagcttacacacatcacctgcagggtgggtgctgcagggctggtctgaaccaggccgatggggtccaaggacccaccctctcagctgccacactgagcagccacccttcctgggacctgacaagcccctcttctggaatgttccagagaacctaccctaactccagtgaac

SEQ ID NO: 36909 - DNA, 2131 bp, Artificial sequence
  DNA replication origin
agcgttggggtggtcttggccatgtctgtgtccccagcaccacctagcgcagggccgggcagagtgggtgctgggtgacgggtgtgggtggggtgggccactgcacccacccgagtctagcacgtggttgttccggaggtccaggatctgcagggagcagttgaacttgagcaggttacccagctgggccgagtcctgcaggccgttgagcttgttgtccgccaggtacagctcccgcaggttcatgttcatcttcagggccgtggctggggacggggagggggcacggtgactgggcaggcccctgccccccaacaggctgcacatcctgctcaccctcccgggcttggggctcaccgagcagcatgaggggccgccccgacaggctggcgttctccaagtgcagcactgccaggctgctgcggatgcgcagggcacgggccacgaagggcgccgagtggtccagcaggggcgtgttgcgggcgtccagatactgcaggcagctcgtctgcaggggcaagaggacaggggtgaggcactggctcaggcctgccccagcactccctggccccaggaccgccccagcactccctggccccaggacctgtgcccccatgtctcaatgagcaacgaagccacagctgtcgtctggctatgtcgccttgttttacaatgggggtaactgtggctggggagggaaggctcagcctggggtcctgtgggtgagcgaggcagggctggtggcagccaggatctccaactcctgtgtggctgggaggttaccagatagccccgtcccgtccctccacccagccttcacacaggagtgacgtggggatggcgaccatggccacctccaaggggatgacattacagaaggatgacattacggaagggagaagttggaggtcatgaaatgcctcgcaaggagagaaggggccagggggcctgggggccaggacacctctcggccctgttctcctggcctgagggccaggcccagcatccccacaacagcccacactcaagagctcatgcagtcagagcctacgggccatgccctgagaaagtgcctccccgtgctgggagcctgagctgcctcttcctggaagccgagaggcgcccaccttgcgcatcatgtgggcggccgcctgccagccccgggtgccgatgtgcttgttgaaggagatgttgaggtgggtggccgactcgtagtactcgatcatgtcgaagagggccgaggcaccctgcgcatagagattcgggggctcagcctcagctctgggctgccctggaggagaggcgtgggccctgacaccgggccccaccgagagacgatgggtccagggtctggagagagccacacgggagaggaggacaagcacagacagggccccgtgagccacggggacaaaccctttccttctctgctgtagtcagttttgttttctgtcacttgccctccaaagtccttgactgacgtgctgagtgaccaggacaggccttggtgttcctgagcctgggcctcagttctccaggtcccctgcccctggatcccgacacctggggtgcctggggactcccaaggctgaggaggtgagggcccttgggccttgatgggaggctgctctcagaatgcttcccaagcccaccctgtaggagctggaccctccagcgtggttcctgaaagggctcctgggggccacacgcctgcccctcagcccagctccctaaggctctccttgcttatgagggtgggccataggtgccccaacgcgccctccacatccactctggtcatattggatgtctccctcttgccctgcaagaggccccgcccttgcgccacccctcagcctttgtctaggggaccccctcctcctgcagtgtcctctccccacccaaacctcgaaggggcccgggagctcagggagccaagtgggcggtggcagggccgctcacatcttcatccaggtttgtctgctccaggtccacgaccttgaactgcagcctcttgaagacctcttccagggcctcacaggtcttgtagtcaagcttctcacctggggggagacagcagccgtgcgcatgtctaagacagtgcacctttgcatggctggaagggccctct

SEQ ID NO: 36910 - DNA, 1218 bp, Artificial sequence
  DNA replication origin
cgccagcctgtcggggcggcccctcatgctgctcggtgagccccaagcccgggagggtgagcaggatgtgcagcctgttggggggcaggggcctgcccagtcaccgtgccccctccccgtccccagccacggccctgaagatgaacatgaacctgcgggagctgtacctggcggacaacaagctcaacggcctgcaggactcggcccagctgggtaacctgctcaagttcaactgctccctgcagatcctggacctccggaacaaccacgtgctagactcgggtgggtgcagtggcccaccccacccacacccgtcacccagcacccactctgcccggccctgcgctaggtggtgctggggacacagacatggccaagaccaccccaacgctgtcctgctggggctcccaggaggaagacagacccgccctagacagtgacaacctagagtgggcaggactgggctggtggagcccagaggcggggtccgatcagtctgggggccagggagggcttccaggaggaggagacagctcagctgacagccgcaggatgaggcgaagtgaataattacaatctgaaaagaaagcagtgttgctgccataacagggtcagctagaggctgctttcagatgggagaggagggaagaccaccgtggggcggggcctctgggcttccatccggaggctgggagcagaaccagccttgtgagaagcctgggaaagggtccagaccgcgggagcagtgagtgcagtgggaggagctctggtgtttgatgctgggggttgagcagagaatggggagccgtcaaaggaggcgttcctgttgcatcctggaggggtggggtgggtcactgtgtccccaggtggcaggcccagaccccactctactgagcacctgccaagggccatggctgtcggcccctgggctcagctcggagggagacacagggctctgcccttgggagtttgtactccagtctagagagacaacgataagatgagtgaaatctccagcctgtcagatggtgggatctgcattggagggagacagtggtgactgtgggtgggagtgagctggctgtgaggtgaggtgggccagaggtggtcacatttgagcaaagatcagaagcatctggtggaggctgtcatccaggcacccaggcccaggggtcacagatgtgtgcccaggggtgccaggccgaggcagggctgcag

SEQ ID NO: 36911 - DNA, 2024 bp, Artificial sequence
  DNA replication origin
tggcggtggtctcaggcatggaggccgacagctgtggcggctgctccttctcctccctctcccgcgccagcaccaagttgcgcttgcagccgttctggatctcggccagcagcgccttctgcgtctcgatgaagctcttcacctgtggcgggagcgcctggctagggctctcaggccggccccaccacccggccttccgcccgccccagggctgcaggaccgtcccctgctcaccgcctctttcttgggttcacggtcgaggtccaggcgcagcagtgagtggttcaccttgagggccaacgacagtgccatgagcccgcctgtcttgatctcgttctcccgaaggtccagtctcaggaggcgggggctctcagcgatgaactccgccaccgccaccgcgcctgggggggcaccgcaggggctggccacgggccccacacccggctggccgcccggctgagcccaccagcccgcaccctggcccggccccgtaccctaccctcgcacgtgagcttggtggaggccagcccgaggcgcagcacgctgcggttgctgatgagcccgttcttgaggtgccgcacaccctcgttcccgatggggttgtggcccaggttcagcgtctccaggctctgagtgtgcggctggagggagggggtgtgagggtgaggaggaggccgtgatggcggaggagacccaggaggccaagtcaggaaagaagccgggaagagagccaggcccgggcgctccttttctttcgcgcgcctgcgtgaacaccggcgccgtcctgccctgccgcaggcctggcctgaagtccctcctgtgcctgaagtctccccaaatgccaggtcccccgtccactcccagctccccaggcacccagtcagtccctaccccccacagcctgggcccctggccagggcctggaccttgagcgccctgaagcccccaaggagggcaactcttatcccggggtttgagcacacgagtgctcgccctgagagtctctgtacctgagtggcttgctttaagcaccacataaaaactgaaaaccaggcacggtgactcactcataatcccaatactttcggaggccgaggtgggggggatcactcgaggtcaggagttcaagaccggcctggccaacatggtgaaaccccgtctgtactaaaaatacaaaaattaggccgggcgcggtggctcacgcgtgtaatcccagcactttgggaggccgaggagggtggatcacaaggtcagattgcgaccatcctggctaacatggtgaaatcccctctctactaaaaaaatacaaaaaaattagctgggtgtggtggtgggtgcctgtagttccaactactcgggaggctgaggcaggacaatggtgtgaacccaggaggtggggcttgcagtgagcggagatcgagccactgcactccagcctgggcgattgaggctccgtctcaaaaaaaataaaaataaaaaataaaaaaattggctaggcggggtggcgggcacctgtagtcccagctacttgggaggctgaggcagaagaatggcttgaacccaggaggcgggggctggagtggctgcagtgagcctagatggcgccactgcactccagcctgggtgacaggatgagactcggtctcaaaaaaaaaaaggagataatgaaagaagggctcctcctcagggaaaacaggcacagaagctgaatgaggaagcaggtggggctgagtttaaatcgtcttgaacctgcaggatgggcaggacaggagccgtcagctagaggcaactgtgctgagagctggagtgggaggtggcagcggggaccgaggtgcctcccttccctgccagcctgactcaccagtgtcatgcccaggaaggccatgcctgtgtgcgtgagctggttgttccacagcaccagggtcaccagccccttcctctgctccttgaggccctcgcagatgtaggccagacctggaggaggccggcagtcagagccctgtctggggtccgggtgcttcctg

SEQ ID NO: 36912 - DNA, 1120 bp, Artificial sequence
  DNA replication origin
ccaggctgtggggggtagggactgactgggtgcctggggagctgggagtggacgggggacctggcatttggggagacttcaggcacaggagggacttcaggccaggcctgcggcagggcaggacggcgccggtgttcacgcaggcgcgcgaaagaaaaggagcgcccgggcctggctctcttcccggcttctttcctgacttggcctcctgggtctcctccgccatcacggcctcctcctcaccctcacaccccctccctccagccgcacactcagagcctggagacgctgaacctgggccacaaccccatcgggaacgagggtgtgcggcacctcaagaacgggctcatcagcaaccgcagcgtgctgcgcctcgggctggcctccaccaagctcacgtgcgagggtagggtacggggccgggccagggtgcgggctggtgggctcagccgggcggccagccgggtgtggggcccgtggccagcccctgcggtgcccccccaggcgcggtggcggtggcggagttcatcgctgagagcccccgcctcctgagactggaccttcgggagaacgagatcaagacaggcgggctcatggcactgtcgttggccctcaaggtgaaccactcactgctgcgcctggacctcgaccgtgaacccaagaaagaggcggtgagcaggggacggtcctgcagccctggggcgggcggaaggccgggtggtggggccggcctgagagccctagccaggcgctcccgccacaggtgaagagcttcatcgagacgcagaaggcgctgctggccgagatccagaacggctgcaagcgcaacttggtgctggcgcgggagagggaggagaaggagcagccgccacagctgtcggcctccatgcctgagaccaccgccaccgagccccagcccgacgacgagcccgccgctggggtgcagaacggggcccccagccccgcacccagcccggactcagactcagactcggactcggatggggaggaagaggaggaagaggaaggggagagggacgagaccccctgtcctgccctggtgccccccacggactccctgggccctggggacaggagtcccccaggcagcccctccaca

SEQ ID NO: 36913 - DNA, 1258 bp, Artificial sequence
  DNA replication origin
gggcccccagccccgcacccagcccggactcagactcagactcggactcggatggggaggaagaggaggaagaggaaggggagagggacgagaccccctgtcctgccctggtgccccccacggactccctgggccctggggacaggagtcccccaggcagcccctccacacccaccgagcagcggatttccgtgtccagcccgggccggggccacaaggtgtttgtggtgacccgggtggagagcccgcccgagagggcagagccccctgcgtcccccacccctccctctcccccaccccctccctccccacccgcctcaccttccctaccaccagccggggccattgacacccgggacacagggtcctctgagcctcagccaccaccggagccgcctcggtcagggccaccactgcccaacggcctgaagcccgagttcgccctggcactgccccctgagccgcccccggggcctgaggtcaaggggggcagctgcggcctggagcacggtgagaggggccctagggcaggtgttgaggggccctgggtgctgtatgtgaccccaggcaagcccctgcctgttgtggacctcagtttccccctctttaaaatggttctcgcaggggccagcaaagtggggcttagttctcatctccaccctgcttcccttgggtcctgggagctcttcctggggtgggggggcatgtaaggtgtgctgccttgagcctgaccatctcagcggtctctgggcactctgcaggccctgagggtctggctggggccgggctggggacaggttgtatttgccccacccgcctgacgggggtgctggcccgtcctcccacacagaactgagctgctccaagaacgagaaggagctcgaggagctgcttctggaagccagtcaggaatccgggcaggagacactgtgacactttaggtgaggccaggcccggggcccacagcactcgggaggagctgagagagcctctggctctgacagtctctcccccaatctctcctccccaagttccctttttccggtcggtctgcgatgagctgaggccagagccatgagaatctgctcaccttccccccagccttcctgaggcccaggatgccaggggtgggggccattctggggcccccctccccccacagcaacactacaaggggtgcaggagctacagggagtggccctccgcgcgtgactcaagcacttctatttatgagcccagcactggaagactctggggg

SEQ ID NO: 36914 - DNA, 1219 bp, Artificial sequence
  DNA replication origin
ctccaagaacgagaaggagctcgaggagctgcttctggaagccagtcaggaatccgggcaggagacactgtgacactttaggtgaggccaggcccggggcccacagcactcgggaggagctgagagagcctctggctctgacagtctctcccccaatctctcctccccaagttccctttttccggtcggtctgcgatgagctgaggccagagccatgagaatctgctcaccttccccccagccttcctgaggcccaggatgccaggggtgggggccattctggggcccccctccccccacagcaacactacaaggggtgcaggagctacagggagtggccctccgcgcgtgactcaagcacttctatttatgagcccagcactggaagactctgggggtgaatgggaggagggggagcaggaggaggaggaggtctccaaggacatcaggcgcctgttctggaggggccaggcttgccctgcggagggcaggcgtcctgggtggtggtgggatggtcccctgtggccccgggcacagggccgggcaggcagcctggtgccggagaggcggtgcgtgctggtggtggttgagatgcacagaacagccccagacagcgcaggccgggcagggtggggggatgggagcagaggatcagagctttctttttctcaagtgcaataaatctatcagggagctggggcgggagcagccggcactccgggaccctgctgtccaggccactggaggctgcgccctgagaggcactacagccctttgggggcgagtggcatgggtgtgggtgagggtgggcagagggctggggctactcctgtcggtgcaactctgttcacaccttttctaataaactggggctgggttcactttgcccaacgtctgcttcgtgcggatcctggaggtggttgctgggggtgggctgggtggaggccatcacagctcctggttacagagcatctgccagggcactggtcaggcattactgcgtcttcccccacagtcccgtctattctgcatccatgctctggtgtctcgtacggtcacctcccagccaggcgagtttacacccatcctttctgcagggagagacaggccccagatacctcctggcttcaggtctagggtctcaggatgctggatatggagtggctctgcccagtcgcccatcgctcaacaggaacagatcccagcctgtccctggcag

SEQ ID NO: 36915 - DNA, 2219 bp, Artificial sequence
  DNA replication origin
gcgccaggcggtggcgtgggtggtgctcgccaaccagtggccgtgccgcctgagctgggcgctgcagtgcctggaggaccggcagcagaccgggggcgcgcccgagggccgcgcgcgcctctgggacgttttccgcgacaacagccgcgagctgcacaccatgaccaaggcgttgcagaacgtgctcgacctggacggcgaccccgagctcttcgagcgcttcctgggcgccgacttccccttcaccgtggccgaggcgcagagcctgctgcgctgcacggtcaacctggaccactccatccgccggcgcatgggtctcatccgagccgtcagcgcgctcaagccgcccagcccgcccaagtcccctacccgcgataccccccacgctgcccaccgggccaacagcgcctccagggcgcccccgtcgggccgtgcctcagggcaagccggcgaaggccaccacactggggacttggcccacaggggcaagctatggccggtggcctgtgcgctcttccgtccagggcaatccagcccaggtgggccttaaatggaggacttggcgggcagcaggaggcaagggttcctccatctgcccagatgggagaatagggggctggactggggccgcaacccagggtccgaatgagccctgtgaggcccacacccccaggtgaacctgagccagagccgtggacatagcttccaaggagtgcggccacaagccggtgccagcatgagagcaggcacagaaggaccagtgaggaagtcagggtatacatgcaataaatggaggtgttgagagcccggagttgctctccgcatcctgatctgaccagggaccaggcctgccccgtcctgccacagggcctgccccatcctgctaagcccacttactcctctgcaccatgctggcctcctcatctggcatctctgtggcaggagaggctgcgggggtggtgggtgaggctgcagagatgacaggtggatgggccaggttgactcaggcaacatggagcgcccaggcctcagggaatcccagtccttgtccccatgccctagcttgcccctctgtgagtagggcaggggctggcatttctgaggatgacctcggtgacctcagcaagctgctccacccctagggtggctccattctcaacgtaatgggttagacctcgctggcacctcagccagctggagtgggtggcactaacctcccccagacaaataactgtccacagggtacctgccttacgagtcactccagggccactggttagtcactgacactgaagccactgcatcagccccctgatgaggacagggaagttgggcagagatggggacatacagggcccaagccacagccagccaggaggggttacactagggctcccccactttccctctgggcagagccctgggctgggggtgggtgtcactcctctgggcagttcctgattcctcactggtcaaatgttcagccacacgctcaggccctggggtgcctggcccagttccaagtgtgtgccggcaggggccacaagggccaacactgaacataccctgggatgaggctgagggtgtggcttctgagccagggccctgaggctggtggaggggacagcccccgaggaacctgagagctctgcaaaggcacacaccctcaggccatgggactgggtcactgacctcacagttctttagttccaaggctgggcatagcatccaggtctggctgcagcaccggagttctctggccacagcaattgtcacaggtgcatgcaggtcagtgggagccctctatgatcttccctggggctgggcaagcagaggtgctgtttcccattcctggactgactaagctggtaggatacgcctggacctcctgggagctgtttcccagcagtcagggagagctggcctcagagggagaaggatggggcctcgtgacaccgttaagtctgtttctgtagatgtgtggttggggtcaatatatccctgtagcctcccttaagccagtttcagttgggtttgtttcttaccacctggaatccaagctgaaaataaattttcactcctgttaccaggagtggggtgctgtgagagatgctaacgtgtagacttggctggaggtgagggcaggactgaagccccccatgcctcagtaagaagctgcatcagcctggccaacatggtgaagccctgtctctaataaa

SEQ ID NO: 36916 - DNA, 1016 bp, Artificial sequence
  DNA replication origin
gctcccgggctcccttcccgcagcgctgatgcagcaggaggccgcgcagcgcgagagcgaggagctgcagcacgtgcagtggcggccgcgtgccgtgagcggctggggcgtcccgcagctactgtggtacctggtgttcctgcagcccatcatcaccgaggtgcacctgcggcgcaggaacgtgcagttccttttcatccgctttagcgcctggcagtacgcgggcaccgacaagctgtgggccggcctggtgaccacgttgtgcgagggcatccgccgccactatggcgcactgcccttcagcgtgtactcggtgctgggcaacaagccggccaccaggcaggactgctgccagagcgagtggcattgtcggcgccgcgtgtgcctggggctgctggcgctgctggcggcgctgggcctgggtgtggggctgctctacttgtcactgggcggccacgcgctgggccacggcagcccgagcggcagcctgctcaaggtgtttggcggcgcggccaccacactgtcgggctcggggctgctcatggccgtgtactcggtgggcaagcacctgttcgtaagccagcgcaagaagatcgagcggctggtgtcgcgtgaaaagttcggcagccagctgggtttcatgtgcgaggtgaagaaggaggtggagctgctcaccgacttcctgtgcttcctggagatctaccagcggcgcaggctgcgcgtggtgctggaggtcaccgggctggacacgtgctacccggagcgcgtggtgggcgtgctcaacgccatcaacacgctgctgtccgacagccacgcgcccttcatcttcatcctggtcgtggaccccagcatcctggccgcgtgcctagagagcgcgggcaacatgaagggcacggccgataacggctacctcttcctcaaccgcactgtcacgctgcccttctctgtgcccattatgggccgccgcaccaagctgcagttcctgcacgatgcggtgcagagccgcgacgacctgt

SEQ ID NO: 36917 - DNA, 1986 bp, Artificial sequence
  DNA replication origin
ccgccagcagcgccagcagccccaggcacacgcggcgccgacaatgccactcgctctggcagcagtcctgcctggtggccggcttgttgcccagcaccgagtacacgctgaagggcagtgcgccatagtggcggcggatgccctcgcacaacgtggtcaccaggccggcccacagcttgtcggtgcccgcgtactgccaggcgctaaagcggatgaaaaggaactgcacgttcctgcgccgcaggtgcacctcggtgatgatgggctgcaggaacaccaggtaccacagtagctgcgggacgccccagccgctcacggcacgcggccgccactgcacgtgctgcagctcctcgctctcgcgctgcgcggcctcctgctgcatcagcgctgcgggaagggagcccgggagccgcgtgagccgcagacccgccggggtgggcggggcctagtacgggcagggcggagcgctcctggagaggcgaggggcgcccagcagaggcgaggggctggaagcgagccgcggccgctccttaaagagctggaagccggtgcagaagcgggggcgtggagaggcctggagccgggcttggaccggaagcggtctgaaggccaggctgtggggtcgggatgggcagaggtagagccggcagaggagagatgggaggaggcaaaaagagatacgaggaagagccagggatgggcaagaggctggaggcggagcgagggtgtggagggcaccgggaaggttctgagagtggggcaggggacaagtggtcggtgtaagggatgaatgaatgagatgctgaggaggagctatgctaggcagcaggatacaccctcggtcttatcttgttgacttaactgctcctcctgcaggaagccctccctgatccccaggctgggtcgggggccctcagccattcctactctgggtcatcactgtctgaggacaagtctctctcccctgctggactgtgagccggaagggcagggtcctgcttgtcttggtcaccgtgtcccctgggcaccagaaggtgcttagggaatgcctgaacaatagatcatgagaaatctgaggtcacagagtgaatgagcgggagtgtctacagcacccagcaggaggagtagggactctctgttctttatatcctcttctcctcccgggaccctgtgacaacacaggacaggacagtgagtgctcaatggacagtcagtacaggaaggaaaggctattgggcctgcaccagggctgggcacacgtaggaggaacgtcagtcccagcccctctggccccacgtggggctgaggtctgagctccagcagggcttgatccagatcaaagctgctggggaggccagtcgcggtgagtcacgcctgtaatctcagcactttttgggaggccgaggtgggcggatcacatgaggtcaggagttcaagaccagcctggccaacacggtgaaaccccatcgctactaaaaatacaaaaattagccgggcttggtggtgggcacctgtagtcccagctacttgggaggctgaggcaggagaatcgcttgaacctgggaggtggaggctgcactgagttgagactgcgccactgcagtacagcctgggcgacagagtgagactccatttaaaaaaaaaaaaaaaaaaaaggccaggtgcagtggctcatgtgtaatcccagcactttgggaggctgaggcggatcacatgaggtcaagagatcgagaccatctggccaacatggtaaaaccccgtctactaaaaatacaaaaaattagctgggcgtggtggtgagcgcctgtaatcccagctacttgggaggctgaggcaggagagtcacttgaacccgggaggcggaggttgcagtgagccaagatcgcaccattgcactccagcctggagacagagcaagattccgtctcaaaaaaaaaaagctgctggggaacctggcgggttgcagttcatgtcttcagttggcat

SEQ ID NO: 36918 - DNA, 1428 bp, Artificial sequence
  DNA replication origin
tggggacagggcccccaagaaggccagggtgagcaccggagctgtaggcagtgaaggagccacaggccgctggggcgggcaggggccgggcatcagtgggctcgctgggcttcaggaggacgccagccgcggagggtagagctgggccactcctggccatggctggtgccgtggtgggtaaggtgggcgcctgaggggcgctggcaggttccttggggacagtggaggttgcaggcagccccttctgggcttcgtgaatggggcagagccgctgccgcagggggctgggaggtgagggctgggactggggctgccgctgctgctgcaggacggagggcaggaggccccggcgccagccactgccacccacttggtggctgtggtaggccagctgccagtgtgattggggggaaggccgacagggcccatgggctcggagggccgctgagtcctggcgccactgatgacagcatcctggaaggaaggaagtgggggtgactgggcctgtgtccccgacccccgggggcaccggcacaagccagaccaagtcttcaggtagaacctgggggccagagtattcttgggagccccagaaacccctcaaaaagtaagattatgtgcgggggaggtatgggcaggggagggacccagggtctgtgctgtcccatggcgggggagcagggaaggtgcaggcttggacttcagctgggggcagagagaggacgcctgaggttggggcttcaatggaggctggtgcctgccacagcagattcctggatccctggggggtgccgccagtgcaggggtcagggaaactgagaagatccattgggagctggccctggctggcccagggaggccggagtgatgggtggtggcgtggagaggggtaggccagggatttgggtggggggtggaccttgtccccagctcgggccagggtggcaggaagggtggtgacctgggaagctccagccctcgccctagccctgaggaggctgaatcagccccagtgggagggcactgccccctccccaccctgaacaagatcacctgtggtcaccaccagaaactgggcccagcctcatccagacatgttcagtgggggggctccctctcctacccctcactcccagcacactgctcccctccaggctggaggccatccacacaggcctcagggtttggaaacggggcagggcaggccaggcggcccctgcttccaactccagcccaggctcctatctttgggcccgcaggccctgtggtccgggtcctgggtcccaggccctgctgctacacagatgcctctgggtggagtgcaagtggcttttctctcctggggatgacagctccccttctgttcctccattcactctggcttcctcacaggcctctgtcggccatcacccgcccccaaactgaacc

SEQ ID NO: 36919 - DNA, 1065 bp, Artificial sequence
  DNA replication origin
caactccagcccaggctcctatctttgggcccgcaggccctgtggtccgggtcctgggtcccaggccctgctgctacacagatgcctctgggtggagtgcaagtggcttttctctcctggggatgacagctccccttctgttcctccattcactctggcttcctcacaggcctctgtcggccatcacccgcccccaaactgaacccgtaccttttcggtgccccaactctgggtcccagaagtagtgcccgttggggctctgggcatccttggcgaagtggactttgtaatgtttgtgcatggcagccgggcagctgggtgctgggggcctgctcctgaggcaggagggagcacacaggcttggcgtagcctctggggcacgaacagcagagagctgaggtcagggtccctgccctgcccgacagcttggacaggggaaaggccaagtcccagatgctgggttcctaggtcacttgggagaagggggtagaggtggccttcagggtacagtgaggggcaggataaggagggatggccagaggagggaacggagaaccgctggggttggctaggggttaatttgaggctgggtgttgggaagctcctgggagtttccaagaggctaggacactggggagtgctgagcagacatgggctggggaaatagggggtccggtgtggtggctgagtgaccaaggggtcattaaggtgtgggcgctgtgggaggctggcacgctttggaaggacatggagctagtgaggtgagctggagagcagatgagaagcagggtgagtgaaaatcagagctgggtacctgtgggcattgaatgatacggtggagggggaattgtgagggagcaatgaaatcgcggtggtccaatttggggagaggctcagcaaactcgggcaagatgggtgtaccgcgtttccaatgtgaagagccgaaagcaggacagggaaggatgctgtgtgggggacagggatagggaaaggctgaggggcagaggaaactggggtgctgagagttggtagcctgcccaccactccccacccccagtcccagtc

SEQ ID NO: 36920 - DNA, 1060 bp, Artificial sequence
  DNA replication origin
ggaataggaaggggtgacccaggcagggcctgacggggtgactggaccccactctacaggggaggttctttagcaaggggcccctttctcatcccatttggggttcacccccagccttggtgggcagctctgagcctggggcacttacccatgtcaggcagcgggcggcgaagcccaggagtccccagatgctacagatgcgagcggggtgggagggggcagcataagggccactctgcccagggacgggcagcaggagtgcgtaggggccgcgtgtgtccatgggggtgtctggcctccccctaccccatgcatccccagccctggcagccccagcccgacctggcctacactccgggcactcccagccctgctccccaggaagacgctccgttctgtgcacatcgccgggcagagggcagccccagacttgttgacttggcagaggtgccagtaaggccgcccatgccggaggccagcatccctctgccaggagcacggggagggagggagtggagggggacgtggcaggggagggaaggtctgaggggcatgggagccagagagggtacccactcccctgcaggacctgtgacagtcggtccacagatcctcccccactgctctgagtcagattccacacacacagcctttattgagcagctactgggcagtgacgctgccgaggcgggaatcccaccacagtcctgaccgcagctgggacccctttgcctcctctgacacccccacctcaatttgatacccacttcctgagcaaatgtgacccctagggcctgggattcccaagaccaccccgaaatgcagcggccccaccgtctcctgaggccggtgaggccaggggcagcagtgcggctcagcaggtgcgaggcaggcttaggatttcggaatcaccacctggaacttacctggaagagaaggcctggcttaggcttgaggatgggatgggggaggcagagggcacctggacggctcttaggcgctcacccccgtcctgcactgacaccccagtggctaggttgggctgtttcctcccgcccac

SEQ ID NO: 36921 - DNA, 1167 bp, Artificial sequence
  DNA replication origin
tgggcctggggaaccggcagaggcaaaataactgaaggtgggggaggtggtggggcaggctgtccccaggcaggaatggggctccagcttgtctgacagaggacacccagtcaggcaggctgcaagttccctggagcctgccgtcgcccccatcgaaggatcagtgaggataacttctattgcgtccacctcggctcccatgctgggaaacgatgttcaaaaccgccagacagttctctctgcagggctggcgacgtcacggagccaggggcacagatgggcctgcaccagccgtgtggctgagcaggtgacttaaaactgggcctgcctcccaggcacacacacaggagtggggctggaactctgaagcccccagcaactcaagggatgagaagaatccccccaccccccatgactcacagacgggcagggctgccacggaggcggtgaccacgctctcaatgcccagggtatagagggcgccgcgcaggaggccgcaggtgaaggccaggaactgaggagggaacacagaccagcatgggaagagaggggaggccagcacccgaggtctggggcaccccttaggcctggggaaaggcctgatgtgggatggggctgggtaaacaggaggaagggaggtgtggacaaggccccagctccccccataccttgggtgcttcctccagatactgcaggccagaggccatcgggaggaggagggggaagctgttgtcttgcaggacgtaggtcccctgggggagaggagaggctggtgggtggggtcggggcctgtacatttgaagcgcagggagggtaagcaggaacccaggtcttagattgggctgaggttgggaaggcccccttcctgagaaccactggagtcacagccttggcctccagtgctctggtagggcccagggcttccaaacttggagtgggtgcctgtgccctggggagtgtgggtcctgccctcgcctcccagggttgtgcagaaaagctggggacccggcccaggaagatgcagaagggcaggtacagcctgggtgtcactgggggactagaccagcttgggacaagcagcatcacactgggggtagggcaggcagccaccaggggctttctgcccatgcatggctcactcctggtaggctggagaagttccggaaa

SEQ ID NO: 36922 - DNA, 1612 bp, Artificial sequence
  DNA replication origin
ccgcgcgccaggcgcacgctgtgggccgccgccagccccgccgcctgggctgccgccagcctactagccagggcggccacgtcgcggcctgcacggcggtagacaccgctcacggcggccgccacgtcgtggtccagccgcgcctggctctccgccagccgaagttgcaggagcgagcgcgcgggggcgggcgccggggcctcctccgtgccccaggcctcctccgccgattcccgctgcaccacgagtggaggcaggtccctcggcgcggccgtcggttccggctccggctccggctccgagtcggtctccgcggcttccccagccacccgcagccccgtggggcggccgcgcgtcgggcccgaaggacccaggtacagctcctcctcctccgacgaggacgcagagcgctcggaatccgtctcggtcgcctcccccggcaccaccgtctccggcctccgcaggggcctccgccgacgaccctgggacgccatggcaccgaactaggggagaagagcgaagggactgcacgtgagaccggcgccgcggtgggtaaaaggcgcaggtcctggattcccagccccttcgctgattctcttaacgacttggtgtcagctgctccccgtctgggcctcagtttcctcttctgtaaactgggtgatgatgggggttactggaccccaggctcttcagcgtacagatggggaaactgaagaccagctcgaacaaggatctggggcccgagttcccggagtcccaagccgaggtctttacgaatttgcctcctagtagaggccacaccctccacctggtccaccatgccaatctcagacccggaagcacacgggcccgtgagctgctcgggaccagcgccagagtcgcagaaaggatgacagtccgactggactctgctgggggcactcatgggatgggagaagcgctaacgccaaagaccgtacccggcagctgacgctcggagcttgcgagatccgcttcctaacccgagtgctgcgttctcaccgtggcagctgaagggctgtgatttcaaccaataggggagcgggttgggcgggcattagcggccaagtcacgtggattcgcccggctaccaatcaggaagcaagttctcagcatcagctttgagtgagcgtgcagaagagtcacatgaatggaggaaccgccaatagagaaacagctgggccggctcttccaggttgtgcgacgaggaaagtctggagtggaccaatagggattttaaaagccgagtatgtcacgtgtaaccagtaatttggccaataggaatgctcgagaacccggaaatagggaagggacggcagtaagagcagaagatgttgccacatgtggccagagaaggcgtaggcccgccccctagtgtcccaggctcacgcgcacaccacctgagtccggggcggggaggcggggctagtctaaaacaccaatggaagccggagtaggagggctcgcgccatgacgcaagaggcgtggcttaccaagcctggccaatgagagctggaagcgctgggcgcatctttaggcgtgcgaggagggggcatggcggatactgtgttgtttgagtttcttcacacggaga

SEQ ID NO: 36923 - DNA, 1416 bp, Artificial sequence
  DNA replication origin
cagaaggaaggaaaccatggggagtccccagaccccaggatcagggaggtgtaagtaggatggagacagtaaaagaaagcaaaacctatcccacgacactgctggacttgggaaacagaaatcaggctgagagggcggggctaagctcaaaggggaggaggcaggaggcagatgggagaacaaaaagtagaaccagcacacggaaccagggccaagcttgggcagcagaacaaggacccagctggctaggcgcagtggcccacgcctgtaatcccagcattttaggaggtgaggcgggtggatcacctgaggccaggagttcgagaccagcctggccaacaaggtgaaacctcatctctactaaaaatataaaaagtagccaggcgtggtggtgcatgcctgtaatcctagctactcgggaggctgaggcaggagaatcgcttgaactcgggaggtggaggtggcagtgagccgagatcacgccactgtactccagcctgggagacacagtgagaccctgtctctaaaaacaaaacaaggacccagcctagggtgaaggcagttctggaagtggagctaggatgggaggcgtagccaactgagtgaaggaagacggcagggaagctgtgccacatcctgggttcttgtgggaagaacgggaacaagctccccaccataagcagaaaccaaactcagaaaggcagagcagagcccagtgtgtggtggctcacacctgtaaccccagcactttgggacgccacagtgggaggattgcttgagcccgggagtttgagacaagcctgggcaacatagtgagaccttctcccctcttcaaaccgacagaaaaaaattaaccgggcagctggacgtggtggtgcaggtctgcagtcccagctactcttgaaggctgagctgggaggatcacttgagcccaggaggtcgaggttgcagtgagcagtaatcccgccactgcactctagcctgggtgacagataaacaccctgtctccaaaaaaaaaaaaaaaaaaaaaaaattggtgagcccccagggtggaaacagattaaggagcaactatgtaacaaaggctggagccaagccccaggggaaggctcagaaccaggcggcagggtcaggatcgggagaggaaccagatctaaggatagtggggccctggtctccgcagtaggggttgaactatatccaatataaagcattatccaaggggaccggattagcccccatgggtgacaccaagatgggagcgggggtggggggtgataagagacacaggagacagagtcaggtcccagaggcagcaaggcctacccccaaattgcagtcaggttgggaagtagaatcatggctaggcccgcggccccgggtctttctcaggctcggtccctggcacgccgcgga

SEQ ID NO: 36924 - DNA, 1322 bp, Artificial sequence
  DNA replication origin
aaagtgctaggattacaggcgtgatacatcgcccaaaatttttgtatttttaataactacagggtttcaccatgttggccaggctatcatctctatttttaaaaattaaactataaattatgattactagaactatctatgagaacatcttattactgtttctcccactggactgcgacctctgtgagggcagggactgggtgctatacccctagccgcagcacaggtcaggtacccaaaacgtgtgtgttgaattaataaaatacgagtaaatacagaaccagggcaaaaatctagggcccctgatttcccaactacagcttcaccttccataagccaggcatggaggtctcgggacccccattctcagagaaatcaaccaactcacccttagcttagatagggaaacaaaaggaactaaccataagggtaaatgcttaagagttttaatcagtccgccataaaaagctcctccccattctccatcttgggggctcagatcttggcttcgggttgagatgagggacagggatatcaggctgggagaggagagtaaatatgaatgcggctgagggaccagagctgggatcggaagaaaacacaggtgaaaaggagcagaaagagactgctaaccccagtccctgagccaagtcagaaatccaagtccttttatagcatccaggagccaaatgtagtgaaatccacacatcatatcgttcttatctgcaaagtgctgtcatctggcgctgaaagcaccaggactgggctgaattgggcccgaagtgcctgaagggtgtcactttaggtctggagagtcaagaggagacgccaccttggcctacagagttgagagcgagcatcatcttggcctggaggggtgtgcaggaaatgccaccttggtccagggagttgggaggaagatcccctgccttgggttaagaggggccatcattttgggcctgcagaaggaaggaaaccatggggagtccccagaccccaggatcagggaggtgtaagtaggatggagacagtaaaagaaagcaaaacctatcccacgacactgctggacttgggaaacagaaatcaggctgagagggcggggctaagctcaaaggggaggaggcaggaggcagatgggagaacaaaaagtagaaccagcacacggaaccagggccaagcttgggcagcagaacaaggacccagctggctaggcgcagtggcccacgcctgtaatcccagcattttaggaggtgaggcgggtggatcacctgaggccaggagttcgagaccagcctggccaacaaggtgaaacctcatctcta

SEQ ID NO: 36925 - DNA, 1180 bp, Artificial sequence
  DNA replication origin
tgggaggggtcatggcatgtttgtatgctgctgggagtatttcagaagagggagaagtcgtgatacaggggaaaggtgggagaaaagccagaccattgtcctgcagtaggtaagaagggaggaggagatagcccccaaggggaagggcaacactggggtaagagagactatttgtggctagttgcaagtcactgggtagtgatgaccactctggtcatcactgcctgggaactggtctgtcacccccactggactgttggccccatgaggacggggctgaggctgtcttggccagggccagctaacccagggaaaccacagagtagatactgggcaaattgtttgttgaatgaatgaatggccttcacaccatcacacggcatcagcctctcagatgcatggagctgttgagacgttcgggcacagcctccctccaaaggtgatgggcactcggtcccacataacacatcaccctcagatgtgcaggatgagagggtcagacatgcaccaaaatgctaataacacccactccacaaatatttgctaaccacatttcaaggggaaaggcattcaaggcagaaagaatagcatgtgcaaagaaccagaggcaggaaaatcctgggggtgcttgtttgggcgagatgaattgtctgttgtgcatggactgctatagaggggcctttggcaggagggagagctgaagactcagtcaagagccaggccacacagggccagaatgaggagcagggctttgtcccaagggccctggggagccaaggcaagttccaagcaggagagaggcagggacgagtttgtgctttagcaagagatacctagatgggtcaggtgcggtggctcatgcctgtaatcccaggcctttggaggccaaggcagatggatcacctgaggtcagaagttcgaaaccagcctggccaacatggtgaaacccccgtctctactgacaatacaaaaatcattctgggcgtggtggtgtgcacctgtaattccagctactcaggaggctgaggcgggagaatcacttaaacctgggaggcgaacattgcagtgagccaagattgcgccactgcactccagcctgggcaacacagcaagactctgtctcaaaataaaaaaaaagaaacctctggctactgagtggagggtgcatgggagggggtga

SEQ ID NO: 36926 - DNA, 1125 bp, Artificial sequence
  DNA replication origin
gtggatgggagaggtggcccctgcccggggtctgcggggaggcatgtgcgtggaactggggtgtaaggcggggtgcagactgagtcagggcccctgagagtggagcttggggaatggggagaggctgggatggagcaccctttggggaccggcagagactgtccgcgggctaattagggggccagggaaggcatcctaggatagctcaggggctggggactggggcgtgggcacgggaagggtgcccatgggtgcccggagtggatgtgggcgagtggggcgggggtggccttcagactggcgggatgggagtccgtggggcatggctcacacccctcgggtttccctcctccgcctccaggcgctggtagccgagctacaccggcgggcgctggtcgagtacgtgcggcccctgctccgtgggcgcctgcgctgcagctcggcgcggacccgcagccgcgtggccggcaggctccgggaggacgcggcgcaactgcagaggctgttccggcggctggtcagtgtcgggacgcggttgggggtgtttcagaaaccaggacaaggcttggcttccgagaatctcaggtcccaaaagccagggggagaggggcagagctcaggacagaaactctcacccaacttcgggtcaatagcaaccagtaactttgaccgacaccctttgcacttaaaacctggctttcttgctctgagaactcgcctctgggcgctttcctcggctgttaaataaggcgaataatggtccctatccattgttttgaggatcagattggttaattcctgttaagtgctttggacagtgcctggctcagagttaaaactccttgcattaccaaaattatccgggtgtggtggctcacgcctgtaatcccagctacttgggaggttgaggcaggagaatcgcttgaactaagaggcggaggttgcagtgagccgagatcctgccaccacactccagcctggaggacagagtgagactctgtctcaaaaaaaaaagaaaaaaaagactccatgaacgtacagagaaactacatgcaacagaaacacagaaatcctaacatttctaaaccctggaattaaaaaccgccagatcttatttgtacccag

SEQ ID NO: 36927 - DNA, 1024 bp, Artificial sequence
  DNA replication origin
tcatcaccagggcctcagttccggtgtcccctcctccaggaagccctccatggctctatgctgagtcaggcatcccctctgggcttcctaaacccctgggttcccgagtcccagccttgccagctttgggtcatcactacctggggaccagtctctctccccttctggactgtgagtccaaggatgccagggctggggctatctcttccccttgtgttcccagcaccgcacagccctggttcaacacggagcagggttgcaggaacttattcctaagtgaagagggagggtgggagggaggagagcgtgaccccctactctgtccctgccagccacacttcaacaagctgatgcgccggaagtggctgagcagcccggaggccctggatggcatcgtgggcacgctgggtgcccaggccctggccctgcgcagaatgcaggacgagccttaccaggtgcacctgcctgaggggaggggaggtgggggtgggggaaaagaggggaggaggaaaggggaaagggacgggaagaggggagattgggaggttgggagagccaagaacgctcctgctggaggaaacccctctaaggtggggagcggctccctgtggatgggagaggtggcccctgcccggggtctgcggggaggcatgtgcgtggaactggggtgtaaggcggggtgcagactgagtcagggcccctgagagtggagcttggggaatggggagaggctgggatggagcaccctttggggaccggcagagactgtccgcgggctaattagggggccagggaaggcatcctaggatagctcaggggctggggactggggcgtgggcacgggaagggtgcccatgggtgcccggagtggatgtgggcgagtggggcgggggtggccttcagactggcgggatgggagtccgtggggcatggctcacacccctcgggtttccctcctccgcctccaggcgctggtagccgagctacaccggcgggcgctggtcgagtacgtgcggcccctgct

SEQ ID NO: 36928 - DNA, 995 bp, Artificial sequence
  DNA replication origin
actgaggtgacatttgagtcaagacttgaggcagggcatggtggctcacacctgtaatcccagcactttgggaggccgaggtgggcagatcacatgaggccaggagtttgagaccagcctggccaacatggtaaaacaccatctctactaaaaatacaaaaaaattagctgggcgtggtggtgcatgcctgtaatcccagctactagggaggctgaggcaggaaaatcgcttgaacctgggaggcagaggttgcagtgagctgagattgtgccattccactccagcctgggcgacacagggagactgtctcaaaacaaaacaagacttgaaacaggcatgagaggcagctatgtggctgtgagagggagagcattccaggcagagggaagggcaagtgcaaaggccctgaggcaggaatgtacttgctgggttaagagacagcaagggggctggcgtggctggagtgggattagtgggagagccaggagtggggggagggtggcgggcagggcaggagatgaggtctgagaaggagagtagtgagggaaggggctgattgtgccgggttgtgggggctacagtgggattttggcatttgctctgcgtgagctgggagttgtgggaggattctgagcagagagaaggggagtgttccactgtataacatgggttgagcttgtgttacggccaggaacacactccccctgcagtctctctcctcagtgctcccacccccctaccacattcactcacccacctttgcaccgaacccctatagggcgggcacgaggaccaggagatgggtgtatggggctctggggtctaggagagcctgagcagggatctgggggacctcagtggggaggggctccatccaaacctcaagccccctcctgctgatggccctctgttatcccggtgggtgcaccctctccactccaccaacagcccaggcatggccttaactgcccctgccccccgcccctgtctgctt

SEQ ID NO: 36929 - DNA, 858 bp, Artificial sequence
  DNA replication origin
gggggacctcagtggggaggggctccatccaaacctcaagccccctcctgctgatggccctctgttatcccggtgggtgcaccctctccactccaccaacagcccaggcatggccttaactgcccctgccccccgcccctgtctgcttcccaaacactgagccatgggctaaaaggaactggaggatggtggggggcagcgcttccctgtcctggcatgggccccaaccctggcctcccacctcactcacctgcagctcctggaacagcaggttggccacgacacggtggcagagccgggtcacatggtccagagcactagcagatgcttcccgggccggctcgctttctgggggccccacccgggccaggcgctcggccagagctctgtggggatcaacagagccaaaactgagggaccccaacatctcagcccaactgcctaggcctgtcttcccttaggtagatcagaggggcacaggggtgacaggtcagatggggggctgagaaaggtcagggactctggagaggggtcaggggatgcttgacaggttgggggtgtctggggattggggtgtctggggacgtcaggggactcatggatgttggggggctgagggatggctaggaggtctagggtatattgggggagggaaggggggtctctctgtgtcttcgggtctcagtttctcttggtgctttctgggtgagagtgtggaggcctccattctaaaagtctgtggttcttttttttttttttgagacggagtctcgctctgtcacccaggctgcagtgcagtggtgccatcttggctcactgtaagttccgcctcccaggttcatgccattctcctgcctc

SEQ ID NO: 36930 - DNA, 1442 bp, Artificial sequence
  DNA replication origin
ggcgcgcctgggcctcccaaggccgagggcgctggcgggggccgccgggcgcgggacgtggcgctgctgtacgaggccctgcagcgcgagctgtgggcgctggtgcgcgagacgctggcgggccccgggccgggagcgtgcgccggggctggcgcggtggcgcagctgggccaggtgctggtacaggaggaggcggccgacgggcgtcggggtcccggggcggcccgcaaactacgcgcacgctgggccgaagccgtggcgcgcgcggcccgggagcgcctagaggcagcggctcccggggcgcccgggggcctggccgggcagctggaggcgctgcgggcgcggctgctggaggatatggccgtggtgcggggccgcctggcgcccgcctaccccgccggcctgggcgccttcggcgtctacctgcgcggctaccacggggccctggccgagtggctgggggcctccgcccgtcgcaggctgccgctggccgaccgctacgcgctgctgcactggcacaatcaggtctaccccaggtaagctggactcagttgcccaaggtcacgtgaaaccctcagccctaccccctagcactggcttcttcagaccttaaggaccttgggacagctgaccctacagtcctagcactttaacaccattaacccatccagtcgtcagcaccgctgacagttacaatcctagactctcactgctaccgaggcttccggttccagcaccttagtaccatggacgcttgcagtcctagaataagagctccggcaccactgtggtccaaaaacctcagcgctctgtcaacacttacactctagatcgcctcgctgtccacccttccagtccccgaatcttagcaccattgattcctctagtcctagaacctttgcgttgctacttttccgttcctaaaatctcaacaccattcattcttctagacctacatacaaccttagcatcatcgacagttacactcctagcatctaagtaacactgatgcttccagtcttagaatcctagcattcccaccctttcagacctagaacctattggcaccattgactcttccagttctacaattttagcactatcgacagtttcaatcctagtagctcagcacggtgggcccaccagtccaagaacctgggcttcatgacacttacgctactagaatcttagctgttcacccttccagtcttagagttttagcactgttgaccattccttcctagaaccatagccccactgacccttcaccttaatacaatgacacttagaattctagaatcctacactgctttctctttagagcctagggcattagtactgttgacgtttccaatcttagaacttagaatgtatggtgcaaccatagaagcttagtaccaatgaagctttgaatcctaaaccttagcctcattccctctttt

SEQ ID NO: 36931 - DNA, 1936 bp, Artificial sequence
  DNA replication origin
caccacggccatatcctccagcagccgcgcccgcagcgcctccagctgcccggccaggcccccgggcgccccgggagccgctgcctctaggcgctcccgggccgcgcgcgccacggcttcggcccagcgtgcgcgtagtttgcgggccgccccgggaccccgacgcccgtcggccgcctcctcctgtaccagcacctggcccagctgcgccaccgcgccagccccggcgcacgctcccggcccggggcccgccagcgtctcgcgcaccagcgcccacagctcgcgctgcagggcctcgtacagcagcgccacgtcccgcgcccggcggcccccgccagcgccctcggccttgggaggcccaggcgcgccgcccctcgacggcgccagctcctcggcctctagctccaggatgtgctcgtccgcacgcgctagttcgcgctgctggatcaggctcaggatctccagcactgcgggagcaaagcgggaggtcagcagtgcgcgggggggaggagggcgatgccggacgcggggttgggggtgcttaggaaggggagagagatgaggggaaaagggttacaggaggcgggaaagtgtgggggcagagaagagcccggagaagagcaagaaagaaggatgttgagtgaaggatgtaggggaggggtcagggtgaggggctcatgcttgtaatcctagcactttgggaggccgaggccggcggatcacttgaggtcaggagttcaagaccagcctggccaacatggcaaaacctcgtctctactaaaaatacaaaaattagccaggcgtagtggcgtacacctataatcccagctactcgagaggcaggagaatcgcttgaacccggaaggcagaggttgcagtgagccgagatcgcgccactgcaccccagcctgggcaacatgttgagcgagactctatctcaaaaataaataaataaaaaagagagagggggaaaagaaaaatgcctgtgactgaggaggggatctggggaggttgcagggcggaaaaatggaggaggggtcggaggaggcgagaaggttgagagaggagccacgtaagggggagagagatggaggcagccggtgggagtaggaggggcagggtggtgacttggagatggggagaggatatgggaccactgatggggtctttttggggtggggatggctgtgggctgatctggccctctgatgagttcagactgcctcgagaaaggcgagtcgggctggaaggcctctgaggctgaaggagggtcctggcagcccagggttaccctcgacacctccacccccctccacttcctccctggcagagaaactatttcctggccagcgctatttctgcccatccgtttccagaaggcggggctctagtcaccccctcctcacctccctccagtgccctcccagtccccagggagctggggctgaaatagcctctggccagaacgtggagggcatcagaggacagaaaaggctctcctgaggtccccagccctggagcagttcgggcctcggggctaaaagccgggctcaggcacgggagcagagataaaggcagggttgggggtggcggtgaattaagatggggattgggacacggatggggatagggccggaggtgaggatggggtgaaggtgggggttgggatgagggagtttagggttaggatgaggtcaggtgggagtctggacagaaatgggaaagaggcaagaatgacattggggtctgggtagggatgaggttggagaggtgggggaggggaatgtaggtgaaagctgaggatggaaaggacataaagattgatgtgaaggccgagtgcggtggctcatgcctgtactcctagcactttggaaggtgggcggatcacctgaggtcaggagttcaagaccagactgaccaatatggtgaaacctgg

SEQ ID NO: 36932 - DNA, 1936 bp, Artificial sequence
  DNA replication origin
cggaggtgaggatggggtgaaggtgggggttgggatgagggagtttagggttaggatgaggtcaggtgggagtctggacagaaatgggaaagaggcaagaatgacattggggtctgggtagggatgaggttggagaggtgggggaggggaatgtaggtgaaagctgaggatggaaaggacataaagattgatgtgaaggccgagtgcggtggctcatgcctgtactcctagcactttggaaggtgggcggatcacctgaggtcaggagttcaagaccagactgaccaatatggtgaaacctggtctctactaaaaatacaaaaattagccaggcatggtggtgcattcctgtagtcccagctactcaggaggctgagacaggagaattgcttgaacccaggcggcgaaggctgcaatgaactgagatcttgccattgcactccagcctggatgacagagctagactccatctcaaaaaaaaaaaaaaaaaaaaaaaagattgatgtgagtttgaagatgaattgtggaagtgagttgggcttgggaataggaacatggatggaattgaaaatggaggttggggatgggggtttaggactgggactcaggataggggtgaagatagattagggatgaagaggaggttgcgtttggagttggaattgaaactgggggctgaggaagaactaggaactcaaataggactgaataaggaggttgatggccaggtgcggtgactcatgcttgtaatcccagcactttgggaggctgaggcgggtggatcacctgagatcaggagttcaagaccagcctggccaacatggcaaaaccccatctctacaaaaaatacaaaaaaaatttagccaggcatggatggtgatgcatgcctgtaatcccagctactcaggaggttgagacaggagaatcgcttgaacccaggaagcggaggttgcagtgagctgagattgtaccattgcactctagcctgggcaacagagtgagaccctgtctcaaaggaaaaaaaaaaaaaaaggaggtcgccagagggaaatgggtggaaggtgggtgctgagaggggcctggggttgggggttaagagtgagaccaaaagagtttaaaagggtggaaggtgaacatggggaagaatgggatatgaaacggggctggaccagttgggggttgccatggtgttggacatagacaatgacattaaagatggcgtttaggccaggcgcagtggctcatgcctgtcattccagcactttgagaagctgaggcaggaggattacttgaagccaggagttcaagaccaacttgagcaacatagcgagacccccatctctacaaaaaatgtgaaaattagccaggtgtgatcatatgtgcctgtagtcccagctactctggtggctaaggtgggaggattgcttgagcccaggaggtcagggctgcagagagccatgattgcaccactgcactctagcctctagcctgagtgatagagcgagaccttgtctccaaaactagatggcatttggaggaaaggatgagctgtacgagaagcatacggatgtgtctcagatagagactgatggtgggcttggaataagtgtggggtgagaacagaaaaggcactgaggaagacactggggcttggagtaggaatggggactgaggatgaagacagggtggtgttagggattgaattacgtccccccagaaaaaaaaaagatatgtgaagtcttcaccccagtacatcagaatgtcacctgatttggaaatagggtctttacagaggcaatcaaattaaagtgagatcatagggcagacccgaatcccatgtgagtggtgtcctcataaaaaggagaaattggccacacgccgtggctcaagcctgtaatcccaacattttgggaggacgaggcaggcagatcacttg

SEQ ID NO: 36933 - DNA, 869 bp, Artificial sequence
  DNA replication origin
tgaattacgtccccccagaaaaaaaaaagatatgtgaagtcttcaccccagtacatcagaatgtcacctgatttggaaatagggtctttacagaggcaatcaaattaaagtgagatcatagggcagacccgaatcccatgtgagtggtgtcctcataaaaaggagaaattggccacacgccgtggctcaagcctgtaatcccaacattttgggaggacgaggcaggcagatcacttgaggtcaggagtttgagaccagcctggccaacatgatgaaaccttacctctactaaagtacaaaaattatccaggtggcacatgcctgtaatatcagctactcgggaggctgaggcaggagaattgtttgaaccccagaggcagaggatgcagtgagccaagattgcaccactgcactccagcctgggcgacagaggcaaaaaaataataataataaaataaataaaataaagaaattgaagaaattggggatagaaagagaagggggagagatgggaccaaaatcaggtattcccttggctttagacatgggagtagggctgaagacggcaggtggaggaggcaaagattgagggtgggcatatattaacaggtggcactgaagagaaaggttgacgacagggattaggactgcagtggtaatgggttggagctggcatggaggtgggagatgtgagttagacatgtgaattgcaggtcggggtcacaggtggtagctgggatgggcttaagtatgaagcctgggaccaccagggctggggatggacatgggcactgggattctcccaggacagggtcagggctccggactcacctgacaatggctccttcatctttgggggctctgggacc

SEQ ID NO: 36934 - DNA, 1765 bp, Artificial sequence
  DNA replication origin
gttgtcaccttgggaggcgtgaagagcatgcaggagtgggcggattccggcctggagcgggggtgagggtgggggcccagctgtgggcctcggccttcccagcccaaccgcagcctggcctaaaagggcagacagataatgagtccttcccgcccctggccccagagagggaggggtttcctgacaggaaattgtcctcctccgagcacccccccaactcagatccaagctcccagcagtcctggctgaagtagcctggggacaggacagcagcgggaacagaaggacgggcaggaggacagaggtgagtgtgctggggacagggggaaggggtcccccttccccagggcaactgggaaaacagttgcccttagttgcactggaccagagctgatgagaacctgtaccttgaacccagcagaggctgggggcaaagagagaatctggggcctgactccagaggggtgctggcgagaaggcagaaaggagatgaaaatgagaggagggtgcaggggagaatttgaggactcgcggggtccacaaagggtgcaagggagcattagaaaccttggtgccaccaaaggagaatagagatgagatgacattgggtcgaatgtcctgcgagtctgggcgggaagactgaggccaggaaggatcgggtatttgttctatcccaagagatggggtctcggagatgggagacagggaccaggtagggattgagatcaagcaggagagaccgagatcaggttgggattggagatgtggatgagcttgcagtggtctgggctgatgacaggattgtgtttggggtcaaggactagattggggttgcactggttggggttgggcttggggacatgccatatggaaagaccgttctctaatacagatgctgagcgttggaggtgatggattccgcaaaccgaggtcagggccgctgcagaaggttagggactccggggaaaaggctggcagtgaggaagaggaggaggggctcaaagagggaagctctggtggccaagacatcctgcgggcctgagaggctgggggcttgagggatgcctcggaagtgagtcaggggctgggcactgggaggcagacagagggttggagggggcaggatgtcagcaccagtttgcagaggcgggtgttggagccaggaaggggaaagacgtcggagacagttttgggaaaatgttgcagccaggtttggggatgttggatccagtttggaggcgatattgaagccaggtgggggaaagtcagatgtagtccgggcaaggttgacttcaattggagggaaattcgagcctgaaattttgagaggaagatggagacagttatggggtggaggggggatgatggagccattttgggatgaggcatgtggatgccagttcagaggatgaaagagaaatcaaggctgggtgtggtggctcatgactgtaatcccagcactttgggaggctggggcaggtggatcgcttgaactcaggagttgaccaacctgggcaacagggcgaaacctcatctctactaaaaatacaaaaattagccaggtgtggtgacttgcacttgtactcccagctactcgggaggttgaggtgggaggattgcttgagcctgggaagcagaggttgcagtgagccgagaccatgccactgcactccaacctgggtgacagagtgagactgtctaaaaaataaaagagaaggacagagtgcggtggctcacacctgtaatcccagcactttgggaggct

SEQ ID NO: 36935 - DNA, 1046 bp, Artificial sequence
  DNA replication origin
ttccgatcgttgcccggggccagcaccgtccgcgaagacatcttctccgggtcccggggggcaggggcggccgggtggggggggcgggggtcccagggtcccctctcttcccctccccccccgccggcctggggacgcgagctcaaaagctgggcgccgagaacgcccgggtccgcgcggcgggagagggggcagggcgggggaggggaagggacgccgagggtcctagtggccccgtgcagcggggaccccgggcgccatgggggcggcgggcaggcgggcgggcgggggccgcggagggggcgcggagccggcccaagcggcggcggagggaggcggtggaggggctggggagggaggaagggacgtcagggggaggggcgggcagggcggggcgccgggaccccgccccccgccgccggcccttaaaggcgcaggcccgggctggtcggggcgccgggggctccgggggctccgggggcggaggcgggtctgggcacgccggcggggagcgtgttctcgcccgagacgagaggcgcactggagaggagagaaggggagagagaggccggggcagagcgccagagacgcagagagagagatcgagagacgtagagatagagagacacgaagagagagagacgagttacaaaagggtggagaggcgcaaggagatgaaggaagagccagatgacagagagagagagacgcagggagacagagacagagagacccagagacgcagagggacaaagactgagagagaccccacacacacacagggagagacaaagagatacagagacgcagagatctgtgaagagatagagataaagggactgagccagagaagaccccagaggcgctgcccacattgtccctccccctggcccattctctccccagttggcgggggggagcgggggaagctctcccctcggaggcctaagggtggggtgggtgaaggggatggtgtgcggggcttggccactgctgagggctcagtgacctccctagtcaggctgcctccactcagccacatagat

SEQ ID NO: 36936 - DNA, 2250 bp, Artificial sequence
  DNA replication origin
tagggagggacagaaacaggatgtgaacccaagtttatctgaacaattaaagtagtgctaataaccacaacagccacgacacatgccaggccctgtgcaccttagtcacatcacgtcgctggctcctgcaaacatccctaacagtggggggccatcatcaacccgatttagagataaggaaactgaggctgcaagctgggagtgaatctgcaggctcactcaacaaccaataacagccctgagctgagaatccacgggctgtctgactcatacccacagccacaatagcagctggcatttgtggagtgcttcctaggtgccagccttcgcctgaatcgagtaagccttggaggcactcaagcggtcacccctattttccagggcaggaaactgaggctcagaaagggagaactggttgtctgaggacacaaggcaaaccagctggccatgtcagcattggaacccaggactgtggagcccctggcacctcactgtagattgtagtgaccaaggaacagaggtggtaggcatttcattagactccaaattggagttctggcccatagtgatgatgcggggtggtctctgtgagggagggatctgcaagatgaggaagggacagatataaatctctctgatggtgtgtgtgtgtgggggggtctgtcggaggtgagggaaacagggggaaggggaacagggacctggcagaaggatttggagaaagccacaaagatcccaggtggggagaagtctaggattgggtggtgggcaggtctttggaagtgatcagtgatcagagacacaggagatggggaggggcctctctgggaagcagtgtaggggcagggggcgcctgggaatggtggaaagtgacaaagccatgggggcagtggaagtcagaggccaggaatccctgggtcttggggaagctcctaggaatcagagaagggggcttctaggagaagtccttgaaaccagagaagggtctggggggcctggaagtatggggtaggaacttcttgggcaaggagcagcccagatgaataaaggctgagccctggggaaggtcaaggggtctagaaatttggggagaaagcttccagcagattgacccaagggaaaagggcttgaaaccagggcaagacgagaggcttcaggtccaggagttttctggaagaaggatctggggccaggccctgtagctgaggaaggcctctgaagctgaggagggggcttccttggaaggccagactcccagcaaggaagggggaggccctggggcaggagaaaggacggtggtttgtggggaaggggtctgagtttggcctagcagggggtccagaggttgggggttggggaaggggctgcctgaagctgagaagttgatagagggcggatgaggcctggagtcagactggtccagggcctagaaataccagcctgggtgaggtgagggcctagaagttggaggccaaggcttcctgggagaggaagagaccagaaagggtccaggtggcatctgggggccccggggtgctgggatctagggacagggctgcttggaagatggggaccaggcctgggacgggagagaccttgaagaagccagaaaagggccggggcccaggagaggtggaaaccagcttcctgccaggggctgcccacaggcgccctgggtgcgtcctggaggggcagagggctgggaataagaggaggggggctcctggggagccggcacccagccccagacagggaaggccggagccagaggcaggactgggccaggccctgctgagagtgccagggccgggccttggggggtcaggggccctgcaaatccgggagggggcgaggtgtcggacgcggacggcctggaggggaaacggcttagcacaggcaagagaagggaggggctcctggaagcaggggaaggggcttcctggagggaacagacccgagcggaagcggtctgcacggggacaagagaggggtcccgagagaggggcgcccccaggggtcgggctgggctggaaaaggtggggagggtggagaggcctggaagtccgggaggggtcgagaggtgacgagccgggtcgggcccaggaaacgagggtaggggctcgcggggcgaggggtacaacggggagaagggtttggcggctggacccagccagggctccccaaggggccgggccccactcaccgtgtccgagttccgatcgttgcccggggccagcaccgtccgcgaag

SEQ ID NO: 36937 - DNA, 1078 bp, Artificial sequence
  DNA replication origin
tgatctgcagtcttcagacggggacacccaggctcaggcagggggagtccctcccccaaggtcacagggcagatggagcagagtgctgggatgcgaaccccggcctgctgattcctcctgagtgctgagccaggcttccccacaggcccaggcttcttcccaggagagaccagggaggcaggtggagatcctggagataaggcctccgatccccaccaagataaggacctggagaagaagccctgtcaggtggcgccagggcagccagctggaggtgggatggcaccacgctgaaggcagcatggctgagggacccctgcgaggggcagctggggcagtgggtgacaaagcccctgggggccgggggtgggagctaaaattggcctgcaccaccagctggcctggctccctcccgcccggctggcgccccaacacccgggactgttgctagggaacctggggaggctggccccctggtggggggccctggaacttggggtgggggagcatgaccccacgtggctgtagccatggtaaccaggtaacaggagagggggctgcaacctcccattccagaggcaggcaagtgactccccaccaggactgacaggcaggtcttagtgacaagagttggaggagagaaaaggggattagccatcctcaaatccgcaccatgcacgcatcttaacaacccagggaacagcaagtcttcattaggcgttccacttaacagacaaggaaaccaaggctcagagaggtaaggttacttgcccgaggtcacacagctagggagggacagaaacaggatgtgaacccaagtttatctgaacaattaaagtagtgctaataaccacaacagccacgacacatgccaggccctgtgcaccttagtcacatcacgtcgctggctcctgcaaacatccctaacagtggggggccatcatcaacccgatttagagataaggaaactgaggctgcaagctgggagtgaatctgcaggctcactcaacaaccaataacagccctgagctgagaatccacgggctgtctgactcatacccacagccacaatagcagc

SEQ ID NO: 36938 - DNA, 2691 bp, Artificial sequence
  DNA replication origin
aagccacccaccctcactctcctctgtcttcctttctggccacgcccagctgttccgagaagtccgcatcatgaagggcctaaaccaccccaacatcggtgaggagggaatgggagcaggggcaggccaccaactggaacacttgcaaaggagttgggggtggtggcagtggttagaatagttggagacccaccaggcgcagtggctcactcctgtaatcccagcacttagggaggccgaggcgggtggatcacttgaggtcaggagttcgacaccagtctgaccaacatggtgaaactctgtctctactgaaaatacaaaaattagcagggcatggtggcgggcgcctgtaatcccagctactcgggaggctgaggcaggagaattgcttgagcccaggagccagaggttgcagtgagctgagatcgcaccactgcaccccagcctgggcaataaagcgagacttcatctcaaaaaaaaaaaaaaaagaaaaagttagagacctggtttctcatagttgcatcactgctgtgtgaccttgggcaagtcacttaacctctttgagcctctattttctcttctggagtaggggtgataagagggcctattaccaggtcattgtgaggattgacaaagatgatgcatccaaaatgcttagtttgggctgagctatgggacttggtccagttatttccaccagcatcaacatcctcactgtcattatcattgggcagaggcgggagtgaggggtctttagtgagagaagcggagtttagctccgcctggatgtggctgcagcatttgttcattcattcattcatttactcagtaattattgattgagtggccgctatgtgccagaccctggggacacaacagggaagacaacaagacacaaatctctggcctcatggagctgacattcttgtgagagagaaagtggaaagggtggctgggcgcggtggctcacgtctgtaatcccagcactttgggaggccgaggcgggtggatgacctgaggttgggagttggagatcagcatgaccaacatggagaaaccccgtatctattaaaaatacaaaattagccggatatggtggcgcatgcttgtaatcccagctactcgggaggctgaggcaggagaatcgcttgaacctgggagggtgagcagagatcgcgccattgcactccagcctgggcaacaagagcaaaactccatctcaaaaaaaaaaaacgaaagtggaaagggtggtagagggggctgaggagtttggaaaatcttgctgtcagtagggagccattgagtgttgagttggggtgggggtgttatggttggcacatttgcatagttactgaggacaggttaggaggggccctttctccctaatgccctacactgttcccaaccattatagtgaagctctttgaggtgattgagactgagaagacgctgtacctggtgatggagtacgcaagtgctggtgagccgcccaccctctccgccctgcccctgtgccacctccccctgccgctgcacctgaccctgaccccgctcggcctctgccctgcaggagaagtgtttgactacctcgtgtcgcatggccgcatgaaggagaaggaagctcgagccaagttccgacaggttggggcagggctgagggtggggctgactgggtgcctgggtccctgggagggcgtctgagagctgggcatggtctgggctgtccagcgacctgggggcggggcttaagtctgggcaggggtgaaggtgcagagctgggtgtgctgggcatatagttgcccagatgtgagggcatccggatgtaggtttgcaggtgccccgttgggtgggtgagaggatgtttgggcatgaaggcgccccggtgggcaggtgttgcatgtgtagggcatgtgggtgtgcccagcgcgtaggtgtgtgggtgatgggggcacgaaggtgccagggtgccaggtgtgagtgtgccggagtgtgattcaaaagatgtgtgggcagtagctatgtgggtgcccaggtatgtaggtatgtaggtgtgtggggaagagagtgtagggcaccccaggtagatgggcaagagagggctgaggggtggttgtgtaagcttgtaggtactagggcatgccggtatgtgggtgcccgggtgtgcgagtgcccagatgtatgggtttccaggtgtgtggtagtgaggacacccaggtgtgtaagagtgtggggggggccaggtgtggagtaagaggacgtgcaggtgtgagggtgcccaggtatgtgggataagaagaagtgcaggtataagggtgcccaggtgtggggtaagaatatgtgcaggtgtgagggtgcccaggtgtggggtaagaggagatgcaggtatgaaggtgcccaggtgtggggtaagaggagttgtgggtgtgagggtgctggggcatgaggggtaagaagatgtgcgtgtgtgagggtgccaggtgtgtggggtaagaggagatgcaggtgtgagggtgccggggcatgtggggtaagcagatgtgcaggtgtgagggtgccgggcatgtcggctaggaagatgtgcaggtgtgagggtgtttctgccttgacgctgctgtcctgaactcaagggccataagccctggtgagttggggcggcctgtctatctacaggtatgggatatccccatggga

SEQ ID NO: 36939 - DNA, 1005 bp, Artificial sequence
  DNA replication origin
agggactggggccctggcctgcctcagtcccccaccctgacttgtctgtctctgcccacagctcaggcaccccacgggtgccccctgcctccccctccagtcacagcctggcacccccatcaggggagcggagccgcctggcacgtggttccaccatccgcagcaccttccatggtggccaggtccgggaccggcgggcagggggtgggggtggtgggggtgtgcagaatgggccccctgcctctcccacactggcccatgaggctgcacccctgcccgccgggcggccccgccccaccaccaacctcttcaccaagctgacctccaaactgacccgaaggtgagctccgcggggatggcaggggcagggcggggcggggggccgatgggacctaacctgtcttccactctgctctgtctcctgtaccccaacatttcctcttcctcctcctcctcctcctcgtttcctcctcctcctcctcctttcctcctcccctgtcacccctcacctccctcctcacactgcagggttaccctcgatccctctaaacggcagaactctaaccgctgtgtttcgggcgcctctctgccccagggatccaagatcagtaagtcccgtccatgccctgttctcgctggctctgcctccctgcctgcatgtctgacctgtgtgtgcgggcattgggagggggctctgtggatgtgagggtctgtgcgtggggtctggttgttcatttactcacagaagcacagcctatggagccagactcgggggttcaaatggcagctctgccaagtgaccttgagcaagtcactcaaggtctctgggcctggttttcctcttctgtaaaatgggtatagtaataacaatacctgtctcctagggttattgtgaggactaaatgaagtgacgtatggactgagcgtagaacattgccttggaaagtgctttacatgtgtattagttattaattgctattattcattgagcccctactgtgtgcc

SEQ ID NO: 36940 - DNA, 1311 bp, Artificial sequence
  DNA replication origin
gactggctggaggctccaggaaggtgccagctccccccgctgagccccctcatccttcttctgtgctgagcggccccagagaacagcagaggggacaatctttgcccccaaatataattcagggaaactgaggtgatgataaagggagaatcccctccctggccccttcccctcctgtagaagtgaaggcgacaagggagaggaagagtaagggccctgggaccgtggtggctcagagctcgaggtcgttggagatgcgggtgacgagggtgcggaaggccagggcggtgcccgccacacggcggaagagaactccccgcaagcctggccggggcagctggcagacctccacttcgaagtgggacaggggctcgggcccgcccgcacccccgtgcaggcaggccagcaggaacggctgtggctggcggcagcggcagcgggcggctgctgtggcctggcgcagagctgccatcagggcctcaggagggcgcgagctggtcagcttcacactccaggggaatcggagcagccggggggcggtttccgtttgatcccaaggtagatggcaactgaggcgagaagatgtcaggggtcagagatgggagcgaagaggaatgtggtggagggctgaagggacaactcttcccaattcgggacacattcctagccatcccctcaaaaaacatcttcccctgttaccccagcgacagtttcaactggatacagagctgcccagctagagaccacactttccagcctcccttgcaaccaggtgtgaccttgtctgtaaattctgggacatgagcagaagtgagatgtgccatccacatcagttccttcaaagaacctgcatgtgccaggctctcctgtcccacatctcccaggagctggacttagcagtggcacaggccagcctcaactgtgaagatgacaagggctccagggaatcgggatgcaataacctggggacctgaatgaccgcatagatcacagtggccttaccagcctggcttggccacatggtttgaatgtttgaatgagaaatttctttttccttttctttttttttttttttttgagacggagttttgctcttgttacccaggctggagtgcaatggaacgatctcggctcaccacaacctccgcctcctgggttgaagcgattctcctgccatagcctcctgagtagttgggattacaggcacgcgccaccacgcctggccccagctaatttttgtatttttagtagagacacggtttcaccgtgtcagccaggatggtctcgatctcctgaccttgtgatctgccc

SEQ ID NO: 36941 - DNA, 1303 bp, Artificial sequence
  DNA replication origin
tgccaccaggaaaggagcccttacttgataaaaattactagaattcaacttacactgaaaaaatagatgcaatggcctgatgcctggatcaaacctacctgaagccaggtgcccctggactattaagtaacataaaccaacaaatacctttttgcttaagcagcgtagatggattattagtcctaatacagcatttctcttgctgattctccatccatgcccaacacagcagccacactgaaattacccagttctctgaagatataccacatactcccacttctgggcttttgcccagggcaaactcaatgcctaactaactcctactcatccttcaacaccccattccagcattaattcctctagagcatcttccccaatgaccccaccctgcccactttctcttctgggctccccaagacaatggtttgtccggtgtctgtgtcagaatccctgtctcccacagacagagcttcatgtctctgtgtccagcactgggcctggcatggagtaggcatgggtcaatgattgtttattgaataaatttactactggagtaagaagtggcttagagtccagtgtaacatggtggctgggagtgtgagtggatgaatggggggcccgatataggaactggggcctcggggatgaggccgagttccatcctgccttcttccacgaccatccttaccttcccacccccaccgctcccattctgcagatgagaaaaccgaggctccgaaaggaaaaaccactgcctggattcccacgcctcttctttaactcatttgcaggtgagggcagggaaggaaaatcctagggtcagcattggggagggggggactctcttaaatttattgggcaacaggctgcaggtgagggggctgacaggaggagggtcggggtgtaataacttaaaaaccgtaggtgacagcggcagctcctcaagagacctttgcagaggggagggtgtggggtatttacaaggatttgtacaaagtgccccgcgccagcctggggcaggaagtgggggtttgagcgtgaggggacgggaggggaaggaatctgcctctctgacccccactcccagtcccccagattctccagtctttaggctcagcagctctccctgcccctgcccaaggcctaattttgagctgttgggaggaatggaagatttcctcagtttccctccctgcccctgccctgtccccaaagtctcctcaggtgccctcttggtagggcgagggaggacaggactggctggaggctccaggaaggtgccagctccccccgctgagcc

SEQ ID NO: 36942 - DNA, 819 bp, Artificial sequence
  DNA replication origin
agtctgtgcagtacagaagggcggagcttattcacacagcacctttggggccaaaatgaataagctggactttctccccatggcactggggaaccatggaagttcagggaacttcagggaagaggcttggtcaattcctgagagcatcctctgtgctggggacacagtggtaatcaagacagccccaacactgccctcatagagctcacagtccaatggaggaggcagatgtgtcctcaggcagcgactgggcagggctggtataggggagtccagaggtgatgcctgcctcagccagggagggcttcctggaggagaaggagccagctagacatggataggagtgcgttttaggcacagcaaatggcacatacaagggccagggagcaagagagaggacaggtcctcaacaaatggcatgtgactttgtaagtgtagaattgctgtgaggtatggggctaggggcgtcagtagggccttgaaggttatggacaggggcctgggctttcttccaagggcactgggggagccatggcaaggttgtaggtagggtagagatgggcgggtttgtgctatgtgcagggtggaagggagggaagttgacaggtcagaagatcaggaaagaggtcggggctggacagatggggagagcgcagatagatttaagagagtcctgtgaggcaaagtgggcaggacctggtaacaggtgtctggactgtggctttggctggctcagaaggtccccactggcgtgtgtggtctatgtagcctctgggtgtggagctgggatcttcaactggggacagtacagtaaagaac

SEQ ID NO: 36943 - DNA, 1365 bp, Artificial sequence
  DNA replication origin
ccccttcctcctagggactgagtggaggggaaactgaggctggctgagttggagagattcaaactcagggcaagggtgggaggcggtggtcaccctcccccccacttaaccctcgccccctcggtgccactgggagatttccgctgtgcgggggacagggagggtctcggtcgccgggaaaggagttatttttagagggcgctttgctgtctcctctgccgcaaaggccgagacccgaggcgctgggtatgggggggttcgggggcaggtgttggaggggggttcgccacgtgtcctggttaattataaccgggcgtctcgggtgtcctcgggcctcgcctccttacaagggcagccacggggccctgggtggccgctcccacctcccggggaagggggctgggcagcgacgccgttcagagcgcgggcgccagactcgcgcagatctgggcagagcaagcgctctcggcgcctcggctgtgagcaaggacttccagggctgagaggggggttctgtggaggagagtacagtatagaggaagccgctttctcctcctgggacgcgccaggattgcaggctgatcgggtctcctcctccagggagctcccaggattgcgacgaagaaaagaatgtcccttccctctgagttcctccctatcccagggtctcctgggtctccttcacatcttcttaggcaggtgaggactggcttagagaaagggagcctctgtgcctctccctcagactcctgatctgaggggggaggggagaggggtgctttagaaatatttacatggggcccagccctttcccagcaagctcagattgccgagggtctccttcacggttacggaaactgaggcccagaaaaccaaatggaactggtctcgaaacagggatctatcaggcacttcctgaggctacaacaaaacacaaaacccccgccgtcctggaggtgatagtgcaagagggtcacagatgaggggacggcacagcagcaggggaggtcgaggcaggcctctttgggaagatgacatctgagcagagacctgaaggagaacagggagccagccatgtgcggctctggggggaacagcaggtgcaaaggcgctgaggtgagaatggctgggcacatctgaggacagacaggaaggaggccaggggactggagcagatggggccaaggagagagtgggaggaagaagatgaggttggaggggagacaggagcagacccatggtgccctaggggctgtgggaggagttttaatcccattgtgattgacagtgaaaatgttagatgggccgggcacagtggctcaggcccgtaatcccagcactttgggaggcagaggcggaggcggg

SEQ ID NO: 36944 - DNA, 1024 bp, Artificial sequence
  DNA replication origin
agctgggcatggtggcgggcgcctgtaatcccagctactcgggaggctgagacaggagaatgacttgaacccaggagttgcagtgagccaagataagatagcgccattgtactccagcctgggtaacacagcgagactgtgtctcaaaaaaaaaaaaaaaaaaaaaaaagtactgtccctgtattagttaacattcaattctcaaagccttagactatttatattttattgactagggaaactgaggcacagagaggttaagttacttgcccaaggcctgcacagcaagtaagtgccggaatcaaatttgaaccctgagcccaattcttagatatcacattcccttgccaataacataatatataacataacataatgatgtgatatatgttatataaaataactttaggggccgggggcggtggctcactcctgtaatcccagaactttgggaggccgaggcgggaggatcacttgaggtcaggagtttgagaccagcctggccgacatggcgaaaccccgtctctactagaaatataaaaagtagccgggcgtggtggcagacacttgtagtcgcagctactcgggagactgagatgggagaatcgcttgaacttgggaggtggaggttgcagtgagccgagatcgcgctactgcactccagcctgggtgacggagcgagactccctctcaataaataaataaggtaattttaggccctgaaaagttttgtgaacaaaatcaagaggagtatgtaatgttttggtggaagggtgccatttagaagggggcaatcagggaaggcctgccggaggaggtggcctttgagaagagacctaaagacgatgagatctgtgggaagagagatcgaagcaggccacacaaccaaggaaaaggctctggggcaggcactgcaagaaagccacctgtctgggatctaaagtttccaaagttttagcttggccaaggcccctgcgctacaatcaccctgattcgaggtgtcctggaggttaccagttccgcg

SEQ ID NO: 36945 - DNA, 1714 bp, Artificial sequence
  DNA replication origin
gaggtgtcctggaggttaccagttccgcgtgcgaagttctgccattcccgcggggctggagccccgaggctgaacttcccacgggcggtgggcgtggccggctcacctgcgggggcgtggctcccggctgccccgcccctcggaggagccgcccgaggtcccagacgcccggcgcagcgggagcggcggggcgtgcctggcctgcgggacgcgactgatcgcagtggggcgaagcggggccggagccgcccgcggtcaggtgggtgccgggagtggggcgcgggactctcggagagccgcgatgatggggggcgggggcaaccctgggcccgctcgccctgagacggggaagggccttggggctcccggatgccccctgccccgtcctggggctctccgggatctggaggcctggctggggtcccatgccccccaccccagcgcaggtaaacagcgaggacggggcggggcctgggagggagagggagggggcccttgtgactgcgggtgagcctggtgcgcggggctgggcaggccagggtaagttggtgcggcttgcggggctgggccacgatgggagtctcctgcctgcctgtgtttgtgtgtgtgtgtgtgtgtgtgtgtgtggctttgcgtgtgtgtaagagagtgtgtcaggctgtgggtatgagggtgaaagcgactgtccgtgtaaccctgtgatgggactgtgtgtatgatgtgacacttttagcaatgtgaaaacgtgggcgacctctgactggaatggtgtgtgtgtagaattggattgctggtagcactttacgaccaagagctagtgcgactgtagtcgactttctgcttggcctgatgtgcatgtgtgtggctgtgtgtgtggctgtcttcatggcagagagtggaactggttgtaggattaggtgtgattgaccaagaggctgtgcggctgtggttgtctttctgcctgttggtgtgtgtgtgtgtgtgtgtgtgtgcgcgcgcgcgtgtggtggacagtgtggcactggatcagtgataggtgactatgattgacttttgattgtgtgtcactgtgatggtgcatggggctgggcggaactgtgtccagaagtggagctgtttcatgggacggtgcgcgtggaaccttggggttggatgagtgaggtgtggaggtgtgtgaagccgtgtgtgcgtgtgtgtgtgtgtgtgtgtgtgtgtagagaggaactagagggtgtgtgatctgcattgataccgtggctggcagtggtgtgcaacggagagtttgtgggagatgggagtggagacgtggacatttaagtgggatgctcctccaagcgggtgacaggatggaaaagggggtccgcgtcagggatcagtgtgtgggactgtgcctatgattatcagctgtgcggttgtgcacccggggctctgtgtgagtgtgggagctgctgtgtgtctgggacacagcccgagtgctggatggctgtggttgagccgtgtttgttgctgtggttgtcaatctggctgtggagtggtgtgtgtaaggctgtgtctgaggttatagagggaggttttacatcggcaaaattgtgtgaagaatggttgtggttgtcaggatgactcttgaacctgtgtggttgtgagttcaaccatttatgatgtttgtgtgtgaggtgtgagaataggtatggtgtgatatacacaagcacacaga

SEQ ID NO: 36946 - DNA, 849 bp, Artificial sequence
  DNA replication origin
tcacccacatacaaccacatgaagtcccatagaggggggcccccacccactatgagctgggcttcagactctcagctgtcacatggccagtgtgacatacctggaccacacctatcacacgtgtgtcccgacaggccctgggctggctaagcttgtccgatggaggagggcggagcccctgttcccccagggtccatctgttgcctgggagccaacacatggccccatcctcattccccccaacctagaggcctcctgggcttctgggggccctggcccctcggccctctcctcccaccccacccacccccagtggtctgactggttcccgacaaaaacaccctaagaatgagctcacgcagaggctgccgcctccacacgccccgcctcactctgccggcagaggagggtgcctctggtcccaggtcacacggccaaccgggagctctgggccaggggatccaagggccttggggtggggaaggctggccaggtgagctgagggcagatgggggaccccaggctagctgtttgctttctcttggttaattacacataggatttgggaactgtcctcagggcagaaccctgggttgggaggacagacgaaggtagacaagactgttccagatgagagctggctgggatgggtgtggagactgggatggagagggtgtggaggcagagggctggccaggatgggtggagcagggaagagccaggatggggagaagttaggggtcctgatggccattatgggaatagaggctgggggccaactgactggcccgggcaatgattccccaaacccctcaccattgctccccaggagcagcaatgtctgtgcag

SEQ ID NO: 36947 - DNA, 794 bp, Artificial sequence
  DNA replication origin
ggaagtgcagggctgggcccagagcgcctgagccctgaggagctggtgcggcagacgcggcaagtggtccaggggctggaggcgctgcgggcagagcaccatggcctggctgggcacctggcggaggccctggcgggacagggcccggcagccggcttggagatgctggaggaaaagcagcaggtggtgagccactcgctggaggccatcgagctggggctgggcgaggcccaggtatgagggggccaggtggggagctgggggaaggtcagctgagggcggagggagggccaggcatgagggggacaggtatgtaggggactgggagagggttcactattgcagaggggcacactttgggaggctgaggtgggcagatcacttgaggtcaggagttcaagaccagcctggccaacatgggaaaaccccatctctactaaaaatacaaaaagtagctgggcatgagggctcctgtaatcccggctactcaggaggctgaggcatgagaatcgcttgaacctgggaggcggaggttgcagtgagtggagatcgtgccattccactccagtctgggtgacagagagagactgtcccaaaaaacaacagaaaaaagtatggcagagaggcacatccggggcagggggaggcctaggggaaccaggcctgggaaggggaggctccaggtcagagatggagtcccttggcagctttagggggtccttgtgtgtgacagggacccctgaaccagatggcattcttcagtaaactgtgggtcctagggcaagtttgggggt

SEQ ID NO: 36948 - DNA, 778 bp, Artificial sequence
  DNA replication origin
cccttggcagctttagggggtccttgtgtgtgacagggacccctgaaccagatggcattcttcagtaaactgtgggtcctagggcaagtttgggggtaaaatcagaggggcccctgggagcctctgagggcactggggccatgttggcagagtctctgcagaatctgggggtgtcgtgcatagtagtggggtgctacggcctgactcgaggcctgggctgggtcaggggccgtctggcagggcaggaaccaacctcgacttgggacccccaccccgggcaggtgctgctggccctgtcggcacatgtgggtgcactggaggcagagaagcagcggctgcgctcgcaggcccggcggctggcccaggagaacgtgtggctgcgggaggaactggaggagacgcagcggcggcttcgggccagcgaggagtccgtggcccagctggaggaggagaagcgccacctggagttcctggggcagctgcgacagtacgacccaccggcggagagccaggtgccacgggcagggcgaggcggggggtgctgggcccttcatagagccccacagtcccccagaccctccttagaatcccacagtccccaagatcctccttagaatcccacagtcccccagaccctccttagaatgccacagtcccccaaccctccacagagcccccagacccaccagaacttccacagacgcccccactagctactccacgaagcccccgagcctcgccagacccccagggggcctctgacgctcgtgaccaccac

SEQ ID NO: 36949 - DNA, 836 bp, Artificial sequence
  DNA replication origin
ccacagagaagcagaatcaagcctaagtctgtctgaatcccgaacccagcctcttcgctgtaaagctctcctgcctgagcagtgggggaagccaaggaaggagggcggccccttgcccccatctcccctcccggccccagccctagcctctcccactcaccatagggcagaggcagacccgtgccagcgtcatggtgaaggttgccatggtgacggggtggaagtccaggatcttggggtagatgtccagcggggacagtgtctgtggcgggacagtgggagggatctcagcaggactgggcagggaccaggaggcccatggagggaggtcagggactaggaggggacggggaagggtccttaccccagatgtgatgatgacagactggaaacgctcaaatacgggtttgatggccagcgaggcgtccatgcagctggagagagatgagggcagtgagggcccggggggctgggcccccgacccacagagcattcacaccctcaccgggcagggtcccacctgaagtgcaggatggggttggcaatggtcggggttctgtcgtcaaagggctcgatgatgatggtgaagcctgcagagggcaggcaaggaggggtgagattaccccactacagccacagctgcacccactcagtcattccctctcctgctccctcgcttcaccccaatctccaccccgtactgcctgggagtaaatgcgaccaaacatgactgcttaagccccaaaccaggcatctgagtccaaaatacaccccaacctgtccgcttcgggcccacacctgtgcaaactttcacgaaggatcccaagtagagagcc

SEQ ID NO: 36950 - DNA, 955 bp, Artificial sequence
  DNA replication origin
cctgcctgtgtgtggttgtggccgagtggccctgcacatgcgtgagtgtgtggacgtggtatccgtgggactctgtgggatgtgggtgttgactgcattcctctgtgagcccatggggttccgacaccgtgtgtgtccccataggtgcgtgagaggcagtgggagaggctctgggtgtgaatgcgtgaccatgtggccatgcgggattaatgccatgactggggggttctgggtgtgattgtgcgtctcttgttttgatcagaacccacttagggccaggtgcagtggctcacacctgtcatcccagcactttgggaggctgaggcaggtggatcacgaggtcagaagttcaagaccagcctggccaacatagtgaaagtccgtctctactaaaagtacaaaaattagctgagtgtggtggcaggcacctgtaatcccagctacttgggaggctgaggcaggagaatcatttgaacccaggaggcggagtcgagatggtaccagtgctctccagcctggatgacagggcaagactccatctgaacaaagaaaaaaaagaaaaagaaaaaaagaacccacttaggaggtcgtgctagcaggtgtgacaagtgaccacatgactctggagtgtctgattattgctctgtctgtgccattatgcggcaatggctatttgtgacatgcaggtgtacagcgtgggggtgcaagtttccaaaacaggcccagtgcccaccctcactgagtgctcattggctggggagacaggcacgtgaccgtcgtgatggcggaggcagggctgctggtcctgctcatgcttccgtctgccccccgaccccgtctctcctccccgccagattctgtgctgaacgcctccggtccctgctgcatactctggagatcaccgaccttgctgacttctccccgctcaccctccttgctaactttgccacccttg

SEQ ID NO: 36951 - DNA, 2040 bp, Artificial sequence
  DNA replication origin
ccctcccagccccagctcatctctccgcaggatcaaagagacagacgagcagcgcctgcgggacgagtaccggcgtctggtggaggggctgcgggaggccagcgccgcccgggagacggacgcccacctggccaaccccgtgctgcccgacgaagtgctgcagggtgagccccgaccccccgctgccccccagtccctttcccgcctccccgtcgccgctgatagcgtctcctcgcagaggcagtgcctggctccatccgcacggccgagcatttcctgggcttcctgaggcggctgctggagtacgtgaagtggcggctgcgtgtgcagcatgtggtgcaggagagcccgcccgccttcctgagcggcctggcccagcgcgtgtgcatccagcgcaagcccctcaggtgcggccccagacagcgcgcggggtgggggcccggcaggtcccggttatgcagagccgtgtcctccacgcctgtagccccaggtcaccactgcagcatcaggagtgagtgagctgggcgaggcacgtgggaccttgtctggtctgacctgggaggtccgggagcaaggttggagctgatcctgggtccgtgcgtcgggcaggggcctggcaggcaacacctggctggattggagaatctcccccacccaagagagagtgggagcaccatttacagaggggcgggctgggggaggagccaaggagggtgggaggtgagagctgggagctaagccaggccacagcggcagggagggagtgtgttgagaaccaactggtgggggcctggacaggggcttctgctgggagcagaaaccagtaccagggcctcgcaggctgggagctggaggaggtgtccccggcccatgtatcttcccaccgatgcctctaatcttccaaacctgagggcaggggcgtccccatggagtagtctgggcgcattttgggggagtcagtctcttgaggcacagggcaggcagagaatgaccaagggatacgagggggcttttcctttgggtaagtcatgggtcttctttgaactgcagtttcctcctttgtaaaatggccaaggagtcgggtctttacttcacagggttctttggtgggttaatgagagagcagcgaagccaatcacctaccctgccctgagcactaaggaggagctaagccctttatgttccttacctcagttgcacccccagtacagcatccccaccctgcaaatgaggacactgggactcccagaggggaagcctttgcccagagccacacagcactgtgcccggtagttggggcttgaagccatgcctgtgggctccaaaggccctggctgccctgcctctgtgggtgaggccaccttccatgtgggtttgcccatcttccccaggattggagacttgtgagggcaaagaggggatctcagtcactcaacacacattccccaagtgcctgcttcatgctggggacacagccgtagaggctccatggcccagtggaggggacagactcatcctcagctagcgaccagccggggtaggcgcctggggttagaggagccaggctgggagggctgacgtgcgggaggcaggtttgcaagtgtgactgcccacctggcttcaaagccagctgctctatgaccctgcctcggccctgcctgtgtgtggttgtggccgagtggccctgcacatgcgtgagtgtgtggacgtggtatccgtgggactctgtgggatgtgggtgttgactgcattcctctgtgagcccatggggttccgacaccgtgtgtgtccccataggtgcgtgagaggcagtgggagaggctctgggtgtgaatgcgtgaccatgtggccatgcgggattaatgccatgactggggggttctgggtgtgattgtgcgtctcttgttttgatcagaacccacttagggccaggtgcagtggctcacacctgtcatcccagcactttgggaggctgaggcaggtggatcacgaggtcagaagttcaagaccagcctggccaacatagtgaaagtccgtctc

SEQ ID NO: 36952 - DNA, 1947 bp, Artificial sequence
  DNA replication origin
gactccgtctcaaaaaataaaatattagttttggctggctgggcgcagtggctcagcctgtaatcccagcactttgggaggctgaggtgggaggattgcttgagaccaggagtttgagaccagcctgggcaacatagcaagacctcatctcaactaagaagacaaaaattagccgggcatggtggtgcacacctgtggccgcagctactcgggaggctgagtgggggaaggatcacttgagcctgggaggtcaaggatgtagtgagccgtgattgggccactgcattccagcctgagtagcagagggacttgtctccaaaaatatgtatgtataacttgtagttgtaagaatgtaacaattttgctactctttttttttttgagagggagtctggctccgtggcccagggtggagtacagtggcatgatctcggctcactgcaacctctgccttctgggttcaagggattctcctgcctcagcctcccgagtagctgggattccaggtgtgcaccaccacacctggctcatttttgtatttttatttttacttatttttttgagatggtgtctcactctgtcgcccaggctggagtgctatggcacgatctctgctcactgcaacctccacctcccggatacaagcgattctcctgcctcagcctcccgagtaactgggattacaggcatgtgccaccacgcctggctaatgtatttttagtggagacagggtttcaccatgttggccaggctggtctcgaactcctgacctcgtgatctgcccacctcagcctcacaaagtgctgggattacaggcgtgagccaccgcgcccagcccaattttactactcttgtatccctgcattaagttcccacgcgtcttaactaataatgcaacagactgaggttcaagttgtccaaaaccccagccagctgggaggtgtggagaccagggtttgaagagtggttgggtttccaccctgtctgggtgctaagatgccccacacccccaggtgacacccctgcgctttgggaaggacgtcgatgggaaatgccacagcctcacagcctcctatgtgcgggcgcagtaccagcatgacaccagcctgccccactgccgattctatgaggttactggagggcagggctgagggagggaggcaggacaggtagcctggggcaggcagcctccctgacccctggcactcttgtcccaggaatttgatgcccatgggcgtgaggtgcccctccccgctggcatctacaacctggatgacctgaaggccctggggcggcgccagggctggtgcccatacttccttgctcgatactcagtgaggaggctggtgggatgggcagaggggcgagtgtgagggtgtgggctgcccgcccgtctcctgtctgcccatgtctgtctgttgcttgctgtgagtctgcctgtctgcatctccctgttggtgggtgcccgtatctgttggtctgtctctatccatctgctcatacttctgcctggcctgtgtctgcctgtgcaggcctgtgtgggagtgacgggccagtgtggccaggggtaggggtaggggttggggtggcagggccctggtaaccctgctccccggccccccagatcctgcatgccaatgtggtggtttatagctaccactacctcctggaccccaagattgcagacctggtgtccaaggaactggcccgcaaggccgtcgtggtcttcgacgaggcccacaacattggtgaggggggcgccaggggccaaagggatgccagcccctctgagtgaggcccctgcaggcctgcctgagccggctctctcccccttctccagacaacgtctgcatcgactccatgagcgtcaacctcacccgccggacccttgaccggtgccagggcaacctggagaccctgcagaagacggtgctcaggtggggccgg

SEQ ID NO: 36953 - DNA, 912 bp, Artificial sequence
  DNA replication origin
agatgactgtgtcgttgcacgacgccgcgcagtgcaagggtgtcctaggcgtgggggtggggggttgcggggaacgatgcgtgagaggctgcgcgtccgcccacgggggacccagcccaccgcgcgggtcggggctcaccagccgtggctgtcgggggagttgacattggcacccgcggtgatgaggaaatccacgatagagtagttggcgccgcagatggcgttgtgcaaggcagtgatgccctcctcgttgggctggctcgggtcgttcatctgagtgcaccgggggagggggaagactcagtcccgcggctggcatctgcgatgcccccgccgtgcccacctcccgctcagcagcgctcacctccttcaccgcctgctgcaccacctccagctccccggtcagcgccgcgtccaggaggagcaccagagggttgaggcgcgcgcggcgggccttgcgcggggagcccgccttccgcagcacagagcgcatctcctgggggacagggcgcagaggtcagcgacttggagggattgttagtatatccatgatctagagtaggaaacagaggtccagggacttgtggcacccatctagacaggggtagaactgggattccctcgggatggggtgagggggtgccttcgatctcctcctagagcctccagttccctgccatagacagggaatcctgtgatttgagaatcttgggccctgaaacttgggagaaagctggggggccatgggattggtggcaaagtaattctatcagttcaaaacaatgattgtggaagccagttatgcaattcacacacagtctcacatttcttttgttaataatgaatgcaatgagacacacatgacaaaatgttaccaggagtgttcattccggatgtttggaatttgagcat

SEQ ID NO: 36954 - DNA, 1236 bp, Artificial sequence
  DNA replication origin
cggccgaataaaaacctcttccttctttaatccggtgtctgaggagttttgtctgtggctcgtcctgctacagaattacaggcacgcgccaccgctccgggctaatttttgtatttttttagtagacagggggtttcaccatgttggtcaggctggacttgaacctctgacctcatgatccacccacctcggcctcccaaagtgctgggattacaggcgtgagccaccgcgcccggccgagactcactattttataagaggagagagcaaagccaggaacagtggctcatgcctctaactgcagcaatttgggaggctgaggcaggtggatcatttgaagtcaggagtttgagaccagcctggccagcatggtgaaacctcatctctactaaaaatacaaaaattagccaggagtggtggcatacacttataatcccagctacttgggaagctaaagcgggaggatggcttgaacctgggaggcggaggttgcagtgagccgaggtcaagccactgcactccagcctgagtgatggagcaagactctgcctggaaaaaaaaaaaaaatagaggagagagcagagcagacacaagagacacagagacagagagggagagaagagagggtgactgctttgattcaggcaagacttctcagtcccagaatgaacccactgttgtgccaagactcagtcatgtccaggtgtatgactcgagattgctgaaggaatgcccggggcagggcacaggcacaggttattggagagaaggagcagagaacatctctatgtggccaagactcccagatggccctccatatagtcacacacagctatcctaaagactacatttcccagcatcccattgcaatgaggctcctggccagtgggagcaggcagagtgatgtatggaactcccaggttctgcctgaaacaggaaagggcactttctcttcttctttctctcttcctggctggagggcagacttggtgacagccatctaggaccatgaaggcaggcttactccccgatggatggcagagccccaggtagatagagcctgggtcctgactccagtgaggtgcctacagtcctgggctgcaaactcttggacttctactcaaaagaggagaaaacttcgatctcatctaagccactatatttggggggctctttgctacagctcctggattcatgtagcaaacataccccggtttcctcctgtattacttacca

SEQ ID NO: 36955 - DNA, 1049 bp, Artificial sequence
  DNA replication origin
ggggcaccggcaaggtgaggaggcgacgcctggggaggagaggctggggaaggtcgaggagtggggtgggggagcggggtcaaggccagtctccccctcggggctgcgatctgggtctcggcgcccgttcccacgctctcccttcactgtgctgggtttctgctccttcctcaccctttcttctccctcactcccagggcttccctcacctcctctcccttctcgtcttttgtctttacctcccctccaccttccctctctcacccgatccccttctcccttccctcttccccaggacaacctcactagcgccaccctgccgcgcaattacaaggtctctcctctggccagcgaccggcgttcagacgcgggcagctaccggcgctcgctgggctccgcggggccgtcgggcactttgcctcgcagctggcagcccgtcagccgcatccccatgcccccctccagcccccagccccgcggggccccgcgccagcgtcccatccccctcagcatgatcttcaagctgcagaacgccttctgggagcacggggccagccgcgccatgctccctgggtcccccctcttcacccgagcacccccgcctaagctgcagccccaaccacaaccacagccccagccacaatcacaaccacagccccagctgcccccacagccccagacccaaccccaaacccctaccccagccccccagcatccccaacagacatggccccctgtgaacgaaggtgagtcagcaatgagggccctagaggactgggtgaagggaggacaaatggcagggggaccagaccagccctgggaggtggggagatcacagccaaatgcctctttacaagcactgtccctgcagagagctaggccaggtgagtttgggaatttgggtaggagccagggatagctcaaaggttaagtgtggaccctgaagccagactgcctggttccacgctgtgtgaccttgggcaagtcacttaacctcactgggcctcaattttcttgagtgtaaaagggaaataatgggccgggcacgg

SEQ ID NO: 36956 - DNA, 1132 bp, Artificial sequence
  DNA replication origin
gaggcatttggctgtgatctccccacctcccagggctggtctggtccccctgccatttgtcctcccttcacccagtcctctagggccctcattgctgactcaccttcgttcacagggggccatgtctgttggggatgctggggggctggggtaggggtttggggttgggtctggggctgtgggggcagctggggctgtggttgtgattgtggctggggctgtggttgtggttggggctgcagcttaggcgggggtgctcgggtgaagaggggggacccagggagcatggcgcggctggccccgtgctcccagaaggcgttctgcagcttgaagatcatgctgagggggatgggacgctggcgcggggccccgcggggctgggggctggaggggggcatggggatgcggctgacgggctgccagctgcgaggcaaagtgcccgacggccccgcggagcccagcgagcgccggtagctgcccgcgtctgaacgccggtcgctggccagaggagagaccttgtaattgcgcggcagggtggcgctagtgaggttgtcctggggaagagggaagggagaaggggatcgggtgagagagggaaggtggaggggaggtaaagacaaaagacgagaagggagaggaggtgagggaagccctgggagtgagggagaagaaagggtgaggaaggagcagaaacccagcacagtgaagggagagcgtgggaacgggcgccgagacccagatcgcagccccgagggggagactggccttgaccccgctcccccaccccactcctcgaccttccccagcctctcctccccaggcgtcgcctcctcaccttgccggtgccccccagtccatccaggctgctctccctccaaggcaacagctgcaggctcggcgaggcaggccttgcgaagacgtccaggcctgcggggcgggaatcattagggtctgtggggctgcctctcctccgggtcctccattccccgggcctccaccactcacgttcatagctcgctgtctgcgaaggcttcttctcgtacgccacgtccaggtcagactcgttccaggctttcggaggccgccggcgcagcgtcaggtcgtctggggagaagtttccagggaggatgag

SEQ ID NO: 36957 - DNA, 968 bp, Artificial sequence
  DNA replication origin
ttcggaggccgccggcgcagcgtcaggtcgtctggggagaagtttccagggaggatgagacgggaggggtggcgagccccggatcctgcccgctttgaccccgcgagtcaaaggccccgcgaggggcccctgggttcaccttgcgcgcgcagaggcggggcgaatgcgctgccgccggagcctagcagggagctcccgaaggcggacgctggcgcgtcgtaggctgtggcaggggggcgcggtgacggcccacgctcggggaagaaggcctggggcccctccgccagggggctgccgcggggggagcctgcgcggcccaggaagtcgaaaggcgtggggggaccctgctggcggagcgggcctggcccgggccgcggggagggcgcacggccgagggagctgcctgcgccatcgaaggcgcggggccggggcgaggtcgcgcggtccaggctgccgtaggcgtccggctgcaggtagagcggggtgcgcggcgacgacggccgtcccttgggggacagcgggctgtaggggtgtagggttggggcactctctgatcgtccgaacggggtgtctgcgccgtcggtggccgccttccggggggaccctcggctgccgaagggctcagggatcgagctggagctgtaccggggcggctgtggggaggccagggcattgagggatggatcaaaggagacattagtggaagggttggtgtgtgggcgggggtgtcaagagagatcactggaggtcaacccagaggaggctgaccggccatggaaattcaggcacagagagcccaggtgagtagtggtggggagacagccctgaatcagcactgtggctagcccattactctatgtcacctttatgccacttaggtaaacacctctttccttctgagggtccctttagatgtccacttccactggtcccctcttttctatttctttctttctttctttctctct

SEQ ID NO: 36958 - DNA, 1004 bp, Artificial sequence
  DNA replication origin
gaaggacctggcaatattgaaatctccttcccaagggaaaacaatcgacgggtgatgagcattggctatgaagaaaaggaaagtgggctaaggatgtagggcatgatgggggagaggaccttcctactctatttatttatttatttatttatttttttgagacagagtctcgctcttttgcccaggctggagtgcactggcaccatctcggctcactgcaacctctgcctcctgggttcaagcgattctcctgcctcagcctcccgagtaactgggattacaggagcgcgcctggctaatttttgtatttttagtagagacgggtttcaccatgttggtcaggctggtctcgaacctcaagtgatccgcccacctcggcctcccaaagtgctgggatgtacaggcatgagccaccatgcctggccccttcctactttagataggaaggtcaagggagggcctctctgaggaggtgacatcttggtagagacgtgaaagaggtgagggagtgagccatggcgacatctggggtagagggaacagccagtgccaaagccctgaggtcagagagagcctgccgtgttcaagggcagaacgaagtctggtggggctggagtagagaaagcaaggagaagtggtagaaggtgtagtttctgaggcaaggagcagggacagatctagagccttgtgggtgatggtgacagctttggctttcactctgaggcaggagccacccaccagctctgagcagaggagggacatgaggacttagttaggggacagacttccagggggcgagggtgtgggcaaggagctggtgaggaagtgacttcagtggtccaagggtgaaacgctggtggctgggaccagagtggaggctgaggagtgggggagaagtggctgaattcagattttgagctctcagccttctggaagggacattaggaggaaggaggatgggcagccctgaagaggggagaggggtcaagtgctgtggctcacac

SEQ ID NO: 36959 - DNA, 1484 bp, Artificial sequence
  DNA replication origin
atgtctgagttggattcaaacttaagtctctccttactgagaggagggaccaagttggatctcctgcgatctgttctccactgagccctgccaggattctgggcacacagaagcgctcagtaagggctttgaaacttaacagtttgggagccagatcctcaggccacatctctctcctcccacgacctccgcggtcctccagaaccatagagagttgtacagagatcgccctgctctatgctctactctcctggggagcggggccagagaggccggaagtgctgcgagccctgggccacgctggccgtgctggcagtgggccgcctcgatccctctgcagtctttcccttgaggctccaagaccagcaggtgaggcctcgcggcgctgaaaccgtgaggcccggaccacaggtgcgggaggcggagactgcgggtggagattggcgccgcggaagccaatcattgccgagtctgagagatggacaaggccaggcgtggggagggcgtccagatgctagcctcgggggccggacgaacggaaggcgggggatggtggggacggagccaatagaatccggtgggggcgaggggcggagcgatgggacttgtggacctgtaaggggcggggcgagccgaaggtggaggtcaaaggggcgtggcgttacagagcctctagcgctgggtgttggggacctgacgctatggagctctcggagttttgtgggggacggctgtgagtggggggttcctgctgcgggatgagaacgtagacgccagtggctcactcgctcctggcaccttccctttcaggctccagatggaccctgggaaggacaaagagggggtgccccagccctcagggccgccagcaaggaagaaatttgtgatacccctcgacgaggatgaggtccctcctggagtggtaggacaaggagatgcggggcccctgggaggctgggggctgttaggacgaagaggataggatggggcctgtgggaccagggtgtgggttagtggatttgggggccacggacgacttggggaaacagtccttggtcctccccaggtcccagtttccccatctgtgaaatggatgggtggttctaagagagggctaaggcagaggccagacactggcattcagcaggtagcccctgatgtgttttacgaggccagcaccctgatttttcaagacatgaatttattgctcgtgtttaagaatcgccaggttttgcaatcttaaaaaaatctacactttagacatattttggtaaatggaaggacctggcaatattgaaatctccttcccaagggaaaacaatcgacgggtgatgagcattggctatgaagaaaaggaaagtgggctaaggatgtagggcatgatgggggagaggaccttcctactctatttatttatttatttatttatttttttgagacagagtctcgctcttttgcccaggctggagtgcactggcaccatc

SEQ ID NO: 36960 - DNA, 1280 bp, Artificial sequence
  DNA replication origin
tccgcctctttcttccaaacgccccaagttccagaattcagccgcaactccagtttgggccactccccagctacggcccctgctcccatcccaaaccttcccctcctctcaacttcgagccctttgttcgccccggaacgggtggggtggggacggagactgtaaggacgggaccctcaccgacaattccgccaaaggggacctgaacggggggcggagagcagcccggccgaaggctctggaagcgggcaccgccggggggcgcagtgaccaggctggcgtccccgcccgcctctaaacttagccgcggtgacgcgcggcccggcgatcgcggcggggccggggacgcaggggggcccgagtggaggggggcggctcggctcggcgagcctctatttatagcgcccggagcccgaaatagcgcggagcggagcggccgggatgacgcgggagccgccgggggctgactcacccggccccaagcggaggcccccggatggggggcagtggaggcgcctagcccctactccgcgtcctcccgggcaccttttttggtgggacatcccaagtctccgctggagaggctgtggatggatgtacagcaaaggaaagatctgcagcatgagagactgaggttggatcagaagtgggacttccacacacacaaaaaaccccagaactgggccgggcgcggtggctcccgcctgtaatctcagcactttgagaagccgaggagggcagatcacctgaggtcaggagattgagaccagcctggccagcatgatgaaacctcatctctactaaaaacacaaaattagccaggcgtggtggctcatgcctataatcccagctactcgggaggctgaggcaggagaatcgcttgaacctgggagacagaggttgtagtgagccaagatcgcgccactgcactccagtctgggcaaaaacagcgaaactccatctcaaaaaaagaaagaaagaaggaaagaaaaataaagacagaatggaggacctatttatacaaaatgagaaaggcggaaagaggggaggtgaaccagatatacacacttgtttctcaccagcaagagaactgggatgttctggaggcaaaggaatggactcagggaccctgggtagttgccattccagagcacatgccattctccacttgtcacgatttcttgcatactgttcccattccctagaatgttcttccttgccttctcagccttgagaactcatgtacctccaggacctggtgcccagggcaattcctttat

SEQ ID NO: 36961 - DNA, 1792 bp, Artificial sequence
  DNA replication origin
ctgcgggggccaccagggggcgcggcgcccctgcccaaaactccgccgtcggctctgaaccccggcggacgcgtcccgacgcccctggaagattctgcgccctgccggctcgccggcgcccgggagcccgggaggcgggtgtgcacgcggggtgtccagggcgcccccgatcgaggccccctcgccgtgcctcggggtagggggacggctgtgactcaggcgcgcgctcctccccggggccctcagtggtcgcgagggggcgcgcacggcctcgggaacccgcgcggcgccgcgtccatttttaccccagctccgctaaaaatagttgccgcgctccgagccgagcccgaaatagcggcccccagataaggcaggacgactcagcgcttccggggagcggaagggggagcgcgcggggggagcggtgctgggcgcagcccggccgagcaggcgccgctgtccccagcgcacccccactctgccctggcggtcacactcgcccccgactgcgaccccgccccgccgctagcctggctgccttcctacgtcccccacattgtatcctcatcccctgtcccccatcctcagcttcacctccattcctcatcataactcccccctcccctacacccccagcgatgtcccccactggtactcatccgcatcccccagcctgtcctactcctgtccctatttcccctctccaccctcatcgccaatctcctgtcgtcctgaatctgccccttaccatctctgtcctcaaggccaacctttatgggggcagagcagggcgagaggatcacagggagtcaggagacctgcgggctgagggctgagggctgggggtgaggatctgatttcttggtttgtttctactgtgggcaggggtaggcttagatctgggggttggagcatgggacacttcagtctggcctagtcttcagagctgaggcgaggcatggccagcatcacggctcattctgtgaccagggtcggggctcaggctggggaaggatgaccgtctttgtcaccaaatttgatcactgtgtcaccagagttagggctcagccttgagccgtttctttatttacccacctccactaatattttttatttcagacaaggccttgctctgtcgcccaggctggagtgcagtgttgcccatgctggaatgcagtgctgggatcttagttgactgcagccttgaactcctgggttcaagagatcctcccacctcagccttcctagtagctgggactacaggtgtgcaccagcacacctggctaatttttcatttttttgtagagacagagtctccatgccttgcccgccttgtccaggctggtcttgagctcctggcctcaagctatcctctggcctcctcctaggaaggcactgaaatgacaggcatgagctacagagcccgcctccactaagattctttcctcccttgcaagtcagtgattggacacaacagctccaggccttgggaacagtcagaactctgttccctgggcctaggtcttccctttgcactgagatcatctaagggcctccccatttccatatcctgagattctcagtgcccactccaagcatcagtgtcaggcctcaaggacctacactgcatgttctgggggtttaaagggagcacactgacttccctgagggtgacagaggtcagaatgagtgactaaggtcttgggcctggccctgaccctgcagtgggtgggagagatacccagttgaggcccaggtctccacccaggtagcagggtggatggcggggggg

SEQ ID NO: 36962 - DNA, 1416 bp, Artificial sequence
  DNA replication origin
gtgggaggattgcttgagcccaggagttcaagaccagcctcgacattatagtgagatctcatctctgggaaaaaaattttttttaattagccaagtgtggtggcatgcacctgtggtcccacctactcaggaggctgaggtgggtgggaggatcggttgagcccaggaggtggaggttgcagtgaaccgagatggcaccactacactccagcgtgggcaacagagaccctgtctcaaaaaaaaaaaaaagaaaaagaaaaaaagttttggtaactacaaaagggtataccttggaaaagtaaatttccctcccactctgatccccacttctcaatattaactattttttatgtatcttggccagtaggattcactgagctctcacgatgtccctggcctatgcaaagcccatcacagaaatgaagtggctggaatcattcagcactcagtgagtaggccagaccccattgctatgcccattttagagatgggaaaactgaggcttggagaggtgcaaggatgtgtccttttgagggcccggttctgaaggcttttcaaagttgaggcaaggaagtggatgagatcaaagaggcaaggttcaggccaggatacaaatcccagggagggtgacaggggtggggagtcaaggaaggctgcctggaagaagactaagggtagccaggaaggcatcttccagaaccttctgatggagggcttggatggaagtagataactctgtttggcaggctgaggaaccaccagcagcagggcgtggcccctcctcagacccacagcaccccagaggtatgtatagaagaagcaggctgcttaatgacatctcagggacacatctcggtgatagcacagccggcttagttatgacgtctgagtgatttgccaactgccttaagaccagcatccctagtcatgccccgcgggggggatgaagataagaggaagtgacaggccatcgggggaggaaggggagatgcagtcacacacagaccagggactcaggagctgagggatgtgtggtgccctctgcactagggaggggtctcccagctgcctggatgtgagggtccatcttattgatttgtctagtgaaggaggccaggctccaaggaggtatggctgtagtcagtcacactcagtttgggatggggtccgcccaggggctgcaaggatcagtcactgctgtgtccccatcacctaaggcagtaactgggacacagccggcgctccatacatcttactgaatgaatgaatcgaatgaaaagggtcagcaccgtctgggactcagtttaccctcgcggtcattgggctgcttcaaccaaggggatcgctaagaacacccctccccaccttgggtcccagatcccagatcgccagtgagtaagaaaacgggttcgcgcc

SEQ ID NO: 36963 - DNA, 1033 bp, Artificial sequence
  DNA replication origin
aactgcattatttctgtgcttatttctgggccccgtccttgttcgatctgtcgcgtggtctttccttatatctctgcgccccgacagttccctgttgcttcggcctccacgcatgtctccgaatttcttgctccggggccctgatctctgtatctcctctttgctgcgcctcagtctccgggtttctgcgccctgaggcctctgggggccaaggccgagggtttggcgcgcaggcctgggtgctccgtcccggcccggtggcctcctgaccgcccagcctcatctggcggccctggggcggggcggggcctgttgcctggagaccagtgttttgccgcagcaaactgggtctctgggccaccgcgggggggcggcctgggaacccgcgccgggcgtgggagcgcgcccgggaggggcgcgggccggccttgggcctaggggcggggaggggctccggggtggggggcgaagcggctggctgggggagggggggaaatggggaacaggatttggggagatgaggtagggacatggggcagttcgaggagacaggagggaactgcgggaggctgggattaggaggacaagagagtgtattggggtcagttggagggaagcgggtgagtcgggggctagggagggctgggagatattgaggaaagcttgggggagcccggggaggggattgggagggcctgggcaggatagtgggggtagttgagggggtgggaagaggggcccggtatggatgagtgaaggaaggaccggggacactggaagtttaggggattcgggaattacaagcgatgagtgtgagggcagagagtttcggggggcgttgggaaggtgtgaaaggacggggtacggggtgtagaggagagaggtttgccggttcggagaaagaaccgaactgcagggccacaggagggtagagttgggaggagataggatccccagggagaaggaggctaaaccgggccggaaacaagggtgaatcagaagagggggagcccctgccacttccaggttcctg

SEQ ID NO: 36964 - DNA, 886 bp, Artificial sequence
  DNA replication origin
gctcccccaagctttcctcaatatctcccagccctccctagcccccgactcacccgcttccctccaactgaccccaatacactctcttgtcctcctaatcccagcctcccgcagttccctcctgtctcctcgaactgccccatgtccctacctcatctccccaaatcctgttccccatttccccccctcccccagccagccgcttcgccccccaccccggagcccctccccgcccctaggcccaaggccggcccgcgcccctcccgggcgcgctcccacgcccggcgcgggttcccaggccgcccccccgcggtggcccagagacccagtttgctgcggcaaaacactggtctccaggcaacaggccccgccccgccccagggccgccagatgaggctgggcggtcaggaggccaccgggccgggacggagcacccaggcctgcgcgccaaaccctcggccttggcccccagaggcctcagggcgcagaaacccggagactgaggcgcagcaaagaggagatacagagatcagggccccggagcaagaaattcggagacatgcgtggaggccgaagcaacagggaactgtcggggcgcagagatataaggaaagaccacgcgacagatcgaacaaggacggggcccagaaataagcacagaaataatgcagttacacacgggcaacaccgaggccggcagggacgcccctgatggcagaataatccatctttagtcctcaggacctttgcactcagttcgagggacttcccctctctgactctgtttctgtatttgtaaaatggggacattaatacgcagcgcttagcaaatcaggctgttctgacgattcagtgaattcgcagacccagagcttgtagcacaatt

SEQ ID NO: 36965 - DNA, 1645 bp, Artificial sequence
  DNA replication origin
acagcgcgggaggcgctggacagacggacatgccggggaggagggggcgcagacggacagatacccgagcggaggcggtcccggggcagacaggaggagcgggcgacaacagacggcggctgtctaaagggaaaccggtaatttgggaacccggttctcccccgcttccatcaccgcaatcccctccaccccccgccccgggctcccggcgggccggtctgtccgcccgggccggtcctggctgcgccctgtgcggccgcgccacccagcccgggacaaacagccctcgcgttgctaggcgacggcgttccacagtccgtcgcgtcaccgcgtctgcgcgggcgtggggggggggggggggggcgggcgcacggagacggcggccgcgtcgtttgttgacgttgcccggcaaccggcgcggcgctgccgggcaacgccggccgactgttcattctctctctctttttttttttttttttgagacggagtctcgctttcgctctgtggcccaggctggagtgcaatggcgcgatctcggctcactgcaacctctgcctcccgggttcaagcgattctcctgcctcagcctccacagtagttgggattacaggtgcgcaccatcacgaccaatttttgtatttttagtagagacggggtttcgccatgttagtcagtctggtctcgaactcctgaactcagttgatccacccgcctaggcctcccaaagtgttgggattacaggcgtgagccaccgcgcccggcctggactgttcattctcttaaaggagcaggagcattttacagcgccgacctcggccggccgcgtggcggaactgaggcgttagagggaaagaagagggttccttccctggctcatgaaggtttaggggattggaggctgggttagccttcttgaggaagagaaaagatataaggcgggagctctgggtatttcaactagagtgtttggagatgttagtgcaatattgattgcacgtgtgcataggcatgcttgtggacctgtatgcatgggagtaggtgatagagatacagggctagcaaggactgggtttagttacccactccggaaccttgacctgtgacttcctctgagcctccttccttcctgaaatggaggtgataacatcacccacccctagaattgtgaccatcaaatccggtaaagcacttagtacataataagtgctccgtataaaataggtttaattatgttatttaataactggattctgtccctaactcgctgggctttttttgttttgtttgagatggagttttgctctttttgcccaggctggagtgcaatggcatgatctcggctcacggcaacctttgcctcccatgttcaagtgattctcctgcctcagcctcccgagtagctgggattacaggcacccgccaccatgctgggctaattttgtatttttagtagggacgaggtttcaccatgttggccaggctggtcttgaactcctgacctccagtaatccactcacctcggcctcctaaagtgctgggattacaggcgtgacccaccgcgcccggccattttgttggttttttttgagacaaggtctcattctgttgcccaggctagagtgcagtggtatgatcacagctcact

SEQ ID NO: 36966 - DNA, 1019 bp, Artificial sequence
  DNA replication origin
ggagttcgagaccagactgactaacatggcgaaaccccgtctctactaaaaatacaaaaattggtcgtgatggtgcgcacctgtaatcccaactactgtggaggctgaggcaggagaatcgcttgaacccgggaggcagaggttgcagtgagccgagatcgcgccattgcactccagcctgggccacagagcgaaagcgagactccgtctcaaaaaaaaaaaaaaaaagagagagagaatgaacagtcggccggcgttgcccggcagcgccgcgccggttgccgggcaacgtcaacaaacgacgcggccgccgtctccgtgcgcccgccccccccccccccccccacgcccgcgcagacgcggtgacgcgacggactgtggaacgccgtcgcctagcaacgcgagggctgtttgtcccgggctgggtggcgcggccgcacagggcgcagccaggaccggcccgggcggacagaccggcccgccgggagcccggggcggggggtggaggggattgcggtgatggaagcgggggagaaccgggttcccaaattaccggtttccctttagacagccgccgtctgttgtcgcccgctcctcctgtctgccccgggaccgcctccgctcgggtatctgtccgtctgcgccccctcctccccggcatgtccgtctgtccagcgcctcccgcgctgtggctgtctcatatcccccccaaaccatcacaaccaaaatagggacaagcacacacttcgctggcctgccgtttctgccttggactgccggatttccgggtgcattgttgcggttggggtccccaccaggggagacagacagacaaggggagacaatctgttcacactcaagccacagccccaaagccctcccgttcctttccccgctcccttggggttctcttgcctgtctttctcgagcctctttcaagagacaggcagcccgtggtccttccatcctgtgtccgggaagctgtccacagctgggaggttctaacaactcatccccaa

SEQ ID NO: 36967 - DNA, 1064 bp, Artificial sequence
  DNA replication origin
agacaccgacacacacacacccaacacacataacacacaccgaccccgtgagtgagcacagggtgagcgagtgtggatgtgtgtgtcacagggaaaaagccacaacacccacccttccactacaccgtgacgcagtggttaatgagaggatttctgctcaactggcttctacctcctccttcttcctcggggaaaggttgcacggttccagcgggtggtgaatcacaccccgggttggtgactcttaggtatggggggtggagaggaggctggacacagccgggtgacagaacccccgggacggagccacagccacacacacagccacaacaccccacccccaccccagaggcaaggggagggagaaggagaggccttaggccaagccttcctctacactcacacacatacacacccccctctgcgcgaggtcccatgcaggggcgggggtcccagtcaaaagggtgtttgggggacgggcctaggagtttagaacaacgtttcaagttactgtctcttctcagagtgagactgacgagtgacagtttagggtgaacggacaggtagataaaagtaaccactggagctctctcagattgtcgcggagggggaatggtgcgggacctgagcccccaagcctcagcagcgctcatctcccccctcccgtaaatggactcctggaactgctctgaaggcttaactactctctcggggggcgtggtgagggaagggctggctcgccgaccaatcagagtcctgggaacccagagggggcggagctcctggagaccacctggctggttgcccttcggttcgcggttctagtcctgtcttgggacacaccggaggaaccgggcatgaggagcagagggagtgggaatgtgtctgtgtgtgcctggagaagagggtgacagccaccgtatctctccaagaaacgccagcacacaagcagacacccccttctcctgagagcccagggactagatccccgcaagggcctcgcagatccattgggtcgcagacaggcgctcttgtcacgacagggatcccctccctctgcctct

SEQ ID NO: 36968 - DNA, 1313 bp, Artificial sequence
  DNA replication origin
gtgttgtggctttttccctgtgacacacacatccacactcgctcaccctgtgctcactcacggggtcggtgtgtgttatgtgtgttgggtgtgtgtgtgtcggtgtctttgtttgtgtgtctacgcctgtgtgtgtatgtgtcaccccgtaggagtgcgccggtctcggggaaatgcccggttccttcgtgcccacggtcaccgcgatcacaaccagccaggacctccagtggcttgtgcaacccaccctcatctcttccatggcccagtcccaggggcagccactggcctcccagcccccggtcgtcgacccctacgacatgccgggaaccagctactccacaccaggcatgagtggctacagcagtggcggagcgagtggcagtggtgggccttccaccagcggaactaccagtgggcctgggcctgcccgcccagcccgagcccggcctaggagaccccgagaggagacggtgagtaagggacatcagaacttggcctgggtagggggaagcaagagaggcaggaagtttcttatgaatggaggggggctccactaaggcctcagtgttacagaaaccccaagatccttgctacacgagcgaggaccggaggcttgttttttggctcttgggggttctgaaagaagtagaggttcgggatgggtggaggagtgctgtatccccaaatctcatggcctctatctccctgactcagctcaccccagaggaagaggagaagcgaagggtgcgccgggaacgaaataaactagcagcagctaaatgcaggaaccggcggagggagctgaccgaccgactccaggcggtgaggacaggccctggggtgggagaggggatgttgaggggagctctctccccattctctgccccctctccacctgtacccttatcctgggttgagaactagacgttccacacatggaactaggtactgctgtggccagactgggtagcccagggcacaaacacagacccccatggacttaagtcaactcctggtcccccccccatttcctgaccccacggactactctcctagccttcatttcatcccaaggggccacatggggcccttgaggagaggggcgcccccatcatttctcccatctggtcttcagcaagtaacaacccattttgcctcagtttctccatctctgcaaaccctcatcaaatctcccgggctctttctacccttaacactctggaaagcctgtgaaatgaaattattccacctcctgccctagccacccacagctctcctggtgctggtggcatcccccaaaacccactccc

SEQ ID NO: 36969 - DNA, 918 bp, Artificial sequence
  DNA replication origin
cacacacacatccatatataatatatttacttatacataatagatataattgcctttcggaaaccaggaaagggataaatagctaaggaatgggtctgggatcaggatgggagacgcgcgacaaggggcacgtggaatgtttttcatgcagcacggatggagggcggcgtggtccaccccccgatattaaaaaatataaatttgcctcataaagaaatcctcatgagatgaagcgcagggaacggcggggtgggagagccaaaaccatggtcagggatgggcggactcgggcatggaatcatgagattccagccccttgagtctgccagtccaaaaatattgggggtttgggggtaccaaagcctcagctctgaaatcttctccggaaaaatgtcacagcccctcactcccttcctggagaggatgtgaggggccaaggggtgggagaagttggcgtcctaggctggggattggtcgggggaccttaaagaaaaaggccagggctgagggtcctgaggagagagagagaggccacgtggatggaggactgtcacccccttctcggttctgtcacccccttgagtctaactcactgttgaggggaggaagaagggggatggacggaagggagaccgaggaaaggctttcgggagtggggacattatccccccagaggtgtgctgccccacccagctgcaccccacaatctggccaactcatttcacagtataaatcactccagcaggacggcatcacagcagcccctgctgcctgaaatcagagcggcccaacgaggaaggccaggagggtcggctggcagggggcagggtcttgggataacactgtcatcagaaacaaggctgggggctgatttcggggtggggagccttaggaggccagaaattccaatcagagcca

SEQ ID NO: 36970 - DNA, 1700 bp, Artificial sequence
  DNA replication origin
ccgccgagccgagcaccagggcggcggcggcggcggcggcggcggcggcggctggagcagcccgggaggaggaggcggcgagaatggcagcggcgtcgtgggcgcggcggagatgagcgcccgcgaccccgggcccagggcggcacagccggagtgggcgggggtcccgatgcaggcccgaggggggccatggggcaggtcctgccggtcttcgcccactgcagtgagtagaggaagactggggcctggtgtgggccccagaggttcaggtggggtactccccggtgtcccctcggcgcttgcccgcaggagagccgggatggggggaggaggcataggagacaaaggaagctctcccctcccccgcgctctggcggcgacgggggtagcctgacccggaggacctggacgaaacagggcggaggtgagggggcactgagacagcaggcggggggcgcgctgcgctctgggacgtaccgcccggccccgcccgggagcgaggacgcgcgcggggagctgtcccctggctctggtgctggccgcagctggcggggagggggttgaacggagggtagagccaggatggaaaacaggggtctggctcccaatcacttgccttcgcatcccatccccgttttctgtccaagaggcagccccgacctcgcccaaactgtccaaccctgtcccgggaaaacagccatccgtggtttgggggcaaggactcatgggttcttagcggtctttaccactggttaatggtaatcctggggaagacccacaccattccaggcctcctattccccagctgaggaaacgaggtgagggcacagggcgtcagatttcaatttccaaaccgcattgagcatcatctatgtgcaaagctctgaactagctctaaggggctggattcccagctgaaaacgcctagcctcacaatctctgagctcacagctataacagtccatgtctaccgttctctgtcccacacatgggggttctgacagctggggatttcaacacccttagatctagccatttccatgtctcgcgtgtccagatgccaaaattctaagaattggtgatttcagcattttcgagtatcatcccaacattctatgatcttgtcgttaacttcagattacaaagggaggaccacctcgtctgtctctccccaccgcccttacctctctgttctcacctcccactcctctcctcctcagtcactcttctccagtcatatcttcgcacctctcagttcctcagatgccaagcatggtgcctggctcagggcctttgcactggctttcttctctacctggaagacgtccctgaacatctgcatggcttcctcacttccttcagatctctgctcaaacgtcatcttatcagagaagccttcttgaccaccctatgagaaacagcaccccttcactttctcttcccctacccttctttactttgctccctatgctcatctgcacccgacgtcatatattcacttgtttattgtttgtctatcccaaagagtgtcagctctaggagggcagggattttgtctgttttcttcacagctgtatccccaggacctagaacagtgcctggcacatagtaggtgctcaataagtggttgttgaacgaatgaatgaattgaaacctcctaagattcctactttgaagactctaagattaagattcctgga

SEQ ID NO: 36971 - DNA, 1014 bp, Artificial sequence
  DNA replication origin
gtccaggtcctccgggtcaggctacccccgtcgccgccagagcgcgggggaggggagagcttcctttgtctcctatgcctcctccccccatcccggctctcctgcgggcaagcgccgaggggacaccggggagtaccccacctgaacctctggggcccacaccaggccccagtcttcctctactcactgcagtgggcgaagaccggcaggacctgccccatggcccccctcgggcctgcatcgggacccccgcccactccggctgtgccgccctgggcccggggtcgcgggcgctcatctccgccgcgcccacgacgccgctgccattctcgccgcctcctcctcccgggctgctccagccgccgccgccgccgccgccgccgccgccgccctggtgctcggctcggcgggggcgggcggggccgaggtggggaaggcactgcagcgcgcggccgggggcggggccagaagacgggcggggcggtaccagagggagggtgaggggcggggaaacgccgaggatcaggcggaggggcgtggccttcttactaaaggggcggaaccaagagggtgggctacggagccaggaaggaggggaaagcggcctgaagggcggggcctagatcgcagagggcgcagcctttaggggaagagggaaggaggcctggagtctggcgagggacttgggagaggatggtgaacgagccacggcagagaggatgagagcgtggatccctgggtgggttggggtggtgctcggggtgccattgaggagggggtggaaagattctaatgctctgaggtagggtccgagcctagatttgcagagggagcgagaaagggggccgaatgaaacgattcagaaacttttggggcacgcggaggagctcaaacgtgggcagggctaaagcaacagggaattattcaaatataactgggtggggtcggattccaggcgattccaggtctgcgaaaattagaagggtctggagctgtgtgcctgaatcctggatg

SEQ ID NO: 36972 - DNA, 1028 bp, Artificial sequence
  DNA replication origin
aacagggaattattcaaatataactgggtggggtcggattccaggcgattccaggtctgcgaaaattagaagggtctggagctgtgtgcctgaatcctggatgggcggggcctggaagagaaaataagcgaagccccagaggggaggggtcgaactaaaaacagtaaagaaaaaaaaaatatgtatatatatatatatatatatatatatatatatatatatatatctttttgagacagggtctcgctctgttgcccaggctggagtgcagtgatacgatcacggctcactgcagcctcgacctcccgggctcaggtgatcctcccacctaagcctcctgagtagctgggatcacaggtgtgttccaccgcgcctggctaaatgttaatttttgtagagacggggtctcgctatgtttcccaggctggtctcaaactcctgggcttaagcgatccgcctgcctcggcctccctaagtgctggggttataggcgtgagccaccgcgcccggccaagtatggtatttacaggttttgaggctgggggctgtaccactgaggtgggaggagcttggactgagtgttgtgttgagaacacagattctagaattagtttccctggaacaccggttacttctgtgactctgtttcttcttccatatgtaaactggagatgatgatgtataacagtgtgtgacacattagtactatgtaatagtttgccactggtacagtattatcttttttctttttttttcctgattcagatcccaaaccccgctttgtaggtgcaggaaacaggagacccagaagtgtaattccttctagtgacccgcctaaagagcaggtcaaaggacaggaaggagatttagatggtttaaaatctcacagcggaggggattaatggagggggcgggcaggtgtacagggtggagccttcctgatcccagggctgaaggatggcggtcctggcccgccagctgcagcgtctcctctggaccgcttgcaagaaaaaggagagggagaagga

SEQ ID NO: 36973 - DNA, 1028 bp, Artificial sequence
  DNA replication origin
ccgcgtggaaacgggcggctgcacggccgtggtgttgctggtctccccgcggtttctgtacctggcgcactgcggtgactcccgcgcggtgctgagccgcgctggcgccgtggccttcagcacagaggaccaccggccccttcgaccccgggaacgcgagcgcatccacgccgctggcggcaccatccgccgccgccgcgtcgagggctctctggccgtgtcgcgagcgttgggcgactttacctacaaggaggctccggggaggccccccgagctacagctcgtttctgcggagccagaggtggccgcactggcacgccaggctgaggacgagttcatgctcctggcctctgatggcgtctgggacactgtgtctggtgctgccctggcgggactggtggcttcacgcctccgcttgggcctggccccagagcttctctgcgcgcagctgttggacacgtgtctgtgcaaggtcctgggggcgtggcgtggtacctttggggcttggtgcagcagagggagagagcctcggggttttggggaggagggctttgatagagaggcaagagtaaagctagcaaaggaggggataggactcaagcgaagggcgtggcctgaagtgggcagggccaaaatacaggggcggagcctgagggatgctttgaggcacgggagagttagtggaagggacttaagagaaagggcgtggtcttttggaaaggggcgattctgggtcgtaggagccgggccggaagtattgattagtgctggaaggtggaagagcaggtaaacatcagagcgggcggagctttagggaaaaggcattgttctctcaattgggagcgcctaggaccgggtttggtcccagtaagagaggattggcaggtgggtgggacgcgaaagaaatgggcataagtagaatgaagtgggggacttgaacctggggattgttgggaagctctgccttggactctcccccaccgggctcctttttctccaccggcttcagggcagcctggacaacatga

SEQ ID NO: 36974 - DNA, 988 bp, Artificial sequence
  DNA replication origin
ttactaagggggcgagacccccacccgcacgggagtggaagtcgggggagtagggcccaacccctctcaccccaccccgcccgccccgggaaggtgaggaggaagtgggccaagggggcgcggtcggtcgctgactcacagccgcagggtcgggggtggggtggggtggaggtggggactggcgaggagtgcgggagtggggggcccggcattcgcccggggtgggcaggaggcgccggcttctttggtgtgtaaagcctccggcccacgcacgccccgctctgactcagtttcgcctgcggaggacagcaggatcatcccagccctcaggagggcccggaggtgaggagaccctcccgggagcccccgcccccacacgccggctccgggctgagcccagacaccctctgaggcttccgcagcgtgtcttgccggccccgccccgagtgacgtcactgatttggtcgcgccccttgggtagagcgccacctggcccgggtgaggcgcccgagccctgggaaatcagttagttccacatttacacacgggtaaactgaggcctggagacagggaatgaatctggcctatggccctcttgcctgagcccccagaacccggaaagccaccaaggtctgagtgtaaaaccaacaattctcagggccagctgactatgtgagagaatccacttttccagcgtatgtccaagccgagtcccatgtccggatgttgatgttgtcctgacctcctttacctggggagcacgtcatccttccaggccaagctttgacattaattcccctccccttctccaccccactctgggagaccttgaaccctgttcctcggaggttatcattgtttctcagtgtgtttcctcaggctgagttgtctgggagaatgggtagactaaatttctttttttctttttttttttttgagatgtagtctctcgctgtcacccaggctggagggcgctggctcgatcccc

SEQ ID NO: 36975 - DNA, 1080 bp, Artificial sequence
  DNA replication origin
gaagccgagggtgcagagttgcccttttaagcgccctccaccccctcgcctggaggcgcacgcggcccctttaaggcgcggggcattgtgggtgcggggagtggaattttggaacgaaatgtaacgaagagaagtacagtagtaagagtaacactgtagccgccaccggcaaggggtgcgcgctggggagcggacgctgcatcccctttctgctgcaggaacctctcatcagaccgcctgagggaagcggcgcccggagacccgccccggcccggtccacattctccccaggaagccggactctatggggcgggaccctgggggagcctgagccgagcccggagccagccccgaacccctgaacctccagccaggggcgccccgggagcagccagcccgtgggcgagccgcccgcccgccgagcagccatgaggtgagccggacctgccccccgacccgtccccgcccgggcgggctccgcgccccgcctttgtccccctcccccccagctagctccgggctggaatttggggacagatccttgggagcctcggatttgagctgaatccccttggacgcgccccagaaccgtcgatcacttctccacgactgactccccaagctcggggggtggtggcggtgaggttctcctgggagccctcaagatttgggggcgctcggaggactcccgaattgttaagactttttttagaggacctcaaagttggcagcgactccccgcagggatgccaggattgaggcagggctcagactctcctccccctccccccagacttcagctcgaggtccgggaaggattgtgggggaccgatttgggataccctgggacttggaagagagactgagactcagaccctgggtgtgcaggtcccccgtttacttggtgctggaaaaagtctccccaagtgggaccgcgctccataacttcgggggtacttcttaatcccctggattttgggggtcacttaggtcttcctgtggaggaggctggtgtgaaccgatccagggacctggacgcagcctccagagtctggtgggaccccccccttccccgtcgct

SEQ ID NO: 36976 - DNA, 1097 bp, Artificial sequence
  DNA replication origin
tcccagcaccccagctccagtcccggacacagccaacactcaacaaatatttgtcaaactgggagaaaaagaactatatcttgtaattttccatcttaacatcctctcttccaactgcccccaggactgtccccagccaaaccagccagaaatcagaggatcctaggctcctccacccctccaacgttgcctaggaatttctgagggatcttggccatgtctttttctctttgagcctcagtttccccagctgggtaataggggcatgggttttgaattctggctgtccttggagaagaggcacagcccaggaagtcgggtgtgaccacctgcaggggagaccccctggaaaggtgggagtggccttttggtgggacaggcatctggtcatttctgcaccgcaccccaccccagcacccccacaagacgggatgcttggccaccaccacagcaagaggtgggccttgtgggagggccagggcttccagggctggtgctggtggtggtggtggtggtggggaggacagggggccggcccagacaccgctcctgcccttttacggttgcagtgagtgaggcagcactaactcggacatccgccatccgccttccaccgagcctgggaccggaaacgcgagggggggtggaggggcggggctggggggcaaggggagagaagagtcccggaggaagagggcgaaggaagagagcgacgctccctaaactgacccctctccagggcggacttggaagggatgttgctataatggggagcggataggcaggaagtcttgagggtatctgtgggtgtcctccttgctccaaattttccagccatgcctttcacatcagaaggaacaaacgcgggagggggattctctagtggtcataaaaaggaatgccacgccactccgatgtcaaagggcaggggttcaggaaatgcgggggatgtgggcaccacggggttaatccccaaccgtccccaggggcctccctgctcaggctgggggctttggggcaggaagtcccagagagagtagaggaagggagatagtattgtcaggctctggccccatgggagagattatggggggcca

SEQ ID NO: 36977 - DNA, 1056 bp, Artificial sequence
  DNA replication origin
cacggtcacactggaatgcacaaaatgctagtgataattttccatgataacaatgaattcgctctattttaccgacgagtaaaccaagtcccagcagggtaaagcggcagccccaggccacacagccgcattcactggtcccctttgcccgccgccatttctgaccttccaacgcctctagggcactggccatgccggcggcaaactgggccgcatcctccttgctgccgaagttgaggccccagacctggcgagcgtcgcgccactgatggaagttgggggtggcctggttatacttgacaccccggacgatggcacagttgatgaccacctggtgggaggggaaaggggggtgaggggcggcgggcgcaggggtggggcgggtaggggttcagcccacagagggggccggcgggaagctgcacctgctggtcgggctgcatcttccggcccacgacgcgaaaggaattggccgtggggttgtggtagatctggacgcggctgaaggcctggggacccgtgccagcagggagccatcgcttgttgccatcatcataaagcatcacagtggcccggctggaacagatgaccgtctcgctgcaggcgggaggaaaagggagaggggccggtcaccttcttatctgggtctctcctgggagattccaagggacaaagacagtgtgtggaaggaagagagtgacacagagggaggcaggagccacgtggacagaaggagacgggggagacagatcaggagagaaaatcagatcaggagagacaggcaaacacacaaacgagatgcaagagacagacgcagagagaggtgggaaagggagagtcgggttgacaaagaggagagacagactgaaggcagacagacagatgaacagatgggggaggggtggggaaaaaggatgggcagacaggggacctggaggaagaggcagacacagaaagagataaagatggtcttggcgtggtgtctcacacctgtaatcccagcactttggaggttgaggcaggaggatcacttgagcccaagcatttcagagcagc

SEQ ID NO: 36978 - DNA, 1220 bp, Artificial sequence
  DNA replication origin
ctggaactccaggtgacttgggggtccaggctcaggctcacctccgggccagcatggcgttcatctcttccatgagtcccccacctccgcttcgaccactctcagctttgggggctgtgggcccccctgaggcctcctcctgctggagaaatttaaaaggggcaggagctttaggggcaggccttttggccttccagcccaatgacaccgccggcagccctggcctcatcccccataaaagccctgttgccccctgcccacctctcccggcccctcaccttgctgactttcctgagtttggctccagcaatagctgcggccaggcctggggccccagctcccccaccaccagggccctgtgctgccgggagagggggtgcagggggtggtcctccccctgctccgtgcgctgcagctgggacccccgaagggggcaaacctgggggtggggggggacctggaggagggggaggtcctggtggtgggggtggacccccagcggggggagcaggtgggcctcctgaaacaaacacagaaaagggggcagctgagagagagaagcctcattcttcactgtccagctggctggccacttcctccagggaggccccctcccaactcccgaagctatctgagcatcacctgcattggagacccggcgctctatgtgctccgacgggccgggctgctgcctgtggggggaggcgagagagctgccgtcaatcagggccctaaggatggccagcgaaggggccagcgacctccgtcctctctctcagaggtctccagggtggctggctcctaatactcacccaagccttcctcccctagggaaccaagaagggggctgggtgagagtagggggaatggagggcagggcagcgacagggagagatcaggatgcgagatcccagtcactaaactgtcaggaacaccgaattacaaaatgcccaagattctttcttttctttttttttttttgagactctgtcacccaggctggagtgcagtggctcgatcttggctcactgcaacctctgcctcccgggttcaagcgattctcctgcctcggcctgccgagctgggattacaggcacgggcgccaccatgaccggctaatttttgttatcttcagtagagacgggatttcgccatgttggccaggctggtctcaaactcctgacctcaggcgatctgcccgcctcggcctcccagagtgc

SEQ ID NO: 36979 - DNA, 966 bp, Artificial sequence
  DNA replication origin
cccagtctggagtgtagtggcaggatcacagctcactgcagccttgaactcctgggctcaagggatcctcctgcctcagcctcccaagtagctggaactacaggcgtttggtatgacgcctagctaatattttcatttttcgtagagatgcggtcttgctgtgttgcctaggttggtctctaactcctggcctccagcagtcctcctgctttggcctcttaaagtgctggaattacaggcgtgagccactgtgtccggccttctttcctaatttcaatgacattttgcagacgcacattatggttctcagacacgttcttaagatctttaccccagagctcctttaattagaaaacgctgacagtcgatttataaagtagcattcagagtcacagagctcatccacgcccccttcagttgtcgggtgggtaggtcatatggcctggtggaataccccgcttggacagggggacctctgggctgagggacaggtagtccccctggaggaggcctttgcgtgaaggagggcggaggaggacctggaccagtccaaaggcaggaaggaagggcgatccctgcgtaccgtgaggggcagatttggagggaagttgggcgaactgacgatgacttaggtagtaaagggacaggccggtccctagcaaaggcaactgaagaggacagcgagggaggaccggataaaaggacagtagcagtaggtccaggactggggactggtgaccaagtgactgagcctgaaagccagaatggactagccctggtcaagaccggtttttcctcccaaaaggccacgtcctgctggaacagaccacagaatgccgggctgggaggcgtttccctggaagacccagcatagccatgccagtggggtgcgccataggtggaagaagaggggggttatgttggatcgatccactcagggaggggaggatgtcaatgacaggtact

SEQ ID NO: 36980 - DNA, 1083 bp, Artificial sequence
  DNA replication origin
gaccagtccaaaggcaggaaggaagggcgatccctgcgtaccgtgaggggcagatttggagggaagttgggcgaactgacgatgacttaggtagtaaagggacaggccggtccctagcaaaggcaactgaagaggacagcgagggaggaccggataaaaggacagtagcagtaggtccaggactggggactggtgaccaagtgactgagcctgaaagccagaatggactagccctggtcaagaccggtttttcctcccaaaaggccacgtcctgctggaacagaccacagaatgccgggctgggaggcgtttccctggaagacccagcatagccatgccagtggggtgcgccataggtggaagaagaggggggttatgttggatcgatccactcagggaggggaggatgtcaatgacaggtactaagatggattaaggtcaggagccgcagggtggtgactcattggagctaacgcagtccaggattcacccccacctttccccctaagactgaggtagatggaagggggcgggtcgggaagtccgtaggaactttgtgcatctttacaatggtctgtaccaatgaggaggaggtaggtggtgttcggtgcaaaggatgagcgtcctaggggaagggtccactcaggtgagtgagggtgcgggtgacagaatgagaggtggctaaatccgggtgcagaattttgttttgccaaaagaggtggacgtcctgctggcctacctagcggtagggaggtggggtctgataaaagacgctgtctttccaaagtgctcaacaaatgcgctggcaggggcggggtgggatagggcggggtccttcttggaacgttccacctgcaggaggcggagagtcccagtggaaggtaccactgggcaggttagtagggaggttcgatcagctccagcccaggatctctccggcgcccccgaaggactgggtggtgtcagctgggccggtccaggatgggacagtgcggagaataggccaagacagagacttcgcagtccagacagcagtcacctccaagaccagggccccgagacctcctatttctcggacgccgg

SEQ ID NO: 36981 - DNA, 993 bp, Artificial sequence
  DNA replication origin
tcccttctggggcagtgtttcttattcctggctgctcgctagaatcatctggtcttttaaaagacccctgggttacccaggctaggtgactgcattccctgggtgagaggggtggggcttgcagggggctcccagagcgcagcctgacccctctcttcccccgcagtgtatcactgggtggagatgcggaccaagatgcgcatcatgggcttccggggcacggtcatcaagccgctgaacgaggaggcggcagctgagctgggcgcagagctgctgggcgaagccaccatcttcatcgtgggcggcggctgcctagtgctggagtactggcgccaccaggcgcagcagcgccacaaggaggaggagcagcgtgctgcctggaacgcgctgcgggacgaggtgggccacctggcgctggcgctggaagcgctgcaggcgcaggtgcaggcggcgccgccacagggcgccctggaggaactgcgcacagagctgcaagaggtgcgcgcccagctctgcaatcccggccggtccgcttcccacgcagtgcctgcgtccaagaaataggagcttgctggatggaacctgaatttggacatggcctatgtacctaacgtggccttcttcccgcaccacccttgcctgcgctggcccagtggaaaccaccaggatcttgatgcaacttggcatttggttacccctgctgataagagcagccgttacctgccactgggaccagcaggtgaagcgttgcaacatagccccctccatcatccttcacctcctatcccccactccaaaccaggacgacctgcaaggtcccagccagcaggacaccgtgggcactctggcaaatgaaaaaatggaacctggtcttgagctgaatcaatgtgttattgttacccccacccccggtttacctgatcagtgttaacctttactgggacactcatctgttacactggaacaccttcttctttttgtcaatcggcacag

SEQ ID NO: 36982 - DNA, 1457 bp, Artificial sequence
  DNA replication origin
cagaccacggagctcacggccacggcggtcttgacgcggcgcaggcgggcgaagcggagtgggtgggccacagccaggtagcggtccaccgagatgcagcacaggaaggcgatgctgatgtagatattggtgtagaagatgaacccaaagagcttgcaggacccggggccgtggatccagttgtcgtggtgcaggaagtagtccacccacagcggcagcgtgcagatgtacagcaggtcggcgatgctgaggttcatcaggtagacgcccagctcgttgcgctgttgcacctggcggtaggccgcccacagagccaggcagttggtgggcagccccacgccgatgacaaagatgtagagggatggcggaaagaggtggtccacgcgcgagtccacgtggcagccctcccacgtgtggttgcccatggtgggcacttcggcttctggggcgcttcccctggcccacgggggctgtggggccacagggagcgggaggccatggggccccctgagccccttccttggaggctcaggggaacatggtgggatgtggtctacagggaagagatgaggttgggtaggctgggctgggctgggaagggcagagcttgagagggaaaagttggaggagggatggaattatgacaggagggaagtctggaggatggtgagattaataaagaggtttttcaaggaggttatgtatggagtcagtgtgtcaacgagggagtatgggggtgacacaaaaattggtctccgggagtgtttatggaggagacgaaagcatcgctgggcaatggtgagaaggagatggtttgcagggcaattaggaagtatgtgtagccatattgaagtaataatggcgggggaatgttctagaagacacaagaaatacatgagaaagtgttgagataggacacagcgcagttagggagtgttggaaagttcaggcaatgtgggtgggagtgctggcatttcctaggaccccagaaagcaacagagataagtaaggtcaccagtaaggagaaggttctggaaaaggaggtgtctggcacagggtggacaaagataaaaggctcggtctgtggacggcaggaaggagtcttaggaaacaggaaggaggtgagtaaggtctagatcagaggtaagtttggggacggaagggaaatttcaatgggggcaggggagggactccagactggtcctggtgggggctgagggattgggatgaagtcagttcaccgctgactgcagtgcctgttgggagagaggacagcagtgagggagtcatggacactccaaccttcttctccccacactcctcaccataattgctgtgaactgcagagactggacaccccaacaatgcctacttcagccccatcctaagcaaccactctctgaaaacacagatttgaggtgtcaggcatattttcccctgacagatattagaataaa

SEQ ID NO: 36983 - DNA, 824 bp, Artificial sequence
  DNA replication origin
tagggtagcccgattgccccctggtttccgccggccgccagggcaccaggtggggagcgaggaccagtgatcacatttcgtccctaatgagcagaccggagctggctggtcccttggggctgcagggagaaggcggggaggggggggtggtgggagcaggagcccacagaggaggaaaagggggaggtgagatagcctggtggcatcggggacaaggctggtgagtgagcccaggggtgctgggggatgcggggggctgtagcacttctccctcttgtcctcaaaatcctccaagtttttcagctttgctggattttggggtggctggcaggatgcggcagccgaggctgctaaagttgggggggccaggtcttcctagtctttcctgtccccccaccatctctccatccttgggtatatttctcttccccccgactctctggaaggggccagcagggacccaagaagtgggggcctgtgggacagacagggggagcttcttgtggatgtgagatttgggggtttaccccctcaacagagcctaaggggcagaacttagatcccaaccagagagggtcctggaaggggaacggggttatggggatcaggtgatggaaggtcgcttgctttctttgtggggagaaggtcgtatcttctagtaggttctcagaggggccagagacgctcagaaagacttgagaaaaattacagaagttcagagagtgaagagaaaaacctcaggggaagggaagctgtttagttaacagcgacaggaggtttgcccagtcttgagacatcaagtgacttagacaactgccttgctg

SEQ ID NO: 36984 - DNA, 1345 bp, Artificial sequence
  DNA replication origin
tgtggatttgggcttcagttgaaaactggggtcccaaccctccagcctggcactgactcactgtggggacttctgcttttggacctcagtttctccatctataaaatgggggcagggggagttggcctaggtggctccgcaaaccctttccagctctcagctgccatcactgaaacgtgccaagatttcaacactcctctttttggattgaaggactccagtatccccaggacctttgattggaaagatctggaattcccaggcctcccctccaatgcttcttccatctgggcccttccattcaaagatgttcacattcaaggtacttgatcataggattcccagggttccaggagcccctatgggtctttcatcctcttcagctgggattcccccagaaaagaaaacctcctcatcctcaccccaaacctgaagtcaagttcatctacaaagacagaggtgggggcggatacccccttggtgggctcaggaggaggggggctgatggtgggctctggagggggaactggggggtgtggccccatcctctccacttctgcgccaaacaaattccccaatgcatatccagcctgagtacgcacacacacacatcccacaaccgatgcctcacagatatcctagagctattcctcagcctagtttgggaggaggggttgtccagttccaggggggagagtgaggcggaagcaggaaagagttaatggtgacccagccaaatcctggaagagaggaagtaggggaggaagtccaccccccaggcaggaattcctgaaattggcgggcgggctgggtgcgacctgaggggcagtggggtggctccgtgaagggggcgctgggatcatggtgtcacttagagtccgcctgccccaggtcacaagcctcctgccccctaccccactcccaagcaggttcccagcccagaggaaagttccgggatgcggaggatttggaaggagagaagacagagctgaaggtgccaaaacagtgttataagagacggagagaaagagacagggcaatagagatgaagagacaggaagggagagagcaaagagatacacagagacagggagagatggagatagagtcagagacatccgcagaggtcccacaacagacgggggtgaggcagaggcaggggcagagggaggtgggacccagaaacagagagacagagacagacagacggagacagagaggcagagatcaagaaaaagacagagacatccagagacacagaaggaaagacacgtccagaggcagagggaccacagacacagagacatcaggcgggagttggagacagacgcaaagccagggagag

SEQ ID NO: 36985 - DNA, 1125 bp, Artificial sequence
  DNA replication origin
ggtgcagtggttcatgcctgtaatccccgcattttgggaggctgaggtgggtggatcacttgaggtcaggagtttgagaccagcctgaccaaaatggtgaaaacccatttctactaaaaatacaaaaattagctgggtgtagtggtacatgcctataattccagctactcgggaggctgaggcaggagaatcacttgaagcgggaggcagagtttgcaatgagccgagattgagccactgcgctgcagcctgggcaacagagcgagactctgtctcaaaaatgaaaaaaaaaaaaaaaaagtataaatatagtgcttcccggtaggtgagttctttaattgggtcaggggtaaggaagggagggaggaggccaggaagggaggagcaggcgtttgagcttcgagaagaaatgcaagcagactccagcaggaccttccccaatccgtggagctggagtctgagaggtgtgtggccagggtgtctgcagctgtgggacaacctgtagggacactcaccaacctgaagggtgccacccccaatcagagtggcaggaggcagcacagttggagcaggggcctggggcccctctgctgtgcttggagttaaactcttggttgctggatcctgggaaggggtcctgggtcagggccaggtcagagaagggacagagcagggaggtgaggagaactgggagtggggagggggagtggatgatgcagggaaggccagggaaagagctgggaagaggggaggggtgcagaggagagaggcgcacctggaccagcagtgagaagcctgtgtgcacggagccctgcaggatggaattgcgggtggtccccacgtacagtgtgtctccgtggccctctgccacggtgcgcacagggccaaagtcctcagggacctgggtggacagataagagggaagatgagtaggatgcacacgggtgggtgtggggtgacatactgtggggaggagggtctggcgttgggagccctggtgagatcggggggggcctctctacccccatctgagcccactgcccctcctcacctccacttcctgcagcttgctgtagtcagaaccccagaggaccacccgccgatcacggccccctccagacacca

SEQ ID NO: 36986 - DNA, 862 bp, Artificial sequence
  DNA replication origin
tctcaatctcctgacctcgtgatccgcccccttcggcctcccaaagtgctgggattacaggcatgagccaccgaacccggccgcctgccctctctttttaaaaaattgtctttattagattgggtgccatggctcacacctgtaatcttggcactttgggaggctgaagcaggcagatcacttgagtcaaagagttcgagaccagcccggccaacatagtgaaaccctgtctctactaaaaatacaaaaattagccaggtgtggtggcacatgcctgtaatcccagctactccagaggctgagacatgagaatcgcttaaacccaggaggcagaggttgcagtgagccaagatcataccactgcactccagcctggtcgacagagcaagactttgtctcaaaaacaaaataaaacaaaacaaaacaaaacaaagcaaaacaaaacgagagagggcaaatgaatggatgagaggtgggttgatggatggatggcagggtggctgactggatggatcagtagagagatgggtggatgaatggctagggtgatggatggatagatagtctggtggatggatgggtgatgaatggatgagtcgatagtgttcatctaacagaccagtagataagtgagtggatggatggatgggtgggtgtatgggtcaaagggtagatgggtggatgggtagatgttagtgcagatggtttaatgaatagatgataaggtattgtatttgagtgggtaggtggcaggtgcttgggtggttgggtgggtggaagagcagatagaaaggtcgaaaggtggggccgggcatggtggctcatgcctgtaatcccagcacttagggaggccaaggcgggt

SEQ ID NO: 36987 - DNA, 1346 bp, Artificial sequence
  DNA replication origin
tggaggggtgggatggggaggaccggggcctggtccttatactcaccctcttctgtcccctaaccccatccctccagtgtgtcagctcttgaaaggccttcccaccaggacgccccttaatggctcgggacccccgcggcgcgtgggtggctatgccacgtccccatcctctcccaagaaggaggcgacctccgggcgcaggtaaggcacaaggccgggacccccagcctcttccaagacctcgtgggagacagaggtggtttgtttgcctgagctccagcagcagagggtgcagggagaatctcgcttgctcacggcactcgcctgctggcctagaaggctctgcccccacctgtgtgctctcttttagcagtgtccgccgctacttgtcaccagagcgcctcgcctcggtgcgccgtgaggacccccgcagccggaccacatcctccagcagcaactgtagcgccaaaaaggaagggtaaggactggggcggcgtcaagccgcagaaagagatagggaggaaatggtcgagaaatgtagtcatgccccaggccacgaggtcgtaacctagagtggggccagctagttcaaaagcggggacggtgccagagccttggagggaccaatcttgaggtggcacggtaacagtggaaggtctgggagggcggagtcaatattgaggggcgtggccagagtttttagaagctggacggtcaggtctactgggtgaggaagtcagggaggagcttggcttatgggcgtggttattaaggtacaggagaggccccgttgagtttcagggatgaagtcaaggcagcagccacagagtttctacaaggaaagagggagtctgaggaatttaagggtgcagccacagtgttcgcctgggcgaaattaaaatctggggtacggagtaacagaggctgagaccaggtggaggcattccagattccagaagctttgacatcaaaatcggggggcactgccaggttgaaaagggcgtggcttaaaggttgggcggggccgtaggggcgtggtcaaatgccaagaggtgcagccaacttggaggcctcgaaggtattcacataaggaatacgtgaaaatggacgtaatcagaatgcctggcgggccggagaaggagcgttggcgggaggtagcagtcaattctcaagcaactgagtcaactcagggacagggttagaagggaggctcagaatgacaggcgtggtcaactccagaggcggggccatactgaagatctggacagagtcaaaaactaaggctatataattctagcagtttgggaggcggaggcgggaatcatcgcttgagctcaggagttcga

SEQ ID NO: 36988 - DNA, 1559 bp, Artificial sequence
  DNA replication origin
tgaaagtctgaagaggttttggggatagtggagtgtcttcctccacaccatcctcctcccggagctcggggctgcgcttcaggctgaaagcaggaaagaccctgccccttccaatccctctgcatccctattggtgaagggccctgcgcgacaggctctcattggttctgaacgggcgaggaggggggtctagagagactatactccggttgtgggcgggaccagacggtacctagggggatccgggcgcagccaatcctggccctaggattgtgttggggggcttggcaggcggtgtcccgacccccctttctgggcatcctggggatgaccccagcgccgggcccggcgccggccgcctgatgccaggcgagctgagctggggatgctggaacgaagggcgttgctatggcaacgggaggcagggcctggttggggggaccgggcccgggctgggaccgggggggccggcggtggctgtggtggggcgatggcggagcgcggcccggccttctgcggcctgtacgacacgtcctcgctgctgcgatactgcaacggtgagacccctcctcagttccgaccttggccccgcccaaggctggacccatctcttcttgccccagcctcctccttgcaagtccccaaccccctcccttgctgaagatcccccttttctctccctcagcaggaccctgacccaagagcaaggtccctggtccccaaaacctagatcccagccccccatccacttggatccttctgtactcccgaggtggctagacggagaggagagaagggggcagaacccgaaggaacctgggattggaagggggaacggcctgggggtcgattgggcctggaactctgccctttctctctcccctcaagcttctggaatgctcccctatctccatagcagggggacagacagagggggtgggggtggatttggtgttgagttgagggcagagtgtgggactggaaagggacggccagaggactttgcttctaggatacctcccaaatcctctggccctggccctcccatgcattagcaccatcccttctccctagacaaatgggtgtgataccagaaggaccactgtgggtgtcgggctcaggtgaggggagataggagaagaggggagttgggagggaaaagtgggaagtgaggcctggtctctgggaaaaggctgaggatggggggatggtcaggagggagcggagggcttgagtcacagggatggggatggtggaggtgtgggggttggtaggatgggctggccaaggcctgacagtgcagctggcctctctgggtggggcagaagggtcaagatgaaagcacctctattaactcagtttggaggttcagtcctctgggcacacaccctagtgccagggaccactggaattggcaggggacccagaatgcttattttgtcctcctctgtccctctaagagccagaatgacagggtggccattcctgttgagtatgggttcttccattgaacggctgtgtgtccgtgtaacaagtaacgtcacctttctgggcttcag

SEQ ID NO: 36989 - DNA, 1121 bp, Artificial sequence
  DNA replication origin
tcacttcccagtaggggcagccgggcagaggcgcccctcacctcctggacggggcggctggccgggcggggggctgacccccccacctccctcccggacggggcggctggccgggcggggggctgacccccccacctccctcccggacggggcggctggccgggcggggggctgacccccacctccctcccagacggtgcggctggccaggcagaggggctcctcacttcccagtaggggcagccgggcagaggcgcccctcacctcctggacggggcggctggccgggcggggggctgacccccccacctccctcccggacggggcggctggccgggcggggggctgacccccccacctccctcccggacggggcggctggccgggcggggggctgactcccacctccctcccagacggggcggctggcctggcggagacgctcctcacttcccagacggggtggctgccgggcggagggactcctcacttctcagacggtgcggctgctgggcggaggggctcctcacttctcagacggggcggccgggcagagacgctcctcacatcccagacggggcggcagggcagaggcgctccccacatctcagacgatgggcggccgggcagagacgctcctcacttcctagatgggatggcggccgggaagaggcgctcctcacttcccagatggggtggcggctgggcagaggctgcaatctcggcactttgggaggccaaggcaggcggctgggaggtggaagttgtagcgagccgagatcacgccactgcattccagcctgggcaccattgagcactgagtgaacgagactccgtctgcaatcccggcacctcgggaagccgaggctggtggatcactcgtggctaggagctggagaccagcccggccaacacagcaaaaccccgtctccaccaaaaaaatacgaaaaccagtcaggcgtggcggcgtgcgcctgcaatcgcaggcactcggcaggctgaggcaggagaatcaggcagggaggttgcagtgagccgagatggcagcagtacagtccagcttcagctctgcatcagagggagaccgtggaaagagagggagaggagggagaggagggaga

SEQ ID NO: 36990 - DNA, 1453 bp, Artificial sequence
  DNA replication origin
tgaggagcgtctccgccaggccagccgccccgtctgggagggaggtgggagtcagccccccgcccggccagccgccccgtccgggagggaggtgggggggtcagccccccgcccggccagccgccccgtccgggagggaggtgggggggtcagccccccgcccggccagccgccccgtccaggaggtgaggggcgcctctgcccggctgcccctactgggaagtgaggagcccctctgcctggccagccgcaccgtctgggagggaggtgggggtcagccccccgcccggccagccgccccgtccgggagggaggtgggggggtcagccccccgcccggccagccgccccgtccgggagggaggtgggggggtcagccccccgcccggccagccgccccgtccaggaggtgaggggcgcctctgcccggctgcccctactgggaagtgaggagcccctctgcccggccaccaccccgtctgggaggtgtaccaaacagctcattgagaacgggccatgatgacaatggcggttttgtggaatagaaaggggggaaaggtggggaaaagattgagaaatcggatggttgccgtgtctgtgtagaaagaggtagacatgggagacttttcattttgttctgtactaagaaaaattcttcttccttgggatcctgttgatctgtgaccttgcccccaaccctgtgctctctgaaacatgtgctgtgtccactcagggttgaatggattaagggtggtgcaagatgtgctttgttaaacagatgcttgaaggcagcatgctccttaagagtcatcaccactccctaatctcaagtacccagggacacaaacactgcggaaggccgcagggtcctctgcctaggaaaaccagagacctctgttcacttgtttatctgctgaccttccctccactattgtcctgtgaccctgccaaatccccctctgcgagaaacacccaagaatgatcaattaaaaaaaaaaaagaaaaaaaaatattttgtacagaggagctcttgctatattgccaaagctggtctcaaactcctggcctcaagtgatccttcggcctgggcctgtcaaagtgccggaataatagatgtgtctcactcactcttgccctggctgtaatgcagtggcatgatcttggctcactgcaacctccacctcccagattcaagcgattctcgtgcctcagcctccccagcagctgggattacaagtgtgcaccaccatgcctggctaatttttgtatttttagtagacacagggtttcaccataatggccaagctggtctctaactcctgacctaaagtgatcctcccgtctcagcctcccaaaatgttaggattacaggtgtgagccaaccgcacccagtaaaagttcaattttaatcaccattttagagatgatgatacagaaacagtgtggcagtgact

SEQ ID NO: 36991 - DNA, 704 bp, Artificial sequence
  DNA replication origin
tggacctacagactcctgggaacccggggaccgccttggagaggagggggtagaaaccgtcagcctagaccccttttctatggggaactgaaaaacttgaaggttttcagtaccccctagtggggtacttgaaacgcccatctgagttcccacagcctggtggagaacttgaaacgcccatccgagctcccactctccaagcccaaagggttttctagcacacataggaacctgaccttacaaaactttccccgctgggggtagataaagcccagagtaagtggaacaaccctttcccagcatccaaatacttagggactagagaagcgacagatccggggttagatgtgcagatgcctggaaatcggtctaacgcccgacacccactcacccgcgcccccgcggctccacgtagagaaagacggaagcagagaggatctcaggtcgagcctcagaaggacagacaacggcgtcacagacacaagagacagaaatgtaaagactgagaggcgcagagacggagggacagaatgagacccccagccagagaccagagaaaaacaaacagagaaagagacgcagatgtgggctaggagacaaagaagaggcagagacgtggagggagacagagcaggggaaagagaagttatctagcagctaaccagagatggaaacacgcagacagagacatcaagagacagaga

SEQ ID NO: 36992 - DNA, 788 bp, Artificial sequence
  DNA replication origin
gcgtgagccaccgcgcccgggcccagattcgagttttgattatcgtttccactcccttttcttcccccaacaagtcctcctgataatttccagccaccccctccccaattttcttgaaggttttcagtctcccatagcaactccagtgggtggcttccaggcaccccaccccaagacttggaactggtttccaagctacccaagactcccgaacaacacgcaacagaccctcaaagtctctctggggcgcttctgggccacatggacctagcagcctgggagcgggggtcggtctgggggggtcctcccttctttcttttcctagacaggctctaaggggcagacggcgggggagctgtaccagcgctgggaacggtaccgcagggagtgccaggagaccttggcagccgcggaaccgccttcaggtgtgaccaggagggctggggacgcggggaggacctgaggctgagaggggtgggcttgggatgggccttgggctgacgggcggggaagaaatctcggggcgctgtgggctggagaggcccggggactgacctgagcatggtgggaactggggcgggaccacggttcctgggggaggcctgggaggaagcttgaaatgggaggagccttgggcggggcctgcacagaaataaaccttgaagggggcggggtttgggatggagactgggaagggcccttccgggtgggacgatctggggcggggacttgtttggtgggaggagcccagagtggggccgggaggaggggcggagctttgaggctgg

SEQ ID NO: 36993 - DNA, 845 bp, Artificial sequence
  DNA replication origin
ggtctggcccctccctaggccctcgctgcctgccgcacggcccagatcgtgacccagtactgcgtgggtgccaactacacgtggctgctggtggagggcgtctacctgcacagtctcctggtgctcgtgggaggctccgaggagggccacttccgctactacctgctcctcggctggggtgagctccgatcccgtcccccgcccaacccagcgcgcctctcctcggctcccccaactgccctgctggttggcctctgcgggtctcctcccgtctctaggcttctgccttccccaccccgacagaggaattccgcgggtcttgggcctggcggggcccgtgagcgcgctgacagctgcggcggggtgggggggcggggtcggggtctgcacaggggcccccgcgcttttcgtcattccctgggtgatcgtcaggtacctgtacgagaacacgcagtgagttgcagggtctggggcggggcgtgggaggtgggcggggctttgagggactgtggcgggttgtgatggacatgtgggcagggtcggaaggctattcggtgctggggatacgtgggcgggatccgaagtaatggggagctaggaaaggttgtgttccagggcaatcggcaaggggagggggtggggcctggatcgtaatgggcgggaccttagagaatgtgtgtggtctcaagtgcggtgggcggggcctagcgagcaaatgagcttggtgatcggtgagtctagagtttttctatctcttagctctactccgccttccccaggtgctgggagcgcaacgaagtcaaggccatttggtggattatacggacccccatcctcatgaccat

SEQ ID NO: 36994 - DNA, 1149 bp, Artificial sequence
  DNA replication origin
tgatgttttgtgttcacggtctgttttccccactcagttgtcatctccagaagggcagggaccttttttctgtttccttcaccatttccccagcgtcctccgtactgggcctggcacgcagttggcactcaataaatccatgctaactgaacagacacggggatcccgccccctagcagtaactttccaactcccggctggcctcattcccaggccctgggagggtccccgaggacaagccgcggctggtggggacctcgcccgggccggagccggagggcagggcccggaaggcgcgctccgggagctggcgttgctcctcgcccaggctgcggcgcaggcggcagtggtgccagccacggcggatctccgactgcacctgtgagacgatggcgctcagaggcggcgccgtaccccgcgctgccgccagagggcgggggcggcggccgggtctctgcctacctccttgttgatgaagcagtagaggacgctgaccaggaagccctgcccagaggaggcgcggaggttacatcgctggtgggggcaggactgtaaccgcctccgcgcctccctccccgttttttgtttgtttgtttgtttgtttgtttttaagagtcggaatattgctcttgttgcccaggcgggagtgcagtggcacgatctcggcaaacggcaacctctacctcccgggttcaagtgattatcctgcttcagcctcctgagtagctgggattacaggcgccctccaccacgcccagctaatttttgtatttttagtagagacggggtttcatcctgttgtccagactggtctcgaactcctgacctctggagatccacccatctcagcctctcaaagtgctgagattacaggcatgagccaccgcgcctagcctttgtaactgttctcttaataagctcgcgcccttgccaggccctgaagcacctcagctaccgccaccgtggtcctaaactattagggtcatcttttcactggttcctggcttcccccacaccaaccccactgcttgctccagaaggttagctgagcactgctggctgggggttaagaactgtggaccctggaggtgggctccctggactcaaaaaccacctttccactttctttcccatttgggcaagctgctt

SEQ ID NO: 36995 - DNA, 1123 bp, Artificial sequence
  DNA replication origin
attttattttttaaaaaatgaggatgtcactcttacccaggttggtcttgaactcctgggctcaagcaatcctcccaccacgggtctctcaaagtgctgggattacaggcgtgagccaccgcacccggcttttttttttttttttaaacggagtctcactctgtcacccaggctggagtgcagtggtgcaatttcagctcactgcaccctccacctcccgagttcaagcctcccgggtagctgggattacaggcaccgccaccatgcctggctaatttttgcattttcagtagagatagggtttctccatgttggccaggctggtctcgaactcctgacctcaagtgatccacccacctcagcctcccaaagtgctgggattacaggcataagccaccatgcccggcccaaatgggctaatgttttaaacagatccttcttgtctgccctgtaggaggacaaattatcaggggcaggggtggaagctggagcccagaaaggaggggactgcaggtgggaagtgatggtggctggaccaggatggaggccactgaggggtatgaagcagtcggatttgaagctgtttaaaaggtggaggtgagaggatttcatgaaggagcacatgaggacacagcagcagagaggactccttggctttggatggtggagagactaaagatagagagattgggttcgggtagggggagaaccacgtgtgctctttggaaaggttaggctggcagtgtttgtaggacatgacaggacactgagtgtaagggtctggagctctcaggagaggggcgagctggagatagtaatgtgagaggcactgggtcctgagagggtgatttggtgtggaccggagcacaggtgaggcaaggcaggcctcgcagctgaaactttatatccagagcagccagggccactgctggctgcggagtgaggacgcatatccccactgtccttagatgggtggcccctggaacctgggagaatgagggggcatgctgacagtctcattgtggctggaccacctgtacatacacccacaagaccctcacccctaaatcctccccctacacatatgcacacttaagttaccgtatgggtgttgtcgagcatt

SEQ ID NO: 36996 - DNA, 932 bp, Artificial sequence
  DNA replication origin
gcgatgcggcttcttgggaaataacagctccagcgagaaagaattggggtgagggagaggatgggggccagaatggggggacccttaagtggtaccaaaattagctgccgtctgctccctgctggtgggtccttggggtggaaagcatggcagggagggggttggggctgaatggagaagaaagtgagatgctgataaaaaaaaaaaaaacacccttctcagagggtccacggccctggttctgaagagtagaaaatcaacaggatcaagcagagggctttcctgggtcacccctgctgaaccccagctcagttccggtgagggatcaatgctgcctggagtaggggaatgggcaggcggcccagtccggaccctcggctcccggggggagaggggaggggtgggcgtggtgggctctcccctcccctcccccggcttcacctcccctcctcccggccggcccggcccccgcctggcccattgcagggcagcacccagttgttatcgtggaggcccaggcggcagccgggagtctcgcggtcggctcgacggcagcacatccagtaggaacgtccgtaaggcaggtcatggtggtagggcttggggtgccagcggcagagcgacacgtcgcccttctcgtatctcttgcggcactgtttgcacggatcatcgcggtagagcgggtctcggctccagcgcgagtctgtggcccgcacgccaaacgcctcgatgatgcccttgaagtggtggcaggtgcacttgagggcggccagcgcgcgcgtgggcaggaagctgaagatcttgaccagcacgtgctcgggcagcagcagcatgtactgtcgcggctccagcagccgctgaatcttgaagcggatctctaggaagtcgtgcgacacgtgccggtacaagcggcacagggaggtgtccgccgt

SEQ ID NO: 36997 - DNA, 1406 bp, Artificial sequence
  DNA replication origin
ccttgctcggcggacacaaagactacaggcgctggggtggtcggtcgtgggtagctctgcagggccagggctgcccgctgttccaccagggccaccatctcggccacagagagcaggtccacgtcctcaccggctgaggcggggccctcctcagcagcaggggggccctcccggccccctgggtcaggaggagccttggtggggtcaagacagcgcctccgccgcttggccttggagctatcgctgccccagtgccccttgaccttcatggagctggcccggctgcccccaccacactggtgggccacaaagaaggccaccttctcctttgtattcccgggcttgatgacataccacgtgtccaggaggactcgaccctcatcaccagcagctgctgctgagaggagcggagccggctgggaggcagggacctcagtggccaaggcgggtggtgtgttctctgagtgggcaggcccatggtctggctcggccccgccaccaggctcagggcaggctgatggcttgagggccgcagaaggcgggcgtggctggttctgtgagtaggtgccaaagggccgggggcaccatagctggaagggcaggaggctcccacggtccatgctgggggatgatggcagacaggctgggcttcagcgcatctcaggacctaggtggtggtgggaggctccacatgccacctggagacacgaagaggaggttggggagctagggggacagcctttcttcccaggaccaccccaacctccacctctccttagaccaaaccagaccatcaagaactctattcctggctgggcgcggtggctcacgcctgtaatcccagcactttgggaggctgaggtgggcagatcacctgaggtcaggagtttgagaccagcctggccaacatggtgataccccatctctactaaaaatacaaaaatgtgctgggcgtgatagtccacgcctgtaatccaagctacttgggaggctgaggcacgagaatcgcttgaacctgggaggtggaggttgcagcgagaccagatggcaccattacactccagcctgggcgacaagagcgaaactccgtctcaaaaaaaaaaaaaaaaaaaaaaagaactctattcccactgccatgctcaggtgagcagacagaggttgcagaggggatgagagatgcccttttaacttgcagagcgggaccctaactggcagcacgcaccaaccccataggtcctaccccactgtccaactgcctttgcccacaatccagaggcctttaaactgccataacttttacacttaagtgaaaggaccactgacagacaaggtcctttttctatttgctcactcagtagctcgttcctgaaaagacagaaattcccagccccacccacagctatggc

SEQ ID NO: 36998 - DNA, 808 bp, Artificial sequence
  DNA replication origin
agatttgggggttccttttccatttgcaaaatgttctggggcttggggaagttttaacgtgggtttaggggatacttttggggttctctcgcgcttaaggggcaccttggagtttgggttcgtttgtaatgcggaaggttcggttgtgttttcgggatcgggttccctttgtgttttggagtgtttgttgggcatagaatttggggagctcccggagagacagaagcaaagagcccgagagtaccagtcctggaggtggaatgtctgggctcgcgtcttgacttcctacctgtcttaacccggacaggagatttcacctgtgtctcatcgggaactaggcattaataacactacctgcttcctagggaccgaggaggattaggaattgttagcgcagtacctacctagtaagctcgcagcgagcgtgcagtaagcacatgtctgctattgtaacatttgtgaggtttctttgttttttttttttggctttgtgaaacatttttatggtttaagattcatcttaaagtgttagggagcttttgtgttttcaaagagttcgtctgctgttggaggcttctagtggaattgggagataatggaggagggttggggggagtataggattccgggagagtgattgtttatgacatagtttggggaattgctgtgttgggatctgtgagagattgactgagattcggcccttcagtgctggagaggatatttttaggttcggtggtttaaagtagtatttgaaagcttttcgatatttgggggaggacattgagatgctgggggtaaggttgga

SEQ ID NO: 36999 - DNA, 904 bp, Artificial sequence
  DNA replication origin
tgatctctccgcctgcttccttccgccttggtgttcttaatccccgggctgcctggccctttaagtctcaagcgtcaatcagggcttctgttcgaggggacgtggtgtaataagcctcccctggagtgtcgtggcctttgccctgaccttgttccgtttagctggacgttgggagttgttccacgctcccttgcatccggctgtgtctaccccaccacccactcccatcacctctcgcctactcctccctatttcgaagttgggccccttcgccaaggcctgccttatatgggcacggccccgaatggcggccgctcattggctgagagcgtcacgcgcgcgtctgtcaacaaaagggcggagggaagctagttgctagtctgcccgcgcggtggccggagggaaggagcgagggggcgggcccttttacctttcgcgcgcatgcgtgtgggctgcagccttctcccgccgcctgggggggctgcgggtgagggctctttgggggcgtgtgtaggtttcgagggtcacctgaggggtttggaagatttctttgggggggcggttacaagatttgggggttccttttccatttgcaaaatgttctggggcttggggaagttttaacgtgggtttaggggatacttttggggttctctcgcgcttaaggggcaccttggagtttgggttcgtttgtaatgcggaaggttcggttgtgttttcgggatcgggttccctttgtgttttggagtgtttgttgggcatagaatttggggagctcccggagagacagaagcaaagagcccgagagtaccagtcctggaggtggaatgtctgggctcgcgtcttgacttcctacctgtcttaacccggacaggagatttcacctgtgtctcatcgggaacta

SEQ ID NO: 37000 - DNA, 1202 bp, Artificial sequence
  DNA replication origin
gcacaaatgaatcaataaatttgctcttccccaactctccacccctcaccaacaccctattgcaatattctcaattcccttcccaagggcctcgggcaaaaatggagccctcctggctagactccatctcccagcgcgcccagcggggaagcaccctgcgcttgcgctgccaagtcctccccggctttgtctcccgggagttcgagtcgttcttttcctccgcccgcctaatttgcttcctaccccacctccaagcttgaccgtgctgccttctgggggatgtagtccgtggctgcccggacttcaattcccagcgggcttcgggacgagaacccggaaggggaggctggagaggagcgagtgggggaaacccgcgtagccgagggagatgcagcgcgcggcgatggtgagagcccaggcgcgggccgggggcgctggagagtcgggacgggggttcgggaccgggtgacgagggggaagaggcaggggcgaaagaaggggctgggtgaggggagattgcctgggggagaggactgggaggaatgggagccggaggtagtagtagaagaatggtggcttggggaggggtcttggaggtggggtgggagtggagctttggaattgattgtaaaggggctcagagctggggaagtgggccccgagttggagactgggctggacatccaggtagaggccctgaaggggtcgatttcgatgggggcttaacctgcggcgagggtatgaggatcagggttaggatgagtgagggggtctggaagctccaagggacaggcgaacggtggacgcaatgggttggggcctctggatcggattgggggcaggaaggcaagttgaggaggtaggagggagaaatcagtggtaggatagagtgtgggtttaggctccaggactgagggtggggtaaggagcgtgaaattaggggcctggatgtagtgataatttccctagtcccgccagagactcccggtaagctggacaggcacagaactgtaggataatacggccagaaagggccatcgagacaggctttcgcaccctcacttccccggtggaatttagaagagtgtaatggtttatccctatgagaagtacagcattcatatcccctattcttccacccctttgtgccatggacaaatctgtgagcctcagtgcccttatctgtagtatgggaacagcaa

SEQ ID NO: 37001 - DNA, 978 bp, Artificial sequence
  DNA replication origin
gtgcatctgaatgcaaacccctcttcccctcgggaggcagcaatgggaaggccaggtctcgaggtgggctctgtgttcagcgctgctttggacagacactggaaggcaccccagacccctggtggtggtgtaatccgataactttattttaattgaaaatggaggcataacatgtcctagaaaaataaagatttaggatacaaaggagacacagcggcagggctgcccccagggatgagggaatctttggtctgggccggataatgaggacaagggcttgagtcgaggggagctggtgaaggaagacccccgtctccccacagctgccccaccccccgcccctggcaggaaatgccacactggggagggtctccagtctcaggggcgcggggctgcctgtcctccaccttcggattccaggcagttgtgacaacaccagctatcggcagagctattaatagtgtttcagggagtgacagggagagggctctgggggctggaagtccggccctggggcagggtgttccgcttacagctagtaccaagtggagggggcagggcccctgagtcaggaccctgagtcccccacgtatatggcagggcacagcatggggagggctgtaacagagaggcctcccatccaaagggggatggagacctggacaggaggtggccggggatacaacccccagcaccaccagggcttggagaggccacccaggcagaaggatgtggtgactggggtcttcagcaaccgcatttctggggctcccccctcccattcctgtccctgcgtcttcagcaccaatgtcgggagaggccacggggccacactgggtcacagttccaagggctcctccacaggcaccgactggagctgggtcagaaccttggcctcagcttccaacccctcgtcaacctcaccccctgcggtggcccccaggagcagcccctcagggtcggggtctggcagcctca

SEQ ID NO: 37002 - DNA, 1132 bp, Artificial sequence
  DNA replication origin
gcatggggagggctgtaacagagaggcctcccatccaaagggggatggagacctggacaggaggtggccggggatacaacccccagcaccaccagggcttggagaggccacccaggcagaaggatgtggtgactggggtcttcagcaaccgcatttctggggctcccccctcccattcctgtccctgcgtcttcagcaccaatgtcgggagaggccacggggccacactgggtcacagttccaagggctcctccacaggcaccgactggagctgggtcagaaccttggcctcagcttccaacccctcgtcaacctcaccccctgcggtggcccccaggagcagcccctcagggtcggggtctggcagcctcagcacggtgtggggggcctgtgtccccagccccttttccgcttccagcagcccctctgttcctgcgcttagttccagccctgctgaccagacaggcacggccgcgggtgacaacatcagcccctctggtgggggcgccgggaagttgggcaggaggccaggggagtcaggggagaagggcaggctggtgctggaggtggtggcagcggcggggggtggctgctgtgcagaaagggtgcctagggcgtgagcctctgggagagcagggctgggggccaccgggaggcctccctcaggcacggagatggccgtctctggcttcagtggcagggccaggccgggggctggcggcaggacctgggagacgagcatgctggtggggaaggtggcggtgaggatgatcttgccctgctgcagggccacacccgtcacgatggggctgccagacacagggttggccaggaggaagtttcctgtggggagagagggaccgagcgcaggtgagagccaggagagcaggccaagccagagagaagtggagactgtgcagctggagggcgggcggagggagccttgtggtgggccttggggcactgggacttgccagggatgagatgccctccaggagcccagggacagcccctccctctccgagatgactgcacccctccccggctctcacctaggcctgagggagggagatgggggtacctggggcagtggccgaaggcagctgcagggcagtcacgcccaccccggagt

SEQ ID NO: 37003 - DNA, 1447 bp, Artificial sequence
  DNA replication origin
gttcaatagtggggaggtggggctcaggcccgtgggataccccgggggtggggagagcggtaccacttgtggggcagccacagcaggcactggccccgggggcagaggaaaggtggcagccgtcggggggccaggcaccacttgggccaggggccccaggacctcctctccaagggctggtcccggagcagccacctgggcccctttggtctcaggggcctccgactgagcctcctccagccgcacctcccctgtctgagggtccaggaccagagaggtcttggtctcgctggccccctgagggctgggctgcggtggaggggcacccccgcccccagtgagcagcagcgggcccaggctggaggcctcgcccagggccaggccgttgatgatgacggggcccccgttgaggagcactgctggggagccgctggctgccaggaagctcccgttcaccaggatggaggaggaagccgggcaaggcgcgggagggccggtccctgccaggaatatggagccctgggcagcggcctcggcggacactggggccgcccctctctccaggtcctcaggacttcggctggactcgtcctcagtcgtgggattcccatcagactcgctggccggagaaatggctgtcagctggggtcccttagcctgtggggcctcccgcatagccagccagctgctcccccacctttccctggcccaagtttcggtggatcattccaggggttatgacgcctctctgagaccactccaaactccagggccttttgcaagccctgcgtggacaccactgcagagaagcgctggggagggaagaggcccttgctctcccccacctcggcctcgggtccccagaggctgagctcccaggttgccctaaaagttccttggttgggcggaaagcgggcgagtggcctggagagagggagcagcagccgccagcccagttcccggtgccctccccgcggggcgtcagagaagggagaggccggcgctcagggtgggaggagaagggtttgggttacagggaaaccggagctgggaaaggttcacgtttcacaacaaaggcagaagacggaccacgccgtccgggcccggagggagtgtgggggcgggtgggtaagagtaacggtcagtgaagaaagggggctgggaggcagcccctacgcggagtggagtggccacaggccctgtcctttttcctcagtccctctagtgccccccgcagtgtgattccccaacaccgatgggatttgggaaggagctcggaatggagccgctggaagaggagacgcgtgcggggagagggcccgggcgggtgcctgtcccgtccacacttagtccccgcgccccgcgggcgcctgagattgtgagctggtcccgggagatgtccgaggacctcggcgcgccggccccagcagtgggcacgggggaagag

SEQ ID NO: 37004 - DNA, 969 bp, Artificial sequence
  DNA replication origin
ttgtctgtccccacctaggacccccacccccgaccctcgcgaataaaaggccctccatctgcccaaagctctggactccacagtgtccgcggtttgcgttgtgggccggaggctccgcagcgggccaatccggaggcgtgtggaggcggccgaaggtctgggaggagctagcgggatgcgaagcggccgaatcagggttgggggaggaaaagccacggggcggggctttggcgtccggccaataggagggcgagcgggccacccggaggcaccgcccccgcccagctgtggcccagctgtgccaccgagcgtcgagaagagggggctgggctggcagcgcgcgcggccatcctccttccactgcgcctgcgcacgccacgcgcatccgctcctgggacgcaagctcgagaaaagttgctgcaaactttctagcccgttccccgcccctcctcccggccagacccgccccccctgcggagccgggaattccgaggggcggagcgcaggccgagatggggaatgtgggggcctgcagaggaccctggagacggaggcgtgcagaagctcagtctcggggcggaggcttcgcgcccttagtcctcctggacggcccgttaccttctgcgttgtcccgatggggaaactgaggccctgagccagaagcacacgctggggggaggcagaaagcgcggccagaggcggagggaaaacaaagggagaatcacagacagacgggagggggacggacacacacaaggggacagagacccgagtggagagctggatctcgccttcccggcgtggggcgcagggtcggccagaaagaagatcgagaagagcggggagtgggggcgaaaaggggggacaggtgggggaggaggctggggaaagcccgagggaggaagagagggagggaggaacttcccaaagttgcaaaacatggctaccttgcctgcggagccgagcgcg

SEQ ID NO: 37005 - DNA, 1062 bp, Artificial sequence
  DNA replication origin
aggcgtgcgagtggactaacaacagctgtaggctgttggggcgggggcggggcgcagggaagagtgcgggcccacctatgggcgtaggcggggcgagtcccaggagccaatcagaggcccatgccgggtgttgacctcgccctctccccgcaggtccctaggcctggcctatcggaggcgctttccctgctcctgttcgccgttgttctgtctcgtgccgccgccctgggctgcattgggttggtggcccacgccggccaactcaccgcagtctggcgccgcccaggagccgcccgcgctccctgaaccctagaactgtcttcgactccggggccccgttggaagactgagtgcccggggcacggcacagaagccgcgcccaccgcctgccagttcacaaccgctccgagcgtgggtctccgcccagctccagtcctgtgatccgggcccgccccctagcggccggggagggaggggccgggtccgcggccggcgaacggggctcgaagggtccttgtagccgggaatgctgctgctgctgctgctgctgctgctgctgctgctgctgctgctgctgctgctgctgctggggggatcacagaccatttctttctttcggccaggctgaggccctgacgtggatgggcaaactgcaggcctgggaaggcagcaagccgggccgtccgtgttccatcctccacgcacccccacctatcgttggttcgcaaagtgcaaagctttcttgtgcatgacgccctgctctggggagcgtctggcgcgatctctgcctgcttactcgggaaatttgcttttgccaaacccgctttttcggggatcccgcgcccccctcctcacttgcgctgctctcggagccccagccggctccgcccgcttcggcggtttggatatttattgacctcgtcctccgactcgctgacaggctacaggacccccaacaaccccaatccacgttttggatgcactgagaccccgacattcctcggtatttattgtctgtccccacctaggacccccacccccgaccctcgcgaataaaaggcc

SEQ ID NO: 37006 - DNA, 820 bp, Artificial sequence
  DNA replication origin
cacaagaaagctttgcactttgcgaaccaacgataggtgggggtgcgtggaggatggaacacggacggcccggcttgctgccttcccaggcctgcagtttgcccatccacgtcagggcctcagcctggccgaaagaaagaaatggtctgtgatccccccagcagcagcagcagcagcagcagcagcagcagcagcagcagcagcagcagcagcagcagcattcccggctacaaggacccttcgagccccgttcgccggccgcggacccggcccctccctccccggccgctagggggcgggcccggatcacaggactggagctgggcggagacccacgctcggagcggttgtgaactggcaggcggtgggcgcggcttctgtgccgtgccccgggcactcagtcttccaacggggccccggagtcgaagacagttctagggttcagggagcgcgggcggctcctgggcggcgccagactgcggtgagttggccggcgtgggccaccaacccaatgcagcccagggcggcggcacgagacagaacaacggcgaacaggagcagggaaagcgcctccgataggccaggcctagggacctgcggggagagggcgaggtcaacacccggcatgggcctctgattggctcctgggactcgccccgcctacgcccataggtgggcccgcactcttccctgcgccccgcccccgccccaacagcctacagctgttgttagtccactcgcacgcctcgaatcccgtccgaactcgtcattggctgcttcctagcggcctgtgttgattggctgcccgaagatccgccct

SEQ ID NO: 37007 - DNA, 1100 bp, Artificial sequence
  DNA replication origin
ggcggcacgagacagaacaacggcgaacaggagcagggaaagcgcctccgataggccaggcctagggacctgcggggagagggcgaggtcaacacccggcatgggcctctgattggctcctgggactcgccccgcctacgcccataggtgggcccgcactcttccctgcgccccgcccccgccccaacagcctacagctgttgttagtccactcgcacgcctcgaatcccgtccgaactcgtcattggctgcttcctagcggcctgtgttgattggctgcccgaagatccgccctcctgccgtgggcccagccccgcaaatgcgcagctaagcgggtggcaaggggcgggtggagcgcggggcgcgacggcggaggggggcgtgggcagccggacgtaccctggcagggagcagcaggtggcggcggtgcatggggcctggccccaccagcgggcactggcccacagccacggccggggggccatctagctggagagagaagggacaggtgacccgatcggagcccagcccagccctcagcggtggggcgagagacagcgaggggaatcgaggttggggaggttatctagggagatcccggagggaatctggtgaggcctgaacggagggagatctggggctgaataaagggcttctgccctctaaagtcgcaaagacgtagggtgagccctatatctggacggggagaccaggagccagggaggggatctgcagaatgggcagcaggtctgaggcaggggaaagagaggggtcttacatgggaaggtggatccgtggcccggggactggggacccccgtgacagctggaaggagaagaaagaggcatagggcgcgtggaggggcgaaggagggcggtggcgcggcgtgccccagcgtgggtcccttccctcctccaggtgtctatacacgccccgcggagcagacggcccacctcctcccggtcctccggggaaggggacacatgagggactcacctgtggctccctctgcctgcagcaactccatccgctcctgcaactgccggacgtgtgcctctaggtcccggttccgagcctctgcctcgcgtagttgactgtgg

SEQ ID NO: 37008 - DNA, 1358 bp, Artificial sequence
  DNA replication origin
cttaggaccacatctgtggaggtggccagagccaagcagtctccccatcaggtcggcctccctgtcctgaggccctgagaagaggggtctgcagcggtcacatgtcaagggaggagatgagctgaccctagaacatgggggtctggaccccaagtccctgcagaaggtttagaaagagcagctcccaggggcccaaggccaggagaggggcagggcttttcctaagcagaggaggggctattggcctacctgggactctgttctcttcgctctgctgctccccttcctcaaatcaggaggtcttggaagcagctgcccctacccacaggccagaagttctggttctccaccagagaatcagcattctgtctccctccccactccctcctcctctccccagggacagtgaggtcccaggccccacacccatggaactggaggccgagcagctgcttgagccacacgtgcaagcgcccagcctggagccctcggtgtccccacaggatgaaacagtaagttggtggaggggagggggtccgtcagggacaattgggagagaaaaggtgagggcttcccgggtggcgtgcactgtagagccctctagggacttcctgaacagaagcagacagaaaccacggagagacgaggttacttcagacatgggacggtctctgtagttacagtggggcattaagtaagggtgtgtgtgttgctggggatctgagaagtcgatctttgagctgagcgctggtgaaggagaaacaagccatggaaggaaaggtgccaagtggtcaggcgagagcctccagggcaaaggccttgggcaggtgggaatcctgatttgttcctgaaaggtagtttggctgaatcattcctgagaaggctggagaggccagcaggaaacaaaacccagcaaggccttttgtcgtgagggcattagggagctggagggattttgagcagcagagggacataggttgtgttagtgtttgagcaccagccctctggtccctgtgtagatttagaggaccagactcagggatggggctgagggaggtagggaagggagggggcttggatcattgcaggagctatggggattccagaaatgttgaggggacggaggagtaggggataaacaaggattcctagcctggaaccagtgcccaagtcctgagtcttccaggagccacaggcagccttaagcctggtccccatacacaggctgaagtggcagttccagcggctgtccctgcggcagaggctgaggccgaggtgacgctgcgggagctccaggaagccctggaggaggaggtgctcacccggcagagcctgagccgggagatggaggccatccg

SEQ ID NO: 37009 - DNA, 1218 bp, Artificial sequence
  DNA replication origin
cccttctcagtacctggtcatggagtattacgtgggcggggacctgctgacactgctgagcaagtttggggagcggattccggccgagatggcgcgcttctacctggcggagattgtcatggccatagactcggtgcaccggcttggctacgtgcacaggtgggtgcagcatggccgaggggatagcaagcttgttccctggccgggttcttggaaggtcagagcccagagaggccagggcctggagagggaccttcttggttggggcccaccggggggtgcctgggagtaggggtcagaactgtagaagccctacaggggcggaacccgaggaagtggggtcccaggtggcactgcccggaggggcggagcctggtgggaccacagaagggaggttcatttatcccacccttctcttttcctccgtgcagggacatcaaacccgacaacatcctgctggaccgctgtggccacatccgcctggccgacttcggctcttgcctcaagctgcgggcagatggaacggtgagccagtgccctggccacagagcaactggggctgctgatgagggatggaaggcacagagtgtgggagcgggactggatttggaggggaaaagaggtggtgtgacccaggcttaagtgtgcatctgtgtggcggagtattagaccaggcagagggaggggctaagcatttggggagtggttggaaggagggcccagagctggtgggcccagaggggtgggcccaagcctcgctctgctccttttggtccaggtgcggtcgctggtggctgtgggcaccccagactacctgtcccccgagatcctgcaggctgtgggcggtgggcctgggacaggcagctacgggcccgagtgtgactggtgggcgctgggtgtattcgcctatgaaatgttctatgggcagacgcccttctacgcggattccacggcggagacctatggcaagatcgtccactacaaggtgagcacggccgcagggagacctggcctctcccggtaggcgctcccaggctatcgcctcctctccctctgagcaggagcacctctctctgccgctggtggacgaaggggtccctgaggaggctcgagacttcattcagcggttgctgtgtcccccggagacacggctgggccggggtggagcaggcgacttccggacacatcccttcttctttggcctcgactgggatggtc

SEQ ID NO: 37010 - DNA, 943 bp, Artificial sequence
  DNA replication origin
actgcagagggacgacttcgagattctgaaggtgatcggacgcggggcgttcagcgaggtaagccgaaccgggcgggagcctgacttgactcgtggtgggcggggcataggggttggggcggggccttagaaattgatgaatgaccgagccttagaacctagggctgggctggaggcggggcttgggaccaatgggcgtggtgtggcaggtggggcggggccacggctgggtgcagaagcgggtggagttgggtctgggcgagcccttttgttttcccgccgtctccactctgtctcactatctcgacctcaggtagcggtagtgaagatgaagcagacgggccaggtgtatgccatgaagatcatgaacaagtgggacatgctgaagaggggcgaggtgaggggctgggcggacgtggggggctttgaggatccgcgccccgtctccggctgcagctcctccgggtgccctgcaggtgtcgtgcttccgtgaggagagggacgtgttggtgaatggggaccggcggtggatcacgcagctgcacttcgccttccaggatgagaactacctggtgagctccgggccggggtgactaggaagagggacaagagcccgtgctgtcactggacgaggaggtggggagaggaagctctaggattgggggtgctgcccggaaacgtctgtgggaaagtctgtgtgcggtaagagggtgtgtcaggtggatgaggggccttccctatctgagacggggatggtgtccttcactgcccgtttctggggtgatctgggggactcttataaagatgtctctgttgcggggggtctcttacctggaatgggataggtcttcaggaattctaacggggccactgcctagggaaggagtgtctgggacctattctctgggtgttgggtggcctctgggttctctttcccagaaca

SEQ ID NO: 37011 - DNA, 971 bp, Artificial sequence
  DNA replication origin
ctgcagtcggacctccttaagcctcaccacgatgggctccgctgggggggtggtgggggaaaagaaccgagggtcaccagaaagggcactggagacaagggggaaagccccaccctctgtctgtctccccttctctctgcctctcagcttcaccctaggactgtctgcttcccaggggcttccccacataaacaccgtgtaaggttctgggggccaaaaatgccctcccatagaggtgagatgcctgagaagccctttgcgggacagggcattggcccagagggctccaagggtgtgcaggatggttagggtggggtaacggagtctgcagaaggacagaccctaaagaacaaggggagaaggaaataagacccagttcttccaccttccaccctgactccaggtgacagttcaggtgcagccagggccccacccccacgttctcatgtagaatgtcctgggtaacggcccagacgtggggttgtatccagtacctctagattcagatgcaggtggttcttgaaccacactttggaaaaccctggatttggggctgggggaaggaacaggacagggagacaaaggtagcatggtcacatatcccagactcaagtgctccggtccagcccatctctcagtcctccaggaggagtgctttagtcctaccccttatttacagatgacaatcaggcctctcagaagtcaaggtcctatgactaggaatgttaaactgggcagcctgggtgggggaccagctggggtggaggcttgtggctcagggactgtggggacagggaggcctggactcccgggggtggaagaagtggaggcaggatggagagagggatgggtatgggaggggagggaaggagaggagacagtgggttctggaggaaagagaggggttccggggggttccgggagagtgggccagcagggacgaaccagccagggctgaggacgggggaggg

SEQ ID NO: 37012 - DNA, 1038 bp, Artificial sequence
  DNA replication origin
ttgatgaggggccctggctgcgggcaggatgctcttctccccaagagggtcctgctccagccgctggtgtgggtcaccagttgtgtgactcgcaggtccgttccctccctgggctccggcttttcctgctatgaaaaggggtgggaggcgctgggctgggagcaggcctgcactcctcctctggggaaagcggactgcctagaaccacagagtacacacacaggtcctctacatcatctcctccgaaggggacagacccgctgagaaaacagggaactttagtataaataagaggtcctgcgggacagggaggaacctgaggggcttccataatttaacactcttcaaaagcacagacaatagcaagggcagctggggtgggggccgggcgagggctggaccacccccggccctgcccactcaactgaggggcacactgcagacctggggctcttgtggcaggggcggggagtctctccccaggagtgaccagtcacatgctggggacagggatgagggtaacactgatgtttcagaggaagaggtcattgtacttggcagtgggtgggggacaaggctgaggccacaagggctattacatcgcccgtgtccgggccagtctggggggcccccaaattttgtgcaggtggggggactggagcagtccatccatcatggttagtcttgttaatacgttgatctgtgaggtcagcagggagggttatggctaggaggctgggggcatggggttgggggggcccgatatccatggcttcacaccactgtgccactcggggagttgcctggttgggaggagatgccctggggaagatgagagggagagatgggaggggttagagaccacctgggcttcagccagtgtcaaggggagggagccagcccagagtccccaaagctgctgccaccctggccttgcccttgggtccgccctagaccccccagaggccactgctctaggctgggaacttgcatcttagctagcttcctgtcctggcagtcagcactttcacgcaataa

SEQ ID NO: 37013 - DNA, 1491 bp, Artificial sequence
  DNA replication origin
gcgagcctggcccaggccccctgcctcgctcgctgtcccgctccaacagtctcccgcacccagctggcgggggcaaggcgggcggcccgggtgtggcggcagagcctggcacaccattcagcattggccgcttcgccacgctcacactgcaggagcggcgggaccggggggcagagaaggagcacaagcgctaccacagcctgggcaacatcagccggggtggcagtggcggcagtggcagtggtggggagaagcccagcggccctgttccccgcagccgcctggaccccgccaaggtgctgggcactgcgctgtgcccgcgcatccacgaggtgcccctgctggagccccttgtgtgcaagaagatcgcccaggagcggctcacagtcctcctgttcctggaggactgcatcatcactgcctgccaggagggcctcatctgcacctgggcccggccgggcaaggcggtgagtggccccacaccagcctgccggggacctggcaggacctttcgtgggaagaggcaggcattggcagagagagggctttgttgctgtcacagcctctggctccgtggggtgaggggaagccagggaaatcttagtgtctcagtacaagacctctcagatccttagagtgagggggtctagccctaggcagcaggcagcagaaagaggggtgggtgtgagagccagctaggaattggggcatccaaggctggccgtctgaagggcagcagatgggccccacatggccaggtcttactgcctgtcactcgaaccagaatctatttctgttgaacatctgttttttaaatcgtgaaacttttttgagtacttcaggccaaaactaggggcgagctcaagcctgtgggcatggctgccagcctgggtctgggactcaggatctgagcctcctgctgaaggcacaggctgggaatcccaggcctgggttccagtcccactccctctgtgaccctggacaagtcactgccccctctgacctccaactcatcacctcttagaacagagcctgtaggatgggcagtgggtggatgtgcttgcctcctgggtgggctgtggcgttgggaaggtcatagtaggcgaatcaggcctggcatcttgtaagttcggagctcgtcttgggtgtctcagcttcttagggcttggactcagttgcccagggtcctggaggccgtggcttggttcctcagatcctcagttttggaatcgtagagtcctgagtccctagaacttgagagcacagtctgagtgactcagaggcaagagtggtgggatttggggagtctggttgagtcctaaaagagacccctctgtctccgtagttcacagacgaggagaccgaggcccagacaggggaaggaagttggcccaggtcacccagcaagtcagtggtagaggtaggactgtccctgagttctttccccagcacctcagggtccctcccaagttagaagggagctccagtttc

SEQ ID NO: 37014 - DNA, 2158 bp, Artificial sequence
  DNA replication origin
ggcccaggtgcagatgaggccctcctggcaggcagtgatgatgcagtcctccaggaacaggaggactgtgagccgctcctgggcgatcttcttgcacacaaggggctccagcaggggcacctcgtggatgcgcgggcacagcgcagtgcccagcaccttggcggggtccaggcggctgcggggaacagggccgctgggcttctccccaccactgccactgccgccactgccaccccggctgatgttgcccaggctgtggtagcgcttgtgctccttctctgccccccggtcccgccgctcctgcagtgtgagcgtggcgaagcggccaatgctgaatggtgtgccaggctctgccgccacacccgggccgcccgccttgcccccgccagctgggtgcgggagactgttggagcgggacagcgagcgaggcagggggcctgggccaggctcgccacccctcgagctgctggcggccggtggcgtggtgccaggtgtgccagggagggtgcgggtgcgggccaggggggggtgcgggtagagcacgtcttcagtgaggtcccacaggcagaactgcgtgtcctggcccgccgagccaaagcggtaagtaatggagccagccttgggcagtggagagagcggggcgcccccggccgagcctgtgcccgcagcctcgggctcctcctcctcctcttcgccgctccgctccccatcagcaccggctgctgtcgccgcctcctctgcccttgtggtgtaggggtcaaaggccacagcgttgacccaggacttgtggccatggcctcgagccaccacgcggccctcggtgaaggaccacacggtgaccaggtcatcttcgccacccgtcaccacgtagcggccgtcagggctccagcacacacacagcaggcccccaaagtagctcttcatgagcccacgcaggagcatggagtcgaagtggaagacgcgcaggcagccatcctggctcacacaggccaggtgccggccatcgggcgagaaggcgaactcgttgaggggcccctcacccaccgcccacttggccagcgggttgcggggtgccttgctcttggcagcatagacagagaagccctcgccctgcttcagcaggctgtactggggcggggccgaggcgcaggggtggctgacgttgtacaggtacaggtggccactggcgtgtgatgccaggaacaggctctccgactcaggcagccacttcagatatgtcaccttggtcttgtcgatcaaccgctgccaggggagacagtgtggggttgggagaaggcagtaaaacccaggcagaacttctccccgacccaaagtccccaagaaggccgttggacatggccccgctcacacagcaggtgccacaccaggcccaggtcctcctcggagagaagctcccaaactggggaagacagatggacaccaggtcatggaaacatggggaaacagaggctgctgcaaggtggccacagggtgctccaaggagcctcgatgtcccatctttggcgaggggacagtcctgcttgccacagaattgtcctgtatctcggggtcctcaacctccgggccatggaacagtagtggtccgtggcctgttaggaaccaggccatgcagcaggaggtgagtggtgggcgagcaggcattacagcctgagcccagcctcctaccggagcagcgcaccattcaatcctcgtaagagtgcgaaccccaccatgaactatgcatgcgagggatctaggtgtgcgctccttattagaatctaacacctgatgatcagaggcagaacggtttcatcccaaaaccatccccccaacagtctgtggaaaaactgtcttccataagaccagtccctggtgccaaaatggttggggaccactgtatctgtctaaccctcccccgatctttactacgtcaggcttcaagtaggaaatttcttcacggaaaggcagctccccaaaggaagcgatctttgtttggttcactattctttaaagcagtgcacacaggaggcagcttgaaggtaattcctggacaaatgagtgacaaccccccatcccgctaggtgcttagacaaaaaacctcggcatctgcccctcttttcctcatccaatccttccacaaatcctgtgggctcgacct

SEQ ID NO: 37015 - DNA, 1348 bp, Artificial sequence
  DNA replication origin
tattggacatgatggggtatctgagatgaggtgggatcccccgggttctggggtggcaggcattctgcaggtaatggggaatcatgaggtgatgcaagcccagaggtgatggagaacccagtattgcagcctggaggtgtgggagaggggtcttgagattgagcccaggaatgaggagaagtctagaagtgatgggggccttgaaggtgataggggatccagaagctgaatgggattctagagaaaattggggtctggaagtcatgagggtcctggaggagatgagcgtccggaagctgatgggagctctcaagggaatgagaggccctggcaggggaatctgcaggtgtgattcaggacatctctaaagcgatgtggtgagaaccctggccgtttatggtgatcccagaaatgatggggatccttcggagcccctaggtaataaatgggcctaaaatgtgggagaccgtgaggtttgacgggtcccagaactgtggcggtttagggactacaaagtgaagagaatgctaggatgttaggctttagagtcctggaaatttgggtgacctcaaggtttgggggtcttggaatagtgtggtactaggtcccaagggagttgctgaggttataggatggagtggtgaggctaaaaggaatcggagcttaggaactgtgtggacccagaaccctgattatgtggacaagggtgtctctgaattagaggtgacccaactttggggaggcactgtggtcaagggggatccttaccatcttttttgctactcttgtctgtgatttgggtccccttcccgtctgtggttgccccgtccttcgcaatccacctactcacctccccacttccctctgggttctaaccctgcttcctcttagtggtttcccccaacctcaacatcctcttccttctcctcagtggcatacaccattaactccttttctcccacccctcaagtccattgacctcaacaagccaattgacaagcggatctacaagggcacccagcccacctgccacgatttcaaccagttcactgctgccaccgagaccatctcgctgctggtgggcttctcagcgggtcaagtgcagtacctggatctcatcaaaaaggacaccagcaagctgttcaatgaggaggtgattgcagcccccagagcccccaacttctctgccttctcacctacccactatatgccattaggatgcagctgcctgcggaacagtgtaggcctgagaggggcaggaccagggagagatggagaatggggtgacagcagctaatgacagctgcctttactgtacccaggccctgtgctgtgttacccttgtgct

SEQ ID NO: 37016 - DNA, 1142 bp, Artificial sequence
  DNA replication origin
gaccccaccttttccggcgcgggccagcggcttccgggagggggcccggctgcgggcggcagtccggcagtggcggggcccggggggcgcccaagatggcggcgggcggcgcggagggcggctcgggccccggcgccgccatgggggactgcgcggagattaagtcgcaattccgcacgcgcgagggtttctacaagctactcccgggcgacggcgccgctcgcaggtcgggtccggcttccgcccagactccggtgccgcctcagccaccgcagcccccgcccggccctgcctccgcctccggtcccggcgctgcaggccccgcgtcgtccccgccgcccgcaggccccggacccgggcccgccctgcccgccgtgcgcctcagcctcgtgcgcctcggggagccggacagcgccggggccggggagccgcccgccacgcccgcggggctgggctcggggggagaccgcgtctgcttcaacttgggccgtgagctctatttctacccaggctgctgtcgtcgtgggagccaacgggtgagcggcctgcatcgtggggccctgggtgctgaaaggatggaggttccagagaactgataggagggtccccgaattgatatggggccctgagataggcattctaaatgtgatggacgttgtagggcgacagcattggagggagtacaggattctgaaatgtgatgagaggcccgcggggtgctgggcaggcatcttggaggtgatgggggaaatcccctttacccccgttatgcgtaggagttctgggatggtgactattggacatgatggggtatctgagatgaggtgggatcccccgggttctggggtggcaggcattctgcaggtaatggggaatcatgaggtgatgcaagcccagaggtgatggagaacccagtattgcagcctggaggtgtgggagaggggtcttgagattgagcccaggaatgaggagaagtctagaagtgatgggggccttgaaggtgataggggatccagaagctgaatgggattctagagaaaattggggtctggaagtcatgagggtcctggaggagatgagcgtccggaagctgatgggagctctcaagggaatgagaggccctggcaggggaatctgcaggt

SEQ ID NO: 37017 - DNA, 1162 bp, Artificial sequence
  DNA replication origin
aacaaggaactgagaaagaggaattccacgtggtcgaatgcaaaagacttggaggctgtaagcgggggcagagtgaagataaatggtacacatctaggaagacacccaggtctgtggcctggttgactgagtggacggcagagctagccctaaggtggggatgcaagagaggtggaggatttggtgtaagacgtcaatttcattgtaggattcttttttctttcttttttttttttttttagagagactgagtctgactctgtcccccaggctttagtgcagtgatgtgaattcatagcagtcttgatctcctgggctcaaacgatcctcccacctcagcctcccaaagtgctgggattctcggattccaggcatgagccaccatgcccgaaccattgtaggatttttttttttaagtgtgagatgcccttgggacactctagggagaaatcgtagaggccattgactacatgagactagaaagatctatgatggggctgggtggcttcagcagacatggggagcactggctatgagtaggagctgttgggatcagggggagactttgggttacgagtggatcactgggacactggggcaccgtggggatcaatacaatttgggaatcagaggtaggttttggaggacaagtgaggttgttgaaaataagaaaatcatggaaatatacattggaggttggtggaaaatatgaaggatgtttggagttagcattaatcaatagtgggtcagaggaagtcctctgagttgtgtggggacacagggatttggtgggtcaccaagggtggggaagaatggtagcagatgctgtggtcattcagggatttgaatatgtcagtgggaaacactggaggtcaggggagtgtatattgggcgtctaaggagagaccagggtcacttggggttggctgtgacttcatgggaaggctggactatggatgagggcttctttgtcgtgggggaaaaaaaaaaaaaaatccctccgttgctaggcaaacgttcccagggcgcggttgctaaggacttgagctttctaactggccacgcctctttccattgcgggctccgcccccgcagccaaccacaagtcggtcacaggctcaaaggccgcgcccaccttctcgccccgcccacagtcccagca

SEQ ID NO: 37018 - DNA, 1406 bp, Artificial sequence
  DNA replication origin
ggagggacacggccagctttgtgctttaataagaaccattacttcatcaacctcatttctcccgctctccctcttcctcccttggttccagacacaccagcccctccttactgctcctcaaaaacagcaagcctcagagcctttgcatttgcagtgtgctctgcctggctcactcttcctccggtcatctgcaagatgctctccctcgactccttcagggccctaatcaaatgtcacctccttggacaggccttcactgacccacacaatttatttttttgagatggagtctcgctctgttgcccaggctggagtgcagtggcacgatctcggctcactgcaacctctgccgcccgggttcaagtgattctcctgcctcaacctcccgaggagctgggattacaggcccatgctaccatgccctgataatttttgtattttttagtagagacagggtttcgccatgttggcaaggctggtctcgaactcctgacctcaggtgatccgcccgtcttggcctcctcaagtgctgggataacaggcgtgagccaccgcacctggttggacccccactatttcatgtgttccctagccctcttagcctcccttatttttcacctgagtccttagcttcagtttatcactttttctgtttcttgtccactctcctagaatgagagcatcctgggtatctaatggaggctgagagcagtgttttgtgactgtagctaagtggctttggcaagtatcttcctcaggcagggaggtttagttgcaggataagagggtctcaggagggctgggcacggtggttcatgcctgcaatcctagcactttgggaggctgagatgggcggatcacttgaggtcgagtttgagactagcctgggcaacatggtgaaatcttgcctctactaaaaatacaaaaattagctgggtgaagtggagcgcgcctgtaaccccaactactcgggaggctgaagcagaagaatcacttgaacttgggaaggagaggttgccctaagccaagaccacgccactgtgctccagcctgggtgacagggtgagactatgtctgggggaaaaaaaaagcaagagggcttggggagccaaatcacgtgttctggaatcctgactctgccatatcctagctgtgtagttttgggtaagcgacccaacttctctgtgtctcggtctcctcctctgtaaagtaggatgagctgatgtgctcatctccggtgagaattaggtgagtgtgtgcagtgccagcacatgtctgggaagtgaatgctagctgttgttggcattgattccgactcagctgaattagagtcactggttttccatgagggatgatcccttgtctgactgactgaggcaggcacttcgggtggggcccctccctgc

SEQ ID NO: 37019 - DNA, 956 bp, Artificial sequence
  DNA replication origin
tgccctaagccaagaccacgccactgtgctccagcctgggtgacagggtgagactatgtctgggggaaaaaaaaagcaagagggcttggggagccaaatcacgtgttctggaatcctgactctgccatatcctagctgtgtagttttgggtaagcgacccaacttctctgtgtctcggtctcctcctctgtaaagtaggatgagctgatgtgctcatctccggtgagaattaggtgagtgtgtgcagtgccagcacatgtctgggaagtgaatgctagctgttgttggcattgattccgactcagctgaattagagtcactggttttccatgagggatgatcccttgtctgactgactgaggcaggcacttcgggtggggcccctccctgcctgggtcccccacccgccccactcctagcccctgctcacaggctgaggtcgcaattgatgctggtctgcagcaggtaggccttggcgttctgcacggccagctccagaggctcgggctcaggcacctgggcactgtagtgtgggaagcccagctcagagggcaagaactgaagggcagggtcatcccttatgtaaggcccgtgctgggcaccttcagagaactggtctgtctggtagaggttgaactggcccaaggggttgactgggggctcctggaaggtggggtccagttgctggaacaggctgctttggccctgctggagccgctgcagcattaggctggtggtgagctcggcgacctgcatcctgctttcatcagagtaaggctgaggctggaactctgagggaaagcccgtgttcacagatgggtactccatgccacccagccgggcttcctcagcctggaagacctggggcatcagcaagttctcctgttgggacaggctgcccctctgtgaccaaccaggggcgtttcgctgggcgtctggaggtatctgctgcctct

SEQ ID NO: 37020 - DNA, 1616 bp, Artificial sequence
  DNA replication origin
ccgcccgctgccgtctcctggtgaccggggaaggaaagggcagccgggtggagggcgcggtcacctccacgctccccttcaggccctgccccctgatggcccctcctcccccaccttcaccccggcccagatccggcttcttccttcgcagcggaggctgctctccctaccttgggtagggggccctcgagactagagtccaacagcgcggcctcggtcagccccgagtcgtcatccatgctgatgaagatgcccggggtctcgcactcaggcccctcctcccggaaatccatggcttcctcagacgggggcgggcctggccgggccgacggagagggagagggggaggaagaggagggggctcccactcctcccggcttcagcttctgttcctcctccagctgccgctttaaggccttctcctgggccagtcgcaggccgatgaggtcctgagggggccggggtgctggggccggggccaaggtcaggggctccagatcatcctggggatagggagggccacacagaagctcagaggtgggtggctcagaggacggccggaaagagaaggaaccaccctgaggtggtctttgagttcttcaccaagagcatggggaggaaggggcagttgtcccccagacccccaactcccagcaggagcatcccctgggagacgggtggcccagaggcaggggtggcctgagtctctcggggtcaggaggaggccatggtgagccttgctggcttggggtagggggtgggagtctggggatccagatgggtgggctgcagggccctcacctcctccaagggccccgcaggcgcctccttggcctctggctcctgcttgccgctggcctccaagatggtcatgatggagttagggatgtgagcttgctgggtggagagcaggaagggggcgctgggggcagctctggcacagagaccccatttgcacacctcaggtccgggggccctaaccctccagaactcccagcagtgcagggccttcttgtgtccgcctccatccagtccccaccaaccagagggacccagggggccgcccaccgcacaccctgggtggggggaaagggtacctggtggggggaaggggtacctggtggggggtgaaggagcggacatgggccagcaggggctcccggagctctgggcacttgtcaaagacggctcccagctgctggggcggcagctgcaggatgacctggaagctctggggctttgtgcgctggcagcacttgatgaagccctcccacaccttggggtacttccacacctgaaccagggagggagggagccgtcgggagaggcacacaggcatccccccgagccttgacactgggagaaagaccttgccaagaccatgcccaaatcccaccatccaagattcctctggatgggcaacaagcagccccgacctccctccagaggcctttgtcttcccgatccaggcggctggaccacgagggcaacttgggaagggggtggaagaaaactcagccgccttttaccagagctccccctgggccaggcccaggctaagtgctgcgggagcacctctcatgacattctcacggcagcctccagggggcgaaatt

SEQ ID NO: 37021 - DNA, 936 bp, Artificial sequence
  DNA replication origin
gcttctgcttggccctgagtaagtcacctaacctctctggagcctccatttcctgtctacacaatggaagtgaacatacccaccaagtggcggaccagcaggctcaggcctgtaggcgttcagggagagcccagcgcagagtgctcagtgagtgggggccatcgtgaggcggccagttcgtcaccaaccctgccgccctgcaggcaagctctcctgcctcacctaccctggcccacaagtgccctggagccctgggtctgccctgctgctgcgcctctaccactcacggtgtgccctgcttccttctgttcctcggggctaggggtggggctacccaactgctttaggcccactctgtgccagggcacagcaggtacatcagaggcagaaaaaggtgggttgtaaagggtaaaacctgggaggaaggaaggaggagggagggagggagggagggaagaggaggcaagaaaaggagggagggagggaggtggctctccagagctctgaggtggggctgtgagtgacagtctttgacttggcagattccagtgggggcatgtgggtgactgaggtcctgccctggcgtcgcaggggccaggccactggagtgggggggaagcgcctcacctttgatgatggatttcatgtcgcacttcacggagtcaatgttgtgtaatgcgatcaggagctctccagggttcagcggggacaaggctgagtttccctcacctgcagcaggcgggaggaagggtgggggaagacagtgcggacgcataagtgaagagatgggtctgagttccccagatcgggggagctgcgagcaaagatgaggtgccctctgctttcagggctggaacaggggaagcgactgacaacataaaaaggggacaccgaaggcagcagcagccctcaggcagcgtgaggttgccactgtgt

SEQ ID NO: 37022 - DNA, 744 bp, Artificial sequence
  DNA replication origin
cgcgctctgggccctgcgagcagaggggatgagtggggaagccactcggacacgagtgacgggaatgggcaggactgggacagccacctgggggctgtgggagtcagggtagggggcatctggcccagcctggggggtcagggagagagatctggaggacgaggagagccagccatcggtggggcctgaggaaggaccaggcagggccatctcaggcaggttccctcagcagagccctggattacagacaggtagactcagaccccgagtaaatggaccattaaatgggaaggcttgggccatgatagggcagcacgggaggcctggcccaggtgccaggaagcattcccaggagatgcacagccttcgggaggcccagaagctgagcaggtgccgtggaccaggcaaagaggagggtggatgcaaaggcaaagagaccagggccctcgggactgttagaatgggtatgtgaccaacatggagggcagcagagcagcagcgggccggggccaccccatacaacacctggcagacagtgtgaggcagggagctgggggtttattctgaggccacagggcaggcatggctgggattggagccagagagggacagggtcaggatcgcactttagaaagatccttctagttgccttgtgtgttggcagtcacgggaggctggaggtgggaagtcctggtccccgccatttccctgccctagaacaattagctccccagccccggctcc

SEQ ID NO: 37023 - DNA, 1042 bp, Artificial sequence
  DNA replication origin
gcactgttatttacagatgggaaaatggcagagagagggagtgacaaagccacgcagagcaagctcagagcaagtggcagagctgaggaacagctcagggagtgcgacctggagcccacatgcaaaactacaaccttgaacgtgcctccagagggggaggaggagaggagacttgggatgggtgcgaggaggactgactcggggggtgacgaagagggaggtggtcgcaatcagaaagggagggcagcaccaggagaggaagcctctcggggacaggagggtgcagggtcagccccctcacccatccttctggtctggtttctcctgcaggccagacaacaggcggatgaggcagtcctcatacttgtccagggagcccgaggcacctgcggccaggtaggcgttgtactcctggtagagccaggcgaaggccaggtccaggcgggcccgcacatcctccaggatgaaggacaggacctccgccttcaggcccgagttgaactgtgtcaccaggctggccaggatctttatgcggacctggtgggagggtgagccagcatgtcagtgtagggtgggcaatccagggactccgcaatcgtgccctgcgacttctcccacccagacgcaggaactctcagagcagacaaggagtgaagcgaggaaggccagccgaggacccttatgcctaggaaggtcccgtttgtgtgttggggggtgggggtaccagggtggggatcgatcatcacagaataaaaatgagtttctaggagcagcacccatgtacttaagtgcacagaaaaagatcctcaaagattcccctcatttgtgcctttgtcacctttgaagagagggatggggtgcaggtgatggccacggaagagtactggatctggattccccggaaatatttttcagctcagggagtatgttcctatactactggctaatcaacaattaacttcacagaatggggaaaaagtcacttttccccattctttgaaggtaacagtgccagcaagtggcagaatcaggacagagaacc

SEQ ID NO: 37024 - DNA, 1141 bp, Artificial sequence
  DNA replication origin
aagaaagaaaagaaaagaaaaagaaatgcttcagactgttgaaagggtcaagaacaaagatggaggggatcggggcctctccgcagaccccactagggcaacagaccacctcccctccaagacccaggagcttcgctgcccgaactccgcactctccaagaccagccagccgtccagggactcagcaccactgagaactccatttcccagaatgctctagctccctttccgcccggtgcctccgaagggactacatttcccagaaggcctagccggacccagagccggaaatgaagggtctgctcgccgtagtatggaggcgggcagaatgccgctcgcacgggacgaggcatgggcggggtcgggctgtgctctggactccatttcccggcggccctgggtgtgtggcgcgtgcgcaccgttcccggcgacgaacggaagatggcggcggcggcggcggcggagtgtaggaagaggcactgctgagggggcgcgaggggaacggaggccagagctgcggtgagcgggaggcggcgtttgggcccggagacgaaaggaggaggctcctaaagaagcaggggctcgggcggggagggcatcgccgtggggagaggggaacagtggctttcgcgacccatgtttcttcccttgctcaggacccttccttggctccctagtgccctcgaggcaaagttccaacgtggccccccgggcgccaccgccccgcagacctcgcttgcttcgactcggcctctttgctttttcccccacctctaacagccgccctggcctttcggttccttaaacttgccatgcgctttcccgcttcggggattttgcacaggctgtcccttctgcctgcaacatccttttacccattcggcttggctaactcccatttcatccttcgggtctcggcaccaacgtcacttcctctgcgaagccctccttccctgccctccatccagaaatccgcctgttaaatgcttttgtcggtccgtgttccttcatgtcacgtgtggtctaatttgttatccgactcttatctgtgtgctgttttatgatgtctatgaccgtgtgttccatgaaggtagggactaggtttgtctctgtcgccactgtgttctcagcacagcgccaa

SEQ ID NO: 37025 - DNA, 1322 bp, Artificial sequence
  DNA replication origin
cttcccgctccgccatccccgaggacacacctcgcccgcctccgggtagtagctccactcggccaggtcatgggcctccatcttcactgagcccagcatcccccgggcttacgcccccacccgcccccgctccggccccgggggaacggagcgctctggatctctcagcgggcacggcccgagctcccaccggcgcccgcccgtccgaccgcccggggtacggctgtcccgagcgccgcgggaggcggccacgctttatagccgggacacccccgccctcgcccgccccgggctcccctcccgcctccccgagggcggcgcgctcggactggggcgccccctgcgggatcgccaggagacagacctcaggcgccgggggccgcagccccaggacgcgacagctgggggtgattcaggagtgagggagctgcccgcagcgacgctgcagataccaagggccccgaggtcagaactctggagcctttctacctcagggggcttcatcatctcggcaggagaggacgaagagccagagccctgcatgaccgtggcggaagaaaggggaatcagaacgctagggccactatgcgactacaaggacccgtaaaaggtccccgaaatcacatccccattggacagacaggaagactgaggcttccgacggctagaaatgcttaacttggccgggcgcggtggctcacgcctgtaattccagcactgcaggaggccgaggcgggcggacgaatcacttgaggtcaggagtttgagaccagcctggccaacagggtgaaaccccatctctattaaaaatacaacaactagctaggcgtgatggtgcgtgcctgttatcccagctattcgggaggctgaggcaggagaatcgtttgaacctaggaagcggaggttgcagtgagccgagatcgcgccactgcagtccagcctgggagagagagcgggactccgtttccaaaaaaaaagaaagaaagaaaagaaaagaaaaagaaatgcttcagactgttgaaagggtcaagaacaaagatggaggggatcggggcctctccgcagaccccactagggcaacagaccacctcccctccaagacccaggagcttcgctgcccgaactccgcactctccaagaccagccagccgtccagggactcagcaccactgagaactccatttcccagaatgctctagctccctttccgcccggtgcctccgaagggactacatttcccagaaggcctagccggacccagagccggaaatgaagggtctgctcgccgtagtatggaggcgggcagaatgccgctcgcacgg

SEQ ID NO: 37026 - DNA, 2120 bp, Artificial sequence
  DNA replication origin
cctagcgttctgattcccctttcttccgccacggtcatgcagggctctggctcttcgtcctctcctgccgagatgatgaagccccctgaggtagaaaggctccagagttctgacctcggggcccttggtatctgcagcgtcgctgcgggcagctccctcactcctgaatcacccccagctgtcgcgtcctggggctgcggcccccggcgcctgaggtctgtctcctggcgatcccgcagggggcgccccagtccgagcgcgccgccctcggggaggcgggaggggagcccggggcgggcgagggcgggggtgtcccggctataaagcgtggccgcctcccgcggcgctcgggacagccgtaccccgggcggtcggacgggcgggcgccggtgggagctcgggccgtgcccgctgagagatccagagcgctccgttcccccggggccggagcgggggcgggtgggggcgtaagcccgggggatgctgggctcagtgaagatggaggcccatgacctggccgagtggagctactacccggaggcgggcgaggtgtgtcctcggggatggcggagcgggaagttgggggcaggtatcggggtgtgggctcacatggagcagggactggttgtgggttcaaatggaggcaaaggcgtctacttgggcagctgaggaactgggaacacggagaccaggtgtggaagtcggggaccggggacgaggcatggatgggagcgctgtttgggcagcctcgccgcggccagggcttaaaaatggaagtcaggaaaatttagccaagggtcgggtcacaccttaaacttgggagccgggtgttggagccccaaaaagcaagggatttatatgtacaaaccaaagataggaatcagagttccagggtaggggacagactagggggtttcaggatgtgaggttcaaagttggagggaaagaaagactaaaagatggaggaggagtcaccattaaggggaagactgaggtgggagctcagggccagcacacagtgttaaagaaccggggttcggggctaaggatcagctggtaatctaaggtagggtcagacatagggattggtgctcaggggtcagagatgggggtgctcagagatgaagcttcgtttttggagtctgaaataacaggtggcttagagttgggcatctgggagcagaagatgtagccatcagcattggcaggagaggggccgatctccacccccccatccctacccatgaccctccgcagggactccccaagtcggaagatggagagttttagattgtgcaccttcccctgctccccgccagtccagcaacctccagctattgctaaaattcccatccagtctcacctcagacaaggcttccctggagtggggggtggcggcatattctaatcccctcacctggacagacagaaagtccttcctcaagtctgacccccattcgtcttgctgcaacgacccctacaccttagctacctcactctgtaatcaacgttgtgaggttgttggggctgggggttgggttcttggtctgagaattatgggggtctggacacttggacttctaacctggaaggggactgtgggcttgaggtggggtgtggggcaggaatggctaggttctccaaggagtcaagatctggtgactgcgggggccccagtgtgcctgagtcttgggtctggggctcgaaactgtagggtgggactcctggatccccaggccttcagggctgggcaaggtgcctgggaagggccagtcctgggtttggggaggtgtgaggtgcacgtggggtggggcagggccaacagggaaagggactgggagtgttgagaggtggaggcagggtggctggaggtatcagttgtgagatgcggaaggcagagacccaggtgggaaatggagggttccaggtagtgggggtgatcccagctggacctctgcagaactcagtctggggacctgatttaagggaaccacctacagaccaattgtacaaaccaactacagttgttttgggggcacatcttaagtaaatgatgggggtctaggcaggaggagttgatatttggggcacagtctgaatagatccaagtttaggggaca

SEQ ID NO: 37027 - DNA, 733 bp, Artificial sequence
  DNA replication origin
gttttagaggtggttaactctgaagccccgcacgcagaacactggggtcctgggttgggtctgggactagaaacttggcttctggcttcacactgccttcctctgctccctgtcacacccttctccagagacaataaggaaatgaaagaggagaaattccagtctcctggtgtgggggtgcgggtcccccaagggcttccccccaatctcagccccaccctgtcaggggagatccggctcagacccggacaccaggggttcatcccagccccggggcgtgggaaagcctagggtggattagggcagctggagtgcttgaggtcggacctcaaggaggacttccgggtgggtggggagccagaaaggagggccctggggtccctgtctgtcttactctgcaataccagagagcctgactgggttgcagaaatggggggtggaggtatagggggatttggaaactctgtggacccctctaatccatcaccttctcacctcatcccttttctttttctggggaggggacccgaagccaccaaccagcgggagagcctgcatgggggaagggagtaactgtggctgcaatttcactgtaagacttggggtgagggggaatggatttgttgaagggagggagatagatagatagatagatagatagatagatagatagatagatgcatggatggatggatagatagattgataggaagatggtggctcgtcatggtag

SEQ ID NO: 37028 - DNA, 878 bp, Artificial sequence
  DNA replication origin
ggagtaactgtggctgcaatttcactgtaagacttggggtgagggggaatggatttgttgaagggagggagatagatagatagatagatagatagatagatagatagatagatgcatggatggatggatagatagattgataggaagatggtggctcgtcatggtagctcatgactgtaatcccagcactttgggaggccgaagagggtggatcacttgaggtcaggagttcaagaccaggctggccaacatggtgaaaccccatctctactaaaaatacaaaacttagctgggcatggtggtgcatgcctataatcccagttacttgggaggctgagacaggagaattgcttgaacccaggaggcggaggttgcagtgagccgagatggagccactgcactccagcctgggtgacagagtgagactctatctcaaaaaaaaaaaaaaaaaaagacaagaagatgggctgaaggaggaagaaaggtgggagttggggttgggaggggagtggggtagagtcggatagtgagagagagtgcccaggaagggagaaagagatggaaggatggagagagagacaggggccgagatggaggggaaagaaagatgggagaggactcgggaggggtcgagggtgggcaggaagagcaaaagaggttagggtggagacagaagggaaaacaatgcgggggtggggagggagatgggagaggggaatatgggtactagtactgagacgggtaacacaacggcaaaaatagccaacagagattcaaagagacatgatgaaagagttccttggagagacatgaaaaggaaagagcagaggatttctcgactggaactcagacttagggttgagttggttgcctccact

SEQ ID NO: 37029 - DNA, 1483 bp, Artificial sequence
  DNA replication origin
gccagcagagctggtggccaccagacaccccgacggatggccccaccctcccccgaggaccctacaacaacaccccgcccctccggccacctgaggtccccactggggcggcctgaggcccgagcctggggacaggaagccccaggcctggccgccctgaaagcctctttcagcctgggcctcctcccgccaccaccgactcctcccgcggaataatatttgggctgttggccggggggcgggggccagatccggaggccgcctgggagaagccagaaaccgcagggcttcctgcctcgggctggccgactccgggagagacccccaggcccgagggaggggggcgggtgcctggggagactgagggcctttctctcggccccagttgttttttccaggaaccgggaggaattccccggcctgcccaggacagcaaggctggtgggacggacggggagccagcgcggcagggggcgggggtgacacgcagccggcaaggcggggcgcagcgacaggaatagagggcctggcctgcgaggtggcaggtagaggcggaaacccagagagctgggagagggatggaggccagagaaagagagaccagagatccaggaaaggagtggggggagacggaccccaggaaagagtcactctgagagaaggagggagaaacccagagacccaggtggagggaggagggaagtcagagcagtagagagaaaaggcgggggccgggtgagcgaggggggagagagagagagagcatgaggtgagccataggagagacagacacacacagacagcaccagcaactcaaaccaagaaacacagataaaggcacagaaagagggtgagggacagattgatacagaaagaaatgacactggtcaggcgcagtggctcatgtctataatctcagcactttgggaggctgaggcgggaggattgcttgaggccaggagttcaagaatagcatgggcaacacagggagaccccttctctataaaacattaaaaaattagccaggcgtgggggtgcatacctgtagtcctagctactcgagaggctgaggagggaggatagcttgagcccaggaggtcgacgctgcagtgagctgtgattgcgccactgcactccagcatgggtgatagagcaagaccctgtcaaaaaaaaaaaaaaaaagaaaagaaaagaaaagagggaagaaggaaggaagggagggagggaaagaaaaagaggaaaaaaggacactaagagacaaggaaaaagatggacccacagaaactgaaagacacgtcacactggtgtgcatgcatgcacgtgtgcgctcatacacacacacacacacacacacacacacacacacacgtggattagacaaagtctttggtcttcaaatgactgaatggctggctggctgactgaataaatgaatgagcaaccagagagccagcaaccaggaaaggcagatgacaggtaagga

SEQ ID NO: 37030 - DNA, 1386 bp, Artificial sequence
  DNA replication origin
caaccttcgcatctggaggaccctctgttcttggactgaggggtcccatccttccccaccccccagccgtcagctctcaggtgttctgccacccctggcactgccagcctgggctcagggcagggctgggaaaaccacccctgattaaatacaccaggtgataagcctggggcaagagagacctggatggagctcctgtgcctgggctcccctcccaggcaagcctgtggcttcccctgacccagctctgcagacccaagtgccgggtatctcccccacccccaaatctttacagctggaggcctccagacacctggctcctatgtcccagcgggagctaaattgctgtggaggacacctggtcctttaagaacagctggtaggtgggtggggggcaggggagtcacccccagcctggctggtgtgtattctagatagaggttgagttaaccattaacagagcagaaggcctgacctgtgtgggtgtgggggctggatcagccccccttcccccagtgccagggtggggccagggtggaggggttctggatttatttgggaatcaggaagcaggtagagagacttggagataggggaaacgcagagagacactcagggaatgatgggagacaacagaggtggggagggagagatgcagagaccagctcactgaacgagacaaggagacgcagaagccggagacccagtgagacagggagagactccagagagcctcagagatgaggcagacacagagaaggagagacagaaaagaaaaggaaatggacaatattctgatgggttgagcgagactgagatgtacggatgagctgccaacaacagagatgcaaaagaggggagactgagatgcagagagaaggcaataaagagatgaaaaaaaaaggagagatgagaaagactgaaatcaggaaaaggcacaggtgtgaactagagtgatgacatcatcaaactcgaaagttctgtgagacaggcagggaactggaggaagtgcaaggttggatctgtttgggtcatttagtccccagtcaaggcacctcctccaagaagcctgacccccaggctgcatcagctgccatttctgcaccccacatatccctctgtgctcccccaatcccagccctgtccattctggagtgttgctgtctggcaagcagactgtgagccccaaaagggcaaggccagggctgtcttgatcaccactgcgtccccagcatcacccagcacagggtcagcttaagggatggatagattaatggactgcttctcttcctcaacaagtgtttattcagcatccaccatgtgacaagcactgggggagataatgtggatggagcaggaaacagaatccagcccctgctctcatgg

SEQ ID NO: 37031 - DNA, 1157 bp, Artificial sequence
  DNA replication origin
tagtttaccccgtggaggtaaatttcctctttcctcgggcagtccctctagcagtctaccctaaattctcccttctacccggcaagaacccactgcccatgtcttctaggaagcctcccgctgcctctttcccctccccacgtaggcgctgagtcctccaccttccaggtagagataggggatgggtcagctacagaagggtaatctactcccaagcctgtctgtggctcccctgcaggagccatcccctctctgagcctcagtacttttatctggaaaacgggccgatggctgaaacgtgaccagtgggtcgcacttgttgaaggtcggccggcgggaccgcctgggtgcagggcgccacctggaggctaccgcgcaacgtcctcgccctcgcaggaccagttcagtcccaaagggggcgcagcatctcacacaactaagggaccaagaaggaaaaaaaaaacccatctttcggtttattgaaggagcagaagggagcggggggtgggggggtgggaattaaatgcttttgcctcgtttataaagagcgagttttcaggaggtcccttctcaaggaggaggggggcacctctcccccaactacaagcagcagcaaagccaagccaaggaggacagagggaaactggaggggccaagggaccccaaacaccccctcggacaggagccacaagctttctccccccacccacaatgcatctaccccaggggacccatctgggtggaagaagggagtatgtacacagatagaggtggcactgggctgggtcggggagggaataatttatccgcggcagcggtgggtggcaaaggggcagagggcagtagcctggaggcagtggtagcctaggggtcccgttctttcttaactttgatgtctccagcaaggatggtggcgatctcgccctgcatgaaggcccagggcacggaggagccgaccagcgggcacttgtctccgctcgggcagtacacctccccggccgggccctgcgccttgatgaactcccgggagcagggaaagcagaacttgtgtccgggcaccgaggggcactggacgaagtgggtgtcttctagccgctccctgcacagggtacagcacaggggggccccaggggtcgccccagtgccgctgccacccc

SEQ ID NO: 37032 - DNA, 1136 bp, Artificial sequence
  DNA replication origin
tagccgctccctgcacagggtacagcacaggggggccccaggggtcgccccagtgccgctgccacccccgctgacagcttcggcccccgctgtgggactgacttctgcttcgccgttgcgggccacaaggcgatgctgggttggcggctgggccgtggaggaggctgcagggctggcgccccctgcacgcacaggccccccgcctccgccagggtccttgggtgagtggcccagggcttcggccacattcttcagggcggcaatgggcgagggcacaccaggggtctcagcggagtacgggccgccgggtgccacccagtgccgttgctgctgctcctcggtggtcatcttcccagccgcctcgccctccggctcgggggatgccttgcgacggcgcggcgtgggcgccaggttccgggatggggctcgcgggggtgggccacagagagccgcaggggccggctctgggtactgctggggcagggcctccgcgggagctggctcgcggaagctgcggacgccgtcggtaagcagctcgcccagctgccgccattctcctgatccatgccggcgttcatattcgaggtacttgaagcccgaagaagccagtgccttgcccggctcccgcagagcatcgtggaacatctggcgagccactgccaggacgccggcgtacacattgccggaaccacaggggtattcggtgaagagcttcagctcgaactcgtatcctggaggacgggcagtagcatcgaaggcgaacactcgccccaccagcccgtgatccttcttgaagcgcacattgaacggggcgcaggcggacagcgccagtagctgttcccgcactgctttggggcgcccgtgccattcctctgcccggcctcgcatggcctcgttcagttctgccagacagtccgcattcctctgctgcttctctttctcgaaatcggagccgaagaggggacgggcaggactcaagccgggtgccagcgtcaggcctcggcttcccaggccagacactgcagctgccagcagcccagggggcatcaagccaggcatggagccaagcaaggcccttcgcgccccctcagccacggcctcctcacggcccagcccattggccaggcgggacccca

SEQ ID NO: 37033 - DNA, 1686 bp, Artificial sequence
  DNA replication origin
tcttgggcaggtcgcacaggtagcaccactggcggcgggacgcctgcacagacgccatggccccagtccgcgcgccgcccagctcccgcgttccaccggccgccgacgtgcgatccgcgccgccaacgttcgatccgcgtcccggggacagcgcgagccacggtccggcctccggctcggcctccccgccggatccaggcccggccccccttccccgccccctgggccctaagcctttctgctcactcccgcctccctcgcgaaggcaggctgaggcacgtcggcgcccccgcccggtccgggctccgagccgaggcgcacagctcgggccccacgatgggccgcgagcgccgccgcctcgggctcccgccgctctcgccgccgccgctgcaacggccgccgccgcctccacctccttcttctgccccagaggccgcttcgcagggaaagttacataacacgcctgcaaagccttctgggaaacgtagtcccgccggggccggctcttaaagggaacggcgggcagacgcgggctgggggggttgtcgcctctgccggcgcaaaccttacaaccttctccgtggggccggagttcagcgcgccgcaagatgctgggacacaaaggtggtaggcgaggatgcaatacaaatgatcagagctactccggattcagaaattgtgggggtgggtggacaggcttccgggcttccaacttctgctcggatttgctgtgcagctttaggcaaaatgtcttgccctctctgaacctcagtttccccgcccagcaaaggtgggccaatgacggattaggaaagtagcagcttctggggcggggcggagaagccctgattggcttcagagcagggacgggaagctggcaactaggtgggggtgggggtggccacctggcacttcgtcctccccccggaatcctagatatatgcttctggggcccgccacagccagagaagggagaggactaagggcttccgagccagagccttgtctcagttgtttctctgctaaaagagtggggcgactggccgccctctaaccctgtcccagctctgcccgcgcgctctggtctctaaagggttacaccatcgggggctcggcgtcccccacccgcttcactacaattcccaaaatgcactgcgggtcggacatagtgacgcacttccgccctctgggaggtttggggaggccttccagattcacgctactttcccggctaccccccgcccccccacttttctgggggctctttacgtgcattcggagcgtggcgtttgggggacccttatcttctgttgctccccagtttgagggaagagtaaggggttaagaagtgacgggcaagaggagggagttgctggggaagggcaaacaccagaccaacctttccccaaccttgagcgctcactacctggaaggcccaatcaggctgtgaggacccttcttctttcccaggcattgggaactggacgaggctgtctttggggaagggcggaggcgggtctccaggttccaacccacaacagcccctttctctaggcctgggtccgtgttaggtgctcaaaaatatttgaatgacgtaccagttggccctggttttgtctagtgaggggctgcttgtcccttctcctcccgtcccactggaaccgcagcagctctgattctgttacc

SEQ ID NO: 37034 - DNA, 1073 bp, Artificial sequence
  DNA replication origin
ctgcgtggagtgcggcacgcgagcgagcttctccttggtgcggcgcttgaagtcgttccagcgcttctgcacctcctggcccgtgcgcttccagctggtgataccgttgatcttggcggcgatgccgtcccacacgcgccgccgctctgccacgctcacccgacggctctgcgcgccgtagagctgcgggtagtgggcgcgcacctcgcggatcaggatctggttctcttcgaatgagaagcgcggcttgcgcaaccgggtggtttcctccgcttcgcccgccgccgccgaggccatggcgccccccgacgccgccgtcctgccgtctggcgcatggggggcgccggcgctgcgggcaaagggcgcacggggctggctggggttcggggtccccccgccgccgcctctcccagaccgccgggccgagagctccttagtccccgggggcaggagtgggggcggggggcgggcgggggcgacgggcacccgggtaagtcggaagcgcctaagagtagctgacaccggctgagcgcttggctcggacttcgcgcggcgcgaagtgccacgctgaagagttgatagaaattgggggagggtctggagggatggaaggaaaggaggaaaagtgcgaggagaggaggtgtctgcaggagttagagaatgggggcacgggaggataggaaatggagggaggatgggggtgcctcgggggggtcttagatgcatgaagataaggagatgcggaaggggggatgcagcaagaaggggggaatctggagcagaggaggcgctctaggggctctagggggcaacggggcgtctgtaagaccgatatgagaagggcccttagagggatgtccaggaataatggtgaggtgggagctcctgtatcactggaagagctggaacgatcaaatattagggatcagggtctgcgaggattgtgggggctctggggattgccagaaattaaggggagctctggaaataacgggggtcccgtatcacaaggagacaacggaggctacgggggacggcagggagagcgaaggtcgcggagggtggggaccgag

SEQ ID NO: 37035 - DNA, 1380 bp, Artificial sequence
  DNA replication origin
aagacctggttagacagacactcagagaaatacggaagataacaggcagagaggagtgagaggcaagggcaggtgggccagaaacagggacacggagacctcaccagaatgctggcgtgaaggtgttggttgagaggcctcattttaaatatttatttatttatttatttagggacggactctcggtctgtcgcccaggctggagtgtagtggcgcaatctcccctcactgcaacctccacctccgggttcagcaattctcctgcctcagcctcccgagtagctgggattacaagcatctgccatctcgcctggctaatttttgtattattagtagagacggggtttcaccatgttggccaggctggtctcgaactcctgacctcaggtgatccgcccacctcggcctcccaaagtgccgggattacaggtgtgagccaccgcgcccggccggagaggcctctttagagaacagacttctctgaaggcatggcagttgaaggcaggagaatggaggggactttggagaaatctctgacttgctagactctctgattttggtggcagcgagcatttgcctggcagaacgtctctttgtcccagcacctattcccagcccaaagcttcatcagctctgactgcggagggggtagtgcccctgaaagtgtttcccattctccatcacttgcccctgaggccttgtcccccaaaaccagcccccacttgacagcttggtaggagtgagaacagtgactcaactggttttaatgtgtgaggcagattccaggagtagtgactgactgaggaactaagaggagttgggggtggcgggagggacagaaggactgcaaaacagggacaccaacgaaaaaagagagggaaacgtagggacagaaagcagggagcgtgtgaggcagggaaagtggagactgagaaactaggggcagagagagggagggatccaggggctgagagaggggacagaggggagacagaggtggggggcagagggacagagaggaggggcagaggagggggacagaaagacagagagggggaggatgaacagagagaaggagacagaaggacagagagagggagacagagggacaggggggacagagggacaggatggggagcagagggacagagggagggaggatggaggaacatagagaggggacagagagatggggggcacagagggacagagaagggtgacagaagggcagagaggaaagggatacaggagttacgggcagtaagctgggcatgccccagttgggattccagatggtggacgcctcggctcctttaaccagttctcctggctttttttgttgcccctcagatttctttttgttttcctccacctaaggtt

SEQ ID NO: 37036 - DNA, 821 bp, Artificial sequence
  DNA replication origin
gtatcgaactcctgagctcaggtgatctgcccgcctcggcctcccaaagtgctgggattacaggcgtgagccactgcgcccggcctctggaagctaaacttgagcacctgcttctcttcaatcacagttactccggatgctcaccccgtccagagagaacagtcctccctccccagctcccccatctgggaccatcctcaggggtccccccaccctcttcccctaaatgcccagagccctgggggaaagggggaaagaatttaggatgagggtggaggtgcagggaggagggagagggaaggggatgggttaagaaggagtgtgtgatgtcaagcaaaaaagacaacattagacacagatgctgagatggcgtttatcgcggcaaaaaaaggtgaagtcgccgaggggaaaggggtggggaaagggggtgtggtgggggctggggtgggggccatggaagctaatacatggtgcactaggtcacacaacggacactgggggtgggtgagtgggtggggtgggcgtggcccaggcatggcaatgtggggagtgggaggagacggcagtgcaccccagccaggagcttctggaggtggtgggcaggaggcgggcggcgtctctggtcgcagaggatggaaggaatcagttagagggggttgaatggaggcactggaggcatggccacattccaagaaatggaatgaaggagtgggacagcaggcagggggccagcctggggcctgggccttttaatctaaggactggggagaaccaagggaccttagaggtcctccagtcctccccatattccaagagggaga

SEQ ID NO: 37037 - DNA, 1062 bp, Artificial sequence
  DNA replication origin
accccaccggctctccgtacgccagccccgcggatgtgctgccagccgcggccgcagcgtcggccgccgccgcctccggcctgctgggccccgccgggctggctggcgtgggggcctttcccgccgcgctgcccgccttctcaggcaccgacctgctggccatcagcacggcgcttaacacgctggcaagttacggctacaacaccaactccctgggcctgggcctcaactcggccgcagcttccggcgtcctggccgccgtggccgccggggccaacccagcagccgccgccgccgccaacctcctggcatcctacgcgggcgaggccggggccgggccagccggaggggccgccccgccgccgcccccgcctcccggagccctggggtcctttgcgttggccgcagccgccaacggctacctcggggccggggcgggcggcggggcgggcggagggggcggcccgctggtggccgctgcagccgcggccggggcggccgggggcttcctgacggcggagaagctggcggctgagagtgccaaggagctggtggagattgcggtgcctgagaacctggtgggagccatcctggggaaggggggcaagacgttggtggagtaccaggagctgacgggcgctcgcatccagatctccaagaagggcgagttcctgccaggcacgcggaaccggcgggtcaccatcacgggcagccccgcggccacgcaagccgctcaatacctcatcagtcagcgggtcacctacgagcagggagtgagggcctcaaacccccagaaagtgggatgaggcctgtggtgtgtgctcccacccttttctctcctcccatctcctcctcttccctctcctcctcccccccaactcctgacctcagcttggtgtagtcctgctcctcttgggatggggctggggtaggcccgactgcaccctccccttctggtagtcataggcaggattgagtgacggttgggaagggggctcagaagccccctccccagcccggaactgacccctccttcctccctccctgtgcttggctgggcct

SEQ ID NO: 37038 - DNA, 821 bp, Artificial sequence
  DNA replication origin
ctccgccgtcaggaagcccccggccgccccggccgcggctgcagcggccaccagcgggccgccccctccgcccgccccgccgcccgccccggccccgaggtagccgttggcggctgcggccaacgcaaaggaccccagggctccgggaggcgggggcggcggcggggcggcccctccggctggcccggccccggcctcgcccgcgtaggatgccaggaggttggcggcggcggcggctgctgggttggccccggcggccacggcggccaggacgccggaagctgcggccgagttgaggcccaggcccagggagttggtgttgtagccgtaacttgccagcgtgttaagcgccgtgctgatggccagcaggtcggtgcctgagaaggcgggcagcgcggcgggaaaggcccccacgccagccagcccggcggggcccagcaggccggaggcggcggcggccgacgctgcggccgcggctggcagcacatccgcggggctggcgtacggagagccggtggggttggagttggccacggggcctgccacgttggcgtagctgatgttgaggcagctgctgctctgggggtcttcttgtaccttctgcacgatggcgctcacggccttgtgcacctgctcgggctcgccgctgaccgtcaccacgcgctcctgcaggttgatgccctccggcttctgggacagctgcacccatgctcctgactgttccatcacggctttcaccgtggcgcctcccttgccgatgatcaggcccgccgtgctgttggggacgatcagcttggcctgcgtggggagcaaaagggagg

SEQ ID NO: 37039 - DNA, 1645 bp, Artificial sequence
  DNA replication origin
agcgggcatgggctggcaggccatgatgggcagctgggagaatgagtgccatcctgttttataatctgcacttcatctccctcccctaaaacaacctctagggatggaagaatgatgcttaaatgttttgcgatgcccacagcagccctgggcaggggagacagggctcagctgcctcttctcagttcttgcggttccctggttgctttggcaaccattcactcactccgcccccctccccttctggaagcagagagctcaggcctgcaacggttgccacagtaactggaacccccttatcggtctggctggccgggtcctcagcccacccccagggggacgagggacgaggccctgttgtcatggcaacccctgaaagcctgcagcgttggcctctgggctttttggagaggatgggggaagagctgggggatgggggaggcagaggagaggcctgagtgcctgtctgaacccaccagatggagggctgaggggtgggggagggcaggggtgtggacaggggagagcagggtgggtcaaagactgctcatggaggagtgaggaccaaggaactggggagggagggtctttcctggagattctccagatactggctgtggctctgtcctgggcatccttctcatttctgcatgagagtgttagggagtgggggcacgggggagagagaaactggggggtattgggatatgtgtgtgaaagagattctgggtgacactgtgaccagtgtgtgtgtctgcgaggctggtgagtggtgtgtgtgtgtgtgtgtgtgtgtgtgtgtgtgtgtgtacttgagcaggactagctagatgatcctaatctgtgtttgtagaagataaagtgcagagactgccttatgaacagactatgtgacacagtgattccggtgaagatgttcgtgcgtgcccttgtgtgtgggacagactttggtgtcgctttgatgatgaaggttatgtagactctttgtgagacagagctgagtgtatgtgagagtttgagagaaagaaacaaaagaatctcacaaagtgggatagaggctacacaatgaatatataccactttgagactggatggcagtgtatgtgtctgcatttgtgtgtgtacgtgtgtttgtgaaagtgaaagagagacacacttctggatgtttctgagactatttggatgaccagtgtgaatatacacatatgtacaggagacaggaaagaccctatgaccagtgtgtgtgaacctgagaaggagagacagacaggtagactcaggtgtcagtttgtaggactttttggatgactggtgtgtttgtgtatgtgtgtgtctgaacatgtgaattacagcgagacaaagaaaacttgactggtcagtgtgagaatgtgcgtgcctgggtgagccgggatgtgtgtgatgcgtggagtgtgagtgtgtctctctctctttgaaggggattctgcccctgagaatgtaaaaggtcttgagtgtggccgggtgcggtggctcacgcttgaaaccccagcactttgggaggccgaggtgggcagatcatgaggtcaagagatcgagaccatcctgggcaacatggtgaaaccctgtttctactaaaaatacaagaattagctgggcgtggtggcac

SEQ ID NO: 37040 - DNA, 1875 bp, Artificial sequence
  DNA replication origin
ttacctcgctcatccttccctactgctctggtcgtctcttccaggaagctcttcctgacctccctgggctgggtcctttgtgccacttgggctccaactaccaacctctggacttcctgtcccagccctgaccactctgggtcatcactggtgtgacgtctgcttccctgactgggatgtgagaaccaaggaagcaaggctgggacatttcagccactgctattgtccccatttctgtctggcaccgggctggcatagaggaagtgctcagagaatgtgtgttgaatgaatgagtgaatgaatgaatgacagggtgtcacgccaggagtggagggaagtgttttttgtctcctgcagtagcttttccattttcctacattcctgtgggatgtaggactaggatgtagggggctgtgtcctgcttctctgagtcagcagccggctcatgctgtatgatctggaagttgcacgccaggagtggggatgggggctgaccacatgtccaggggctgaggagagacgctggctcctgttgcttgtctgaatactgtttgacctggtaggaccaatgtctgtcccgccttctgggtttcccagctgcctggcctgtggggtgtgtcaatgggctgggaggggacgacatgtctcgtggcacagaatgtgatccaggagcaaggaaccaagtgtcctcggaggaacattccgaacagaggtcttatccatatcttgtgggctacaggggagtggggaaaactgggccagggtggaagagaaaaggaggaggtgtgcctggttcactcgatttttctctaaacctcttgccaaagctgcttagtgagatgggaggctgggggcggggtggatggtggagagagagagagagagaagaggagagaagatagagcagagagagaatgagagagaaagagggaggagagagggaaagataggagagaggagagacggggtggggagagagagagagacagagagggagagagagagagagagagagaaagagagagagagaaaatgagtgcgtactgaccctgggctccagctctggtgtttgacctaaaaaatccaaggggattaaggatgaactagaaccagcactggaccaaagatgcaattcaggaggccttccctggagtcctagatgtcgatgcttgtcgggcattggtcttgggagggagatagggagaggtgagagactttggagggaatagagagagtggaggggccttggaaaatgtatggttgggggagaaggatggagcagggggagaggcagaaaagggactgggtttggaggaagggaagaaaaaaccaggagggagctgagacttaggaaaaaagagacacaggaagggagaggcagaaagaaatgtgtgacgcccgcagaggaggacctcagtgagagggggctagtagatactggttgaatggatgattgaacagagttcagagagagagaggaggaaaggaaaaacgtgagactatgagaggtggagggaaggaaaggatggggagagagacaggaagacaaaaggagaaggaaagatgaggggagggacagggaaagcagaggacagatgaagaggacaagagatggggggtatccaaacagaaccagagagatggacagagaggcagacagaggggcaagagacagagggaggcagaggggagcaagagacgagaagtcagaaacagaatgagagggagacacataaagaatgacaccgagacagagaaaaccagtgagactgggcaagagggggtgacagaattccaaaggggggagcaagtgtgtggaacatggctggctggcccccaagcccggagggacgccctgacacctgcctccctccc

SEQ ID NO: 37041 - DNA, 1779 bp, Artificial sequence
  DNA replication origin
acggcctccgcggccccgcagccgccgccgcccccgccgccgccgccgccgcaaccccagcctccccagcagccgtcgccgccgccacagcagccgccgccgccgccgccgcagccgccgcagcagcagcagccgccgccccaggccccccccatggagcccgaggccccggattcccgcaagaggcccctcgaaacgccccccgaggtggtctgcaccaagcgcagcaacacgggaggtgagaaagggctgcggctcggggcgggggagcgggcagggggcctcgcctttctccatcctttccccccctcccgtggcaggtgcaagggctctggggaggggagagacacccctccccgaggcgggggacagagcggggagttgaggagggggctggaccccctcctcctctcgctgaggcccggggctgggagctttgtctgcgaggagaggggtgggggggagggggtgataagtgtccttggggggcgcagaagatggggggcgtgggagcctcagggcaggtgtctgtgtgtccttgaggggtgtgtgatgtgaccctttcggagcaggggtgttccccgagctcgcgtgtcctggctgggggaggggaaggagtagaggcctgtggaccgggagcttcccagcctccctccctggggatgtcctgaacaagggttgtcccagatggaggcttgtgtggccctggccggatcgtgcgtggggacaggctgggtaggtgtgtggggtgaaatggaggaaatggtgggtgtgtaaagctaggtgggagaatgtgaggctaggacaggtgtgtatgtgtgtgcgtgtgtgtgtatgtgtgccctctacagcctggatgtgtgacattagggatcaggaatatgacagcataggggggtgtatgagaaagacaggggacaggggctgggctccatgtttgagaccctccagcgggtacgtgtgacaaggaaaggtgtgtgcttgtcacccccaagggggctgtggcagagtgtgacacatgagagggtgtgtgtgacatgcaaggaggtgtgtgggggacaccgaatgggctggctctgggtgtcagccagaagaggccgtgtagatcagaggaaaggggtccagtgtgtgtgacacaggcgtggctggtgaggggatgtgacaagaaaagggtgtgggtgtgactccagagaggctgtggctgggtgtgacacatggaggtgtgcaacagtgacatcagagggggtgtgtgcaacagggaaggtgggtgtatgacgagggagaggctggggcttgtgggtgaaacgcacgagggtgtgtaaaaaggagaaggaaggatgggtccccatgtgacagggcacgtgtgcatatgacacccagctgtgtgtatgggtgtaacaaggagaggtgtgtgtgtgaaatggctgagtgtgtgacaccagagatatggggatgattctgcatgtgtttgacaagggaggctgtgtgtgtgtccgtgtgtattggagattgccgaatgtttgacaccacggaaggcagtgtgagggaagagaggggctctccctgggtgtgtgacccaaggaggtgtgtgtaccagagaagaaaagccgagctgggaactctaggtgcatgccctgccgtggggggctcagggaagaggtggggttttttggggtcctcagagccctgtcctctagctccctggtaggagggagaccccgcagcggacaagcccctccccgcggtcaccttgccaaaatctccacttcctctggcctt

SEQ ID NO: 37042 - DNA, 903 bp, Artificial sequence
  DNA replication origin
cggcggctgcggggccgcggaggccgtgaagaggccgtgcaccgcgccggcggccatcatcctcatggtgggggggggcggggggcggggggcgggggagggggaggggaggggaggtgggagggggagggggcggtggagggatgggggagggggagccccggagagggaaggcgggggtaggggggagccggttctcggggggctgacagagcctggagagcggccgtgagcaggatggcagggccgaggggggtctccgatagggccgggaaagaactgagaggtggggtctctcctgggaccacagaggctggggactggacgcgccactggggggacgggactccccgcttcttcttggctccctggggcaagagggccgagccccccagaccctgctcggggtggggggccggaggagcgtggccggagtgggaggcggaggcggccgctagtgggggcccggggggcggcgggcgcgggcggcggcggcgacggggctggcggtggctgctggcccgagcatcttcttcccggaggctcccacagcgcctggcccctcccacccaacgaggtcacgcccatgccgggtagggccacgcccttcggcgcccccattggtccagccttgaagcctggaccacgtccctctgggttggccacgcccctcccggcggcagagagctggacccgactcccccaggctgctgggaggaccccgggctcctccaagccgtccccactcctcaccttgaatgaacgtttattgagcacttactgtgtgccaggtccggttccaagcaagcacgtcacagacgttatcgcatttactccccagagcgaccagctctgtgagttacgcttattatccctattttacagatgaggaaacagccttag

SEQ ID NO: 37043 - DNA, 884 bp, Artificial sequence
  DNA replication origin
ccaggatttggtgcttggaaagctgacgttgggttgctatggtgatgggtttggggcggttgccatggcagcagaactagcccgggtttaaaaatatctagcaggaggtttgtgtttgtgtgtgagtgtgagtgcgtgaccgaccgtgctgttgtgtgtgtccaaacgggagggctcgatggggggagcgcagggttggggctgcaggcatgcctcgggggtgggggctgagcggcacacagctttccatgtgtgttgtgcgtgtcactgagtggcccgtgaagtccagttattgtgtgcgttagcctatgtgggccgtgtatctaaatgtgtgtgttgtgtgtgtttacccaatttgtgtgcaaggaaagacttagtctgttcgtcagtctatacatcacatgtcgctgatatgtcttatgtaacataggccatggatgtcctgtggctttgatcatggatttgtaacttttccgagtgtgtggggccaagtgtggagctgtcgtggctctgaatgtgtgtacctgggacatacctgcatattagatgtgtgtctgtctatttgtgtatgagagcctgtgttgtggccttgcgtctgcatgactgaatgtgcattacagatgagtgtgtatgtgtgtgtacgtgtgcctatcccctataagtgtgtctgtgtgactgtgttgagaccgtgcacctgcagcagggccagtgtgactctgtgtgtgtcacacagagggggaaacttcacagctaatttcatggatgttgggatatgtacctgtgtggtgtgaggctatttgactcaaagggtctaaggtgtggtactcagcctgacccccgtatctccctatatccgtcttgcctcttccccatctccatggcaa

SEQ ID NO: 37044 - DNA, 858 bp, Artificial sequence
  DNA replication origin
actaaaaataccaaaaaattaaaaaataaaaaataaaataaaaataaagggggtattaacagcagcagcaacattttccaaattaaagaatgagagactcagaaagggtaagggcatgcccaagtcacacagcatgtaaatggcagggccagaactcaaacccaggcttctgtaagctgaccttcactccaacgagcccctccatatagctctgccaggttggaaggaaaaggcaggttcggggatcccctgccccagcttggtgggggtctctgatgtccctgactctggcccctgcccagactagggtgactgctcccctgaaagctctggggtgggggcacaagggtggcatggatgatggcaaagggtgcagcagccccctccgccagcctctgattggggccctgcagtcccccaggatttggtgcttggaaagctgacgttgggttgctatggtgatgggtttggggcggttgccatggcagcagaactagcccgggtttaaaaatatctagcaggaggtttgtgtttgtgtgtgagtgtgagtgcgtgaccgaccgtgctgttgtgtgtgtccaaacgggagggctcgatggggggagcgcagggttggggctgcaggcatgcctcgggggtgggggctgagcggcacacagctttccatgtgtgttgtgcgtgtcactgagtggcccgtgaagtccagttattgtgtgcgttagcctatgtgggccgtgtatctaaatgtgtgtgttgtgtgtgtttacccaatttgtgtgcaaggaaagacttagtctgttcgtcagtctatacatcacatgtcgctgatatgtcttatgtaacataggccatggatgt

SEQ ID NO: 37045 - DNA, 3921 bp, Artificial sequence
  DNA replication origin
acctcaagtgatctgcccacctcagcctcccaaagtgctgagattacaggcgtgagtcactgtgcccggtcctcacatcaattactgttggtttatatccactgggcttcttggacctccccactagagtgtttgactccatgtgaatatggaacccagcacctagaagagcacatggtgtttaaaaagtgttgcttctcctatactgtcctcaccaccctttggggtctccctgtggtatggggcagggttgctgaactaggagggtcatgtgtggggtggtagggtcggaggtgggggaataaactgggcagattgtggcgcccaagggcagaaggaacctttagtgtctgaaggaacttggaggaaatgcagatttctgggcccacccccagagtttctgcttgtgtatagttgggacccgacctaggaagctgcattttcataagcacttgtggtaaggattatgttccttggccatcactgtgagaaacactgttaggctggttcagagtttgctggggccactgtggtgattgagacagctcctgacccagcctgggagtcagggagggcttcctgcaggagaggggattggagctgagacctggaggatgacagggaatgagccgaggggagaaaaccttggctgtatccccagtgtctagaaccccattccctggcatctcccgttaaattcacaagcagtccctgaagatacaagattgattaaaatggctctgccctcacgggctcctggtctgtcaaataatcaacagatcacacagatggtaacagggagtgccagccactgtttgaagcaccttatatacactaaataatttagttcaacaacaaccctataaggtaggagctcttattatcccgctttactgatgggggaaggcccagagagggcaagtactttgcccaaggacacaccaaggagaaaggcagctggaatctgaacccagaagtacccagcctgcagcatgtgccatgcttaaggtgtgaggccgcatttgggttagttctgggaggaaacaggaggtggtcagggaaggtcagctgggtaaggggaaggaagacgaatgtttctgtctttcatggtgggatcctagacaagcctcagtttcatcctctgtataatggggatggttataatacccaccagagagcagaatttagggtgagtcattcattgggttaataagtgtgcatggtccttatctaaggcaaaagtttgcctttgagagacagtgggagagggagttgatgccccagggggaactggggtgccgcagtgtgcaccgtagagatttcattgcttggttccccagagggcttctctgtctctacagtctatggggacaatgtggaaggctttggtctgtattctggggcagtgaagggggggttctatccagcctcaattcacccacgtggtggggaggtgaggtcagaatggggtcgggaagggggtcatccaggccaggccacgcgtgtgaatgtggggcggagggctgctgcaggagagagcccatctagggtatggctgggctggaatatgtgttggcggtggtggggagctgcagagtgtggggaaacagccatcaggtgtgggctgccaagggcagtgatttgcccgtgtctggtatgggaggtagtgatgtagatttgtctttggtgagcccagcgtggagagttttcagctccggccccggggtaagagctgtgaaatctgtgagctatctggggagagccatttggaaggtggagccaggggtggtgatgtaacgctggaaaggaaaggggtcatcctagtgaatgatgagagggagagagctgggggctgaaacactgggtgtaagtgtgccagcgccatgatgtcatgaggcccgagaagtgggtcaggtgtgtgggccaggatggggcctggagggcagccgcacagtgctcgcagggatggggtggtgacgtcatgggttggtgagggcggggcctcgaaggcaccgctgggatgcgtgaggtcaggaaggaggcagaggctgagaagaggaactgggagaggctcaggactggaatgaaatcagccaccaggatgagccactggtcattccgaagcaaggatggaggatgcaggtagagggacagggtcagcggcgggaggggagagggggctcagggtccggggaatcctagaagtggcggtggtggtggggtcagtggagaggaggggttgttcagagagggctctctaaagggaagagaggtggaaaatatgtgtgcgggtggagtgggggttgggggtggggttacaagcaatttgggagggaacagaatccaggtgaaatatgggagtgatggaatacaggctgaaagtgggatgtgtggagcagaaccttgagcaaatatgcgggaagaatgcagttggaataacggggtgcattgaagttgaatatgcgggagccctaggagaccgtgggtggctggtgtagggaggagagtgcggctgcctccctgcccccaaatctgggagagcaggatggaatgaaggggctttggacgggagagagggggctggtttccggggaatgtagcatgagggttgggctggaatatgtggagtgggaggttctgcagagaggaggggaaggggagtccagaattccgtggccatctgggggacaagtgacgggcagctggggtcagggaggccgtgtggagctggcacgggtgtgggatttattccatcagcagttactgagcacttaggacatgcctagaggaggggaaggggccgggcagcgggtgaagtttgtggaggtgagagaggtgtaagtgtgcaaggggaattgagtttaggcagagtattcggtggctcagtgtctgggatcagggcggggtgggggctaaggacaaggcaatgggatgccgaaaggggctgctcttcgcggggtgggtatggggggtttctgccgagcagtggggaaaggggagttggcggcggggatgcggtgtggcgggcccccttcctctgtgcggtctcctcccgggagttggggaccacgagtgggggcggtgatgctgtgcggctcctcaggtgttcagttccgtgggtgcctcctacgccttggtaacccggacggtgtcgccgctgataggttctgggagccggagggggtggggttgatgggcggggtttagaacacccagtggggcggggccagtgctgccacgcactgcattggggtcaggggatgtgggatatgcggcaatttgtttgcagcaagatcgagattattattttttatttatttgttttttctgagacagaatcttgctctgttacccaggctggagtgcaatggcatgatcttggctcacagcaacctctgcctcccgggttcaagcgattctcctgtctcagcctcccgagtagctgggattacaggcacctgccaccacgcccagctaatttttgtatttttagtagagacgaggtttcaccatgttggcgaggccggtctcgagctgacctcaaatgatccaccctcctcggcctcccaaagtgctgggattacaggcgtgagccaacgcacacggacgagatcgagattattaacctggacttatgaaccatcagagaatgaaagcacaattgccagaatgtgaattttccaggggaagggggtccccgaattcatcagcccttccaaagcactcttctcccaaatgaagttaagagctgtgatctagagagaggtgtctgtcaggaggtctagggcctacgccattgcccttgggcctctgagaaaagagatctgtggatgggcctggggggtggtaatttgggagccactgaaatgaacttgcaaaaggttttgggactattcatttatctgcagaaggctcagaaat

SEQ ID NO: 37046 - DNA, 994 bp, Artificial sequence
  DNA replication origin
cgcctggcgtccgagaagcgggagctggaggcgcagctgggccgatcgcgcgaggaggcgctggccgggcgcgcggcacgccaggaggccgaggcgctgcgcgggctggtgcgcgggctggagctggagctgcggcaggagcgcggcctcgggcacagggtggccggccgtcgcggccaggactgccgccgtctggccaaggaggtgagcagcgggggcccggggcggccagcgaggcgcggacctcggcctcagcctggacctccgcgcccctctcccctcccggcagctcgaggaggcgaaggcatcggagcggagcctgcgcgcccggctgaagacgctgaccagcgagctggcattgtacaagagggggtgagagcgaggcctgccaggcgcctgggcggatgggcgggccctgagggtgtggaggctgatgaggcggagcctaagggggcggggcggggccaggtagggtggagggggcggggctgaaggggaggcggggcttagcggaccccgtctggagtccagacaggatttgggtgcagtggttaggaggtggacccgggctgtgcggagatgcgcaggcttggggcggcgttcaggagggactgggaaagggatcgtgccctagggtctcctggtgcgaaagggtgcggcgcagcaggtgggatcagggtgaggtccgctggcatttatggggtgggtggtggaaaattggaaagagtttccggggagttgtggaagactccggaaagaagggtctgttgaaggcggtgtgttgaaaggatgtaggggaatgacagaggggtgttttaggggtccaattgggtgaggtctgggggggaagatatcgagagggtcatgggcccaggagtgcacgtctaggagttgatggggtaggcctgagggttcggagaaggtgcggtcggggaggagtctcgcgattgagtttgtcggggcgggcgggaagctgacagctgcctctgtggtc

SEQ ID NO: 37047 - DNA, 1009 bp, Artificial sequence
  DNA replication origin
cttctactcaccatattggacccactccagggcgttgggctgggaggcttcccacggcggcggtgacccctgagaaaaaggagtaaccaaggaccagtggtggggaggctctggtacttcccacctccccgacctttgtggtttcaaggcccccaggctccatcacccaatttccctgcaaaagactgtttctagtctccccagaaaccctttggaggcgatccttttcccaagttcaagttttaccctctggagagcgactcagagaaatcctccaaatcgctgcaggagctggcagacgagcagcggctgcggaaactgtccactagagggagacggagggcgtgaccgctggccctcgctggccccgcccagtgcttcccaggccctcccagcccgcccgccctgcccagtgcctcccagcccgcccagccccgcccagtcccgcctagcccggcagcccccagctccaggccagttacctgaggagctgcggtttcgggagcggttaggggcgtcccctcggccagtcaaggcagcagggggctgggtctggcgagaccaggagacggacggaccgtccccgcttcccccactgcctaagcggttccgctgctgctgcctgggaaaaaagaaaggagacgccggtctgtacgcccaactcctgcaggcaagggggtcactgcgcccctaaaggtcacagccacgccagcgaaagcctgaggtgacaggcctacgagcggaaagcacgcagaaacacagacgaggaggtaggacggacggaagggagagcaggcggggtatccggcgagaagcgagcaggtggcaggggatggagactgatggtggcgtggagagatgagagcccgggagcgggcacgggccagggacaggggcaggtgagggaggaaggggcactgacttcatctggatctctctctgcttcctttccttggctttcacaaaggccgtggggtcgaagcggagcgcgcgaccacctaggacggcg

SEQ ID NO: 37048 - DNA, 624 bp, Artificial sequence
  DNA replication origin
tgcctcggaggcagattgggactcaggcctaggaaaagcttgtacactctctaaacagtgcaagggcagacctgggaggagtagtgagcagcccgtccctaaaggagtccaagcaaagtttctgcgcaggatgcctttggctgtgtggtgggaaggaggtgtcttgcagcgtggttcactgcccaggaggacccccaggacccactgttggtgacatcccggccgccttggtgctgattcctgggctctgacctgagacctctgggttctgagctgtgatgttgctctcgagctgggatctccggggtcttggttcagggccggggcctctgggttccaagcaccagtgaggagagtgctgggaggggaaggggtgggagggctttggtcttgtgggagggagagaaggaggggaggtgtgtggtgggacctgctgaggaacacattttgagctacatctttattggagaaggagacagtggggtttttggccatgggaggggaggaatggggtgcggatcagcagggcctcagggggagcggtagtgtggccaattctggatgaggtggtagagctggttgcctggagagagtgtacgctgcacatcccggtgtcctttgagc

SEQ ID NO: 37049 - DNA, 1027 bp, Artificial sequence
  DNA replication origin
tcccgctcccgggaagaaggggcaggctttgcctaacacacaccaaggtgtccgcgacgccttatgaaggcgccccttcctgatgcctggtgcctttgttaggaggcggaaaaccaggctgactcagtgcggagctgggttccagggtcagctcatcttattgctggctgaggcctggggcgggtcctcccggcttcagcttcctcctcggcaaagtcaatggaatcgcggcccatctgctccttatatgagccaatacaggcaaagcacctaggaactgcctggcacacgggggcccgcaaagccacgggctattaccattaggcacctactatgtgccaggcagtgtgccagatgtggcatggagaacggtgccactctagcctcctggggttgaaagaccagcagggagaaacaagccaaggccacaggtgaattcagacggtgatagaggcgatggataaaaggaaagaggtgagggagggtgacctcaggctgggaccagacccacacaggctccttggaagggtggggcaagggaaagcctccctgagagtggctgccttggctctgggatgggggagcagacagaggcctgcaggtggcagggggtgctgggggcaaagccaacggggttgagtgggcgggtcctgtgggaaggacagggtggctgaacacagccgggcgagcggaatgaaatgaggaaagggcaggaccaggcagggctttgtggaccacagtgaggactgtagcttttactccgagatgggagccatgggaggcttccccccgcagagcagggaccagggctagtgtaggtacaagagactccctctggctgctgtggggagaacagactgtaaggggtgccggctgaagcaggctgaagcaggtccggggccacgcctaccagctacctcctccttagaatgggctgcagtccagcctgacggtttccacagggagggaactttcaatcctgcaggctctcagacccaggtaagcatcagaatctcctgcagagctt

SEQ ID NO: 37050 - DNA, 1210 bp, Artificial sequence
  DNA replication origin
ccacaacttcccttatctgaacgcaagcattactttctactgacttcaagtctttagagatagcttagctctttcaaccaatcagaaaatctttgaatccacccataagcccccacttcaaaatgccctgcattttcaggctgaaccaatgtataccttacgtgtattgatttatgtctttgcctgtagcttctgtctccctaaaatatataaaaccaagctgtaacctgaccaactcaggcacactttctcagaacttcctcgactctgttccccagactgtggtcactcacattggctcagaataaacctctttaaatattttacagagtttggttttttcatcaacacagtgagtagagcagagagaagaggcagagagagaagaccagggtgggagagacgaggataggtgaggagaggaggagaaagaggcagggctgcaggggtccgggcagatctggttgtggggtggggggtctgtgagaggcagggatgcaggggtctgggcagaactagttgtggggtgcagagtctgtgagaggcaggactgcagggtgagctctgagcagagctggtcatggggtggggagtctgtgagaggcaggggtgcaggagtctgagcagagctggttgtggggtgcggggtctgtgagaggcagggctgcagaggtgcaggtgtctgagcagagctggtcatagggtggggggggtctgtgagaggcaggggtgcaggagtctgagcagagctggttgtggtgtgcagggtctgtgagaggcaggggtttgcaggaggggaaggatctgagcagcctgacttgggctcgggtggggtcctccttacttgacgtgcagctgctggtctccactctgctcagtcaggcttcacatcgggtctgatgaatccgagcacagcaggaaagagggtagaatggaagagcatttatgaggatgggtggatcgtttactgaacagtggcatctcaggacaaacattgctgttgggctgggctcagtggctcatgcctataatcccagccctttgggaggccacgaggggaggtcaggagttcaagaccagcttgaccaacgtgatgaaactccatctctgctgaaaacacaaaaattagccgggagtgttggtgcatgcctgtaatcccacctactcggggggctgaggcataagaattgcttgatcccgggaggtggag

SEQ ID NO: 37051 - DNA, 1460 bp, Artificial sequence
  DNA replication origin
aaaaaaaaaaaaaaaaaaaagcccattgtgggtttcatttgaaaaatccaagaattaaactggagttcaggtatggctggatccaggcactcaagtgctggtgtcaaaactgcctttcacaatcgttcatttctgcacaatctcttttgcactgaacctcatctcataaagcctctcctctctttgtggcagtgtgagccccatctgctccatctgcccagcaattccagcagacatagaaaatcctctttcctaatggtttcagcaaatgtctcagggttgattctcattgggctaaattaggtaacatgccttccctgaaccaatcactgtggccagggaagcagactcaactgattagccaggtttggatcctatgtccatccctggagctggtgaaggcagagcagtggccaagccctattcaaattaaatagatgaagaggacagagaagtggtttcccaaaagaaaacagagtggggaactggcgtgagccggggagccgtgtggattcctggaggaagagtgtgctaagctgtgggaacagcaagtgcaaaggccctaaggtgagcaacttgcctggcaagttcaaggttcaacaaggccacttctgctgtagtatcctcttccctgccaaccaaatccagaatagtggtccaacacacacacacacacacacacacacacacactctgttccttatccaactgtaatgctttcacccttgcttggtacctttgtacttctcccttcatagtcgactagttaaaaaaaaatacatttctcggctcttttttgaagtaggtgtgattgagttaaaacatatttacttgacataagcttaattattcatcaatgggaacctgaaaagggagtcagagaggccaagaggttagggtggagtagagggggtagggaaggtaagctggggtgcagagggtgcagactggaggaatgggggcgaagtggggtatgggactggggtggcagggaggggctggggagagagagagaagggtaggtgccagagggccaaggattgtggaactggggtggggttgggagttggggggtggggaggagatgtggggtactctgtgaataccttagaagggatagagaaggcagggctaggggtttggaaggggtgggattggaggtcagaggggctcaactggggttaggaaatggaaaggtgagaagaggtgggggttagaggctggggactggggtccagagagcagagtgaactgagtgggttcagaagagtactggcgttggcacttcagaggctggactagagaaggcgcgttcagccgacggtgcgggatacactgccgaggaagtccgcggcgaggggcgtggttggggggtgtgtattacacggtatcccccccttgcctttccaagtctttccctctggttccgcctccttttcaggagtgacataccgttgccc

SEQ ID NO: 37052 - DNA, 1493 bp, Artificial sequence
  DNA replication origin
ccttttggcattgcagagaggtgtcctgagagaccagaggcagggtttgggtttgcaaagggacttggcatgggggtctgggggagtctctctgccccccgactctgcctgttctcaaggacatggtaatctggtagggtgctggtccccaaaatcctatcttctccgggaatactacctcactgggcactctgggctgcaagccgtacccaccagggacttcccaagagcatccttggccacagtgggatggcagccagccccagctagaggaagggaagggggaaaggaggtgttgggggcccactcaccatcgcccaggcccccgttggctgaagggccatccagggggtgcaggaggggatgcggtgcagccaggacccgggtgcgagttacgagtgggtgcgcacggcggtgagatgactccacaggaaagggccggccttgggtggggagggggggcacccgagctcagccaagaggggcccccacccagccaggagggggcgctgagaggggcggaacgacagctggcccaaaaggggtgggatagagttccttgttaggcccagagccagggcctggaatagagtaggggacaggggagaggatgggggcggttagaaacatggggtgtgcatggatccaatcaggcctgagaagccagggaggagggaagggggtgaggcttactgggtgcctcacattggacagggaaagctgaggacctagaacattttccagggtcccatgggaacatggccagataaaaccccccggcagcggccccagggcacaggttcccctgtgttccagcagagctgcacctgctgggcaagtgaacccagaaacccaccctctgcccgggatgaccccatctgagtactgcggcagggggcgttcccatcacagcctgcaggctcacagcaccctgccatggagtctccccaaaataaagcttggatgaggctcccctgtctctcaggatgggggtgcaggggtgagatgaggggctggactttgggaagtgggtccagcttgtttccctgttatttaagggggtgactctggcttttgaaaggatacaaaaagtctcttgggaagggtcccagacggcttctgaaaggggctcccctctgcccatttctagggaaacccaatgtttaggagactgtgtcaggaagcatactattagaggagatctctcctctcttgaactcaggagctgaatgccattccaagggactccctatatgtgggaaggctccatttaggggtatcccatatcacctaggatcccaggcacctggtggcaaagaataccctcaattttggggggttcagaggccagagggatcaatatgtggagggcgaatatctcccgcagaagcctggggactgctcaaatgcaatcacccctaatttatcaggaatcccaagttccacccccaaccaggagggtaaatgagccttgggtagcgagaaatcgggaa

SEQ ID NO: 37053 - DNA, 947 bp, Artificial sequence
  DNA replication origin
tctggtgcctaccaaggtgaggtctttatggtgtatagagattggtgagtttcagagccagtgtggccagtctagtccctcccctttccctagcccagcacaattccctccattgagggcccacatcacctccagagggaggagggaggggtcagacccccccatagcaccaatctggataggccactctctgacaaaacagagcgagcagtgccttccacaaacggggtaaatggggctaagaaggggggaggccttttcctgtgggagaccaagagtagcaccatctgtagaaagaaagctggggggtaagggaggcacatagatggtggcagacagctgaggggtcctggcttctctccccacctggcaatatgcagacagcaccgtgcctgtgcatgtgcctgtgtggctggagaagtcttcagattgcaaaccacccaaggggtgagggagccccaggtgccccaaacatgtggggtaaagtcaaggtaagtgcatgtctggagggctggggtgggaagtggagggggttctggggcacagagattgtaggcaatgagaatggagaggcatgaagtccaggagcagcacagcctagagggtaggggtttagaatgggaaaacttaagactgaaagaaggaattgggtaagttcagtggggtgggaagcccagaatagatttaggaggctggggtctggaattagggagttgaggttataagattcagaaccagaggaatctttagggaaaagtctagattccagaatcagaagcatttggaggctgaattatagaatcagaggaatttggatctgaaatcaaaggcagttggaagctgtgaggcttagaagcagaggaatttatagaataaagcatagaattagaaaaagcctggctgggctcagtggctcatgcctgtagtcccagcactttggtgaggcc

SEQ ID NO: 37054 - DNA, 1495 bp, Artificial sequence
  DNA replication origin
ctcattccctattggctctctctaccaggggtaccgtctggggaacctctggtcaccttgtcctccgcgcgctctgtggcgaaagggacctgcgcaggcgcgtgaagggcgccttcagggcccgcgctttacgacacttgtgcggcagcggcggcggccacccggcgctccttcgcgacggttcggccgggtgccgctggcggccgttgccagggtaggggtcgctttgcggcatggcgatggcggagggcgagaggactgagtgtgctgagcccccccgggacgaacccccggctgatggagctctgaagcgggcagaggagctcaagactcaggccaatgactacttcaaaggtgcgcccgcctggcagggagggtggacagtggcccaggctgaggggtgccgggcccgcgcggaaccatagcaacgcggagctgcagcctgggcgcggggcagacactaccaagtgaccgggcgtggggaggcccaggatggcgctgccaaggagcgacatagggggcttcggagagtgatacctaggagtggcgtgcggagcgggtgctactcagtggagagactgaggagggcgccaccaattgtggggcgagagggggactggaatgagggcgctaccaaacgtgaggcctgtagagggcgctaccaggcagtgacatgtggtgggggagtgattgatggcgctaccaaatggggagtcctggggtgggtgccgccaagtggggggtagagggggcacagccccaatagagaaggcaatcgtgggggtggggaatggatcattagatggggggaacaaggaagtaggagatttgggctgacccgaggaaaaggaatgtgatggtgggggccttgggagtaagggtggggatccttaagaatagtatcacttagaatattgagagtcaagtgtggggcacccattcattcattaattcaacaaatatttattgagtacctgttatgtgccaaggactgtgcttgactttggggatatagcagtgaatgagacagatgtggccctgtccttagcttgtaattttgcaggtgaaccagacatgaaaaaaaaaaaaacaaaaaaaaaccatgtaaataagtaaaatacttaaattgtgatgagtgctttgaaagcaaaccagcagtgtgatgaagtagagaataagggttggaggctactttagatagggtagtgggggaaggccttactgagcaggaggcgtttaagctgaaactcacagagggagaactggagaggagtgttccagggaggtaaagcagcctgtgcaaaggccctgggatggggaatgaaagggtactggcatggctggggctttggctacttagggggagaccaataacaagatgagattaggacagaggccagatcatgcagggtctccgtgagtcattacaaagaccagtttggaattttttttttttttttttttttgagacgggagttttgctctttttgcccag

SEQ ID NO: 37055 - DNA, 1013 bp, Artificial sequence
  DNA replication origin
gtgcaaaggccctgggatggggaatgaaagggtactggcatggctggggctttggctacttagggggagaccaataacaagatgagattaggacagaggccagatcatgcagggtctccgtgagtcattacaaagaccagtttggaattttttttttttttttttttttgagacgggagttttgctctttttgcccaggctagagtgcaatggcgcaatctcggctcactgcaacctccgcctccctggttcaagcgattctcctgcctcagcctcccgagtagctgggattatagacgcacaccaccatgcccagataatttttgtacttttagtagagatggggtttcgccatgttggccaggctggtgtcgaacctctgaccgcaggtgatccgcccatctcggcctctcaaagtgctgggattacaggcatgagccaccacgcccagccctacaagaagacacattaagtaaatgggccagtctggactggagaagaatttgggtgtgatcaaactatggttgggaatggatgagatcatctagtaagagggtctagaggggggacttaggacagaacccaaatggaagagggtgaggctaaggaggagcacttagtgaggtggaaaggaagccaggaaaggtgtcgggaaggctgagagaagggagcgcttctagaacaaggagctggtgcctttagtccgatgctgccaaggcaagcactggccattggctttggctccatggatgctggtagtgatgttgacaggagcagttattggggagtgatgggggtgatgcagccaggaggtgctgaagagtgaatgggaggggaggaagtggagacagcaaatgttaagtgttaggagtattggttctgaaggggagtggagaaatgggggagggtggtaagacgagaacgtgcacaggagttcgagaccaacctggccaacatggtgaaacgacgtctctgctgaaaaaattagttgggtgtggtggcacacacctgta

SEQ ID NO: 37056 - DNA, 1250 bp, Artificial sequence
  DNA replication origin
tgaggctaaggaggagcacttagtgaggtggaaaggaagccaggaaaggtgtcgggaaggctgagagaagggagcgcttctagaacaaggagctggtgcctttagtccgatgctgccaaggcaagcactggccattggctttggctccatggatgctggtagtgatgttgacaggagcagttattggggagtgatgggggtgatgcagccaggaggtgctgaagagtgaatgggaggggaggaagtggagacagcaaatgttaagtgttaggagtattggttctgaaggggagtggagaaatgggggagggtggtaagacgagaacgtgcacaggagttcgagaccaacctggccaacatggtgaaacgacgtctctgctgaaaaaattagttgggtgtggtggcacacacctgtagtcccagctacttgggaggctgaggcaggagaattgcttgatccttggaggcagaggctgcagtgagccaagatcacaccactgcattccagcctgggcaacagactccgtctcaagaaaaaaaaaaagagagaagatgcagtgtcagggaaagatggattttttgtaaggatggaagagagtagagtccaatagagatggagaattgattctgcacaggagaggggggacttgcagcagcaaaaccctggagaaggcggaggtgggaagggtctggagccctggaagagacttggcctccaacgggagcagaagcaaagtgtggagaagctcgatccggtgggagccgtgagagggaggtaggaccagtgagagatgaggccagaggtagaaccttggaagtcagattggggaatatgggtgtcatcctgggggtggtcgatgccatgggaagtttcaagagcggggtgctgtggttcagttagtgttcagaaaagatccctggctgccatgcagagactggactccagggtaagacaggaaggagtctagattagtggacaggtgaggaggggtggtgatcgccagccaggctggagggacagaaatagattcaagaagtgtttcagggaggaagtgagagtggctgcctggagagagggtggacggtactccaggcagggaaaaaaaaaacaaaaacaggtggcaaaggcccaaaggtgagcagagccaggcatggaggccataagtggggccacagcgtaggaggctggaggaggttatgatgagtttgcagggagtagattgcgcagggctgtaggaaggagccagggc

SEQ ID NO: 37057 - DNA, 789 bp, Artificial sequence
  DNA replication origin
aaaagatccctggctgccatgcagagactggactccagggtaagacaggaaggagtctagattagtggacaggtgaggaggggtggtgatcgccagccaggctggagggacagaaatagattcaagaagtgtttcagggaggaagtgagagtggctgcctggagagagggtggacggtactccaggcagggaaaaaaaaaacaaaaacaggtggcaaaggcccaaaggtgagcagagccaggcatggaggccataagtggggccacagcgtaggaggctggaggaggttatgatgagtttgcagggagtagattgcgcagggctgtaggaaggagccagggctttctggggtggggtggcggtggggggtggggctctggggagccctgggaggttctgagtagggaaaggacagggtcaggtttgtgttttaggaacacccctctggaggggcaggacaagaggctgcgaggccaggtggaggctgagccaggaacctgggcaggagaggccagaccagggctgggtggggctggagggtgagaagggagtggctgaatctgagagatgttcaggaggctgacttggcagaataagtgaagtgactaccgggctttgggggctgagggatggagaggagtccaggatgaggctgtctcagccaggtgatggggtggaaggtggaattccctgggatgggagcagcctgcatgggggttgctgctgaggccgcatcagaattctgggccacagcagccattgggaggagcctgttgccccccaggacct

SEQ ID NO: 37058 - DNA, 914 bp, Artificial sequence
  DNA replication origin
aaaggacagggtcaggtttgtgttttaggaacacccctctggaggggcaggacaagaggctgcgaggccaggtggaggctgagccaggaacctgggcaggagaggccagaccagggctgggtggggctggagggtgagaagggagtggctgaatctgagagatgttcaggaggctgacttggcagaataagtgaagtgactaccgggctttgggggctgagggatggagaggagtccaggatgaggctgtctcagccaggtgatggggtggaaggtggaattccctgggatgggagcagcctgcatgggggttgctgctgaggccgcatcagaattctgggccacagcagccattgggaggagcctgttgccccccaggacctgggatccaggctctcaggagtcctggggctgggcaggcagccagaggggcctggcactgagctggcacggaggagaacggccctgctggcccaggccccttgctgtctgtcaggcagtagcaggcacagagccccaggctccagggctgtgggaataacaataaaaaagaataatgacagctcaccttaattgagccttgtggccaggtacgctgtggggtttaatcctccccgggggctgggagatggctaggagtggccctgtttgttttataaaggaagcaaggctcggagaagtgaaaaaaccactcgcccaaggtcagagtgtgtgagcagcagggcccggatatccccttcctcgccacgtgcttggctcccacgttcaggttcctcccagagctgtactggccctgttgaggagaagaggggccccagcagggagaagagaggtcccagggctcagaggactgtcccctcaactgtggctggttgctctgtaagttcaggcctattccagaaatcctgggggca

SEQ ID NO: 37059 - DNA, 974 bp, Artificial sequence
  DNA replication origin
gtcacctgcccagtgacccccacctggttagtagcagagctgggatttgaacccaggaggcctggcctcagggccttatctctcccacctcagagttcgctccctgagacggggccgtgcgcttgtcctgcgcatggggatggtgcagcagggggcttggtcagtgtgtgtcgagaggattgttatcctgccccccgacacagacacacttcactccctccttcccttgcaaccatcacactcggagctgcttgtgtcgtgtagggaggggcaaccagggagctgggagccgcgagtctgcagttggtcgcggggctgagaagcacgagtctgcagtcggtggagccagctcagacactgtcctggctgttggccgctggcctggggtggagggtggacttcaggccaggtgaaggcttgagctaagcatgagtccaggggacacatgttaggatgggggcagagatgtggcggggggttagggcgacacctagaagggtgggggcaggggcagcagagcagaggccttcccagcttgggctcccaagccattcttggccaagcccctccctcattgtctcttcctgtcctaatctagaaaatggtgacaagaggagtggccgcctccggatggctgtggctgtgatgacatggttgagtaaaggtcacgagctgcagggctcagtaatgagtaaccaaggacagtcggtgttgggttggggcagggctccaggtgggaagggggcctggggagacagtggggcagaagagaggagccccaaggacaggtttagggcagggtcttcatctcgtgtggggctgcaggagcatctttccccagggtaaggagcaggggctgcaggcagggtcttcgtcaagtgtggggctgcaagagtgtctttccccagggtaaggagcaggcttttcaagactctggcccagtctagggcccaaccccgcatactcccaacccc

SEQ ID NO: 37060 - DNA, 813 bp, Artificial sequence
  DNA replication origin
taactgctgagtaacaaggttgcacatattattatccctctttgcaaatggggaaactgtgacaccaagcagtgaagtaacctgcttcggtcacacagctgggaagtggcaaagccaggatggaacccaagtgtggccagtgccaggtgccattcaaatgtgatcctgaggcagacgaagacaagccaagacccagagagactgagctaccagcttaggtcacacagcaggtgggtgctggcccaggcctgtccgagcctggagcctggggtgcatggccagcctgcagctccacccacaccttggtgccccagcatggccaggcctctcctttccaaggtcacgtcttttcctggcaagggctcctcccactctgtgcagacctgaggctgcggctgggggtggaggtggggagagggtggctctgctgagaaggatacataggggttggtctccgagggtaaaccgttgagctcgaatatgttgaggaggtcatagaactggccatgggtgtccccacatactgtaatcttctctgtctgaaagaaaagaggccaccggagagggacgggccgagagagagacgtggggagggggcagaggtgaggggaagggtaagagttcacagtagaccaagaagaatcatgcaagagacacaagcagggaacacaaacgaagaccaagaggccaggagagaaatgggatattcaggaggaaaggcacaggggtggggtgtgagggagagagggaggtggatccgtgagttcctgagctctgtggcccctccccagccagagagcccacccccgctgg

SEQ ID NO: 37061 - DNA, 1551 bp, Artificial sequence
  DNA replication origin
acaagctgacttccgataatgactttattttaacatatttaattacagacataaaatagctggggaggggggtgagccccagcctagccccaccatggggctataggaggggaggcgcaggcggggcccccctgctgaccctctctctgggggtcttcctatggcggggccctattgcttgagtgggggaggagccatgcaaatgaggggggcagggcagccactcggccccaccccaccccgaggacggcctccccacagaatgcccaggctgtgcccccagccccagctgctccacctccttcctctctgtccagggagcagaccctctggccagcccctgactctgcccctaccccctctgcaaacctaaaggggaataaatacaaactttacaaagtaaaagggggtccaacattgccctggggcggggcctgctctgcccctagcccagggcctgggtccggtgggattggaggggccctgggatgcaggccgccccgcccgtcacctcacatcattcctagctgcagcagcgtgttggcataggccatgggcttgacgttgggatgaggctgtgggaccagggcaggtgggatggacagaagtcagaacagagcccctgagcacccaccggcagaacctacccctgccccttaccagggtctcagcctccttgtccccaggccgggatggaaggggcaggggccctgaggggtgactcaccactgctgtgaactggtggaactgaggccgtaggtcagagccctggaggtggatgtaggaggctttgttccccatctggtcgctgcagggacaggagcagagtggacagtgtggtcagggctgggtggggctggtgggttaagagaaggaatggctgggcaagaagggacagagggagagggagggacagagccacaacagacacagatggacagagagacagagatgggaaagacgaatccaggggaaagaatgggaggggcaggaggatggggatggggaaaagagggtgggagtgcaggaagcaggagcaggaaggggcagggcatagctcatggaggtggatgctcgccagaccccactaggaatctgaccacgcttctagctttgcccacccagagatgcagggaacagaggaacatgtcacacggcaccacggggatgcagtcagcctagtccaggacacaggtgactcgtacagcaggcagcaacctattcttcaacaaataaatgatgcgggtggggagagacagggaactcacaggcaaagagactgaaaatgtggtccttgtttaggtcctgtctggaagaagtcagctggaaaagacacttaggagagaccaggagaaagagaacttggcaggattcgggtgggggcaagggatcaacactgtgtgtgtgtgtgtgtgtgtgtgtgtgtgtgtgtgtgtgtgtgtgtgtgtgtgtgtgtgtgtgtgtgtgtgtgtgtgtgtgtgtgtgtgtgtgtgtgttttgagatggagtcttactcttgcccgtgtgcgtgtgttttgagatggagtctta

SEQ ID NO: 37062 - DNA, 1097 bp, Artificial sequence
  DNA replication origin
cgcgccaggcagcaagcagcaccagcagtaaccactccactcagaaaagagcaggggtggggcgcggtggctcactcccatagtcccagagctgaggccagaggatcgcttgatcccaagagtgcaagtgagccgtgattgcaacaccacactccagcctgggtgacagagccagaccctgtcttgaaagaaagaaaagagtaaagaaaagagagaaagagaaaggaaagaaagcaagagagagagagaaagagagagggagggagggaggaagaaagaaagagggaaggaaggaaggaaggaaaggagggagggtgggagggggaaggggagggagagggagaggggagggagagagggagaggggaggggagtggagggagagagggagaggggaggggagtggagggagagagggagaggggaggggagggagggaaggggaggggagggagggaaggagggaggagggtggaagagagaaaaacaaaaggagggtggtgggatagaattctttactttcctgaggaaaaaaataagaaacttaggccaggcctgcaaccagttaggaagacagactggcctttggacctccacgaactctcttttctcctgccctcagcaaggctagagtgtggtcatttgctgtttttcactgctaggggttgtggggacacaaggcaatacaggcccccagcttcctcctaacctccacagggctttagcaacccagtttcttcccaattataggaagcagttggccgcgtgcagtggctcatgcctgtaatcccagcactttgggaagcagaggtgggcagatcagctgaggttaggagttcaagacaagcttggccaatatggtgaaacctcatctctactaaaaatacaaaaattagccaggtgtggtggcacacacctgtagtcccagctattcgggaggctgagggaggagaatcgcttgaaccagggaggcggagatggcagtgagccgagatcgtgccactgcactccagcctgggagacagagagtgagattccatctccaaaaagaaaaaaaaaaatgcagcagcaattaatgcacaatacacacagcctct

SEQ ID NO: 37063 - DNA, 995 bp, Artificial sequence
  DNA replication origin
tccctccaagtgtgggagggagagatgctctgcctctgaacttcaaagtggaggtggagtgctggccacgtctccacctaacaaccctctttattctcttgttaaagttttgttcatgctttgatttttttttaaattttttagagacagggtctcactctgttgcccaggctggagtgcagtggcatgatcataactcactgcagcctcaaacttctggcctcaagtgatcctcctgcctcggcctcccaaaatgctgggattacagatgtgagccaccacacacaccatctgattaaaaaaaaaaaatactgattccttgtagcaacccaaaaaatgtaaagaaagaattcgacacaatggggttgcgtcacctatagttttcatttcctcaaatgcaactcaaggtgctcagcttgataaagggagagagggagggcaggggagaaactgactcctttttccatctcttttttgcctgcacacttaatgtggactgcctccttggacttaaaaagagttgagccaacatgcaaatcaaaaaacatttatgaactgatttcttagctttggacttgacaactgacgaatgctctgggggtgacctggcccttgctgtccgttccactcccatccttgatgatggagacacctgtgtttatgttgtcacttcgcttgccatcctcatgccccgggctctgctggtttggaggggacagggcccttggtttgcacacctcacccgatcttggttataaggtacagtaaaagcgtctgaaaaatgcattcaaaacacagattctggggccctcggcaccagaggtgtggatttgctagcggtgcctgtgtggctctgaattctgtttgcatcaagctccacggacatctgggcaactcggccactggacacattgaaaaatcattgcaataggaaaaggcccaaaagaggggctgtggttggccgggcatggtggctcacgcctgtaatcccagca

SEQ ID NO: 37064 - DNA, 1176 bp, Artificial sequence
  DNA replication origin
cggctggtcgtgggcacgtacgacagcagcaacgccagcgacagcgagttcagcgacttcgagacctccagagacaagagccgccagggcccgcggcggggcaagaaggtgcgcaaaatgcccgtcagctacctgggcagcaagttcctgggaagcgacctggagagtgaggatgatgaggaactggtcgaggccttcctccggcgacaggagaagcagcccagcgcgccgcctgcccgccgccgcgtcaacctgccagtgcccatgtttgaggacaacctggggcctcagctgtccaaagcggacaggtggcgggagtatgtcagccaggtgtcctgggggaagctgaagcggagggtgaagggttgggcgccgagggcgggccccggggtgggcgaggcccggctggcctccaccgcagtggagagcgcaggggtatcatcggcgccagagggcaccagcccgggggatcgcttgggaaacgcgggagatgtttgtgtgccccaggcttcccctaggcgatggaggcccaagatcaactgggcctcctttcggcgccgcaggaaggagcagacagcacccacaggtcagggggcagacatcgaggctgatcaggggggagaggctgcagatagtcaaagggaagaggccatagctgaccagcgggaaggggctgcaggtaatcagagggcaggggccccagctgaccagggggcagaggctgcagataatcagagggaagaggctgcagataatcagagggcaggggccccagctgaggagggggcagaggctgcagataaccagagggaagaggctgcagataatcagagggcagaggccccagctgaccagaggtcacagggcacagataaccacagggaagaggctgcagataatcagagggcggaggccccagctgaccaggggtcagaggttacagataatcaaagggaagaggccgtacatgaccagagggaaagggccccagctgtccagggtgcagataatcagagggcacaggcccgggctggccagagggcagaggctgcacataatcagagggcaggggccccaggtatccaggaagctgaagtctcagctgcccaagggaccacaggaacagctccaggagccagggcccggaaacaggtcaagacagtgaggttccagacc

SEQ ID NO: 37065 - DNA, 1409 bp, Artificial sequence
  DNA replication origin
aggacttcgcagacaaagacggtccagtcgaagctattcaatatggccgaggcgctgggaggccccagcccgggcctccagtagggtcccccgcccccaggcaggccgccacccagctccaggctgaccttgacgcgccgcagcctgccagcccgcgcgcttagagctctgcaccgtggagcgcgcgggcaggaagttcctcctcgccctccgccagaatgaggcccaccttcccccgtctcatcttacactcccagactctggaagactgacaggggggctgtccactcccttcggggcggcctccttcccctcccccacaggggtgtggccgcgccccgggcctagctgggcccattgcttcccagcgaagcggcagtggcccacgtcagcacctttcctgaaaggcagcggttcccaaacctgccatccgaaatgtgcaagtttccagccaagtccgggaggtgggtgtgctagtggattctactttttgagagccactggcaccacagattagcattttaaattcacgcgactatcggtacccgtacacctatatgcgtgggtagagaaatgggtacctgactgcaacagtcccactgtggcgcttggcaggtcagggctcaatacatatttttgaggggatgaataaacccaaatgttcatggccaggcgcggtggctcatgcctgtaatgccagcactttgggaggcccaggtgggtggaacacttgaggccaggagttcgagaccagcctgcccaacatggtgaaaccctcgtctctaccccgggtgtggtggtgcgcgtgcgtagtcccaagctacgcgagaggctgaggcaggagaatggcgtgaacctgggaggtggaggttgcagagatcgcgccactgcactccggcctgcgcaacagagggagactgtctcaaaaaaacaaaagtgcaaaaaaacccctacaaataaacaacaacaaaaaaccctaaaagttcacgagtagagactgcctctattttatggtagtatcttacagtgaaatattttgcaacttcgaaaaaagaatgagatggctaaggataggcacggtttatgaggcgcttcctatgtagtaggcaccattcccagtgctttctatgaatgaactcaggaaatccttgctataacaggagactggtagcatgagtacaattcccattagacagctgaggaaactgaggcccaaggacataaaaccacactctcaaggtcacagccatggggagtggttgagtttggatttgaatccagaatagtctgccttttgtgtcgaccaaagagtcaagatggccaggcgcggtggctcacgcctgtaatcccagccctttgggaggctgaggcgggcagatcacgaggtcaggagatcaagacaagaccat

SEQ ID NO: 37066 - DNA, 1536 bp, Artificial sequence
  DNA replication origin
cccgaggcagctcaggtgtccaccagcgggcatactgctgcctcaaagagttgggcaagatgctgttcggggtgaaggacattgcactgttggagcacgggtgcaaggccctggaggtggacagttacaagtccctgatgatcctggggatcccggaggactgcaaccacgaggaattcgaagagattattcggctgcccctcaaacctctaggcaagttcgaagtggctgggaaggcctatctggaagaagataaatccaaggcggccatcattcagctgacggaggacatcaattacgccgtggtccccagggagatcaagggcaagggcggtgtgtggagagtggtctacatgccccggaagcaggacattgaattcctgaccaagctgaacctctttctgcagagcgagggcaggacggtggaggatatggcccgggtcctgaggcaggaactgtgtcccccagccacgggccccagagagctgcctgcaagaaagtgctctgtgcctgggctgggggagaaaccggaggctggggccaccgtccagatggacgtggtgccacctctggactcctccgagaaggagagcaaggctggagttggcaagaggggcaaaaggaagaacaagaaaaaccgccggcggcatcacgcctcagacaagaagctgtgaggtggtggcatcgggtgggcgtggggagtgtctgagggggtgtgggtgatgactgtgggagggtaggtaccacctcactacgtttaaggagtgcgagtgagtgtgggtaatgcaagggagggtgggaatgactctagtgagtgggtaactttggagtaagaatgggtatcatttggatagcacaggtaacatctgactagtgcgaaagaggtggatatctttatctgagttaactaacttgtgggttacatctgagtgggtgtggttaacgtctgggtgcccgtggctcatttattcatcttacagatatttattgcatacctactatgttccaggagctggggatatggaagggagtaaactcaataaaaatccctgccttcatggcactcagagtaagtgggtaatatttgaattacttggagacatcagagtgagcgtaggtagcatttgagtacatgtgggtaacagctgaatgatcataaaatctggttgagtgtggattgctcattcatccatgtatccatgcaaccaacaaaatttcctgaggacctacagtgtgccaggcactggggatacagaaggggaataaacagaccaaaaccttgcccgtgactctcatagtagctatttgagtaggtgcgggtaacatttgggttacttgaatacacgttagtgagtgtgggtagcattagagtgtgtgggtggcatccgcgtataattgaaagtagttgtgggtaatatttgagagtgtgcgggtaacacctgaatatgtgtatgggtatcatttgagtagatgagagtaatttctaagcgaggaagggtctcaaagacccacaaatatcttccgctactcgggaga

SEQ ID NO: 37067 - DNA, 2442 bp, Artificial sequence
  DNA replication origin
ggcccacttgggttgaaagagggcctccgtggaggcgccaccggagtgtatccagacccgcttgctctgcgacctgaacaggccactcttgcacccggctccctaggtccaattgcagcgccggcgcgccggccgggctcagccctagcaacccacgcccggttgccatggagacgtcggcacctgcgcagcccaagacccccgagcggcggtgcgggagccagtgcgcaggcgcgcgctgcgacgccaacctcggcttctcgccgctaacggcatcgagtctggacgccccgtgacccgcctgggccggagcgggggcggacggcgccttcttggccctttctgcctctagcagcggcgccggggtagccggagccagcgactgggaaacggctgcattccactgcgtctccttggcctggctgggcggtcggaggctgatctgccaagtaagtcccggctgggcaggcggagcgtcaggcccgggggagggtcctagggccttttgctgcagattcagggacacgtgtgagcaccggggcctgggttggggaggagggtgttgggaaagcgccaggcctcctgcaggccagccgcggagggggcagctaggatctgtgagcttggtcatcttcctgggaacgtgacctcgctcccttgtcaccttgcaggattactgtttggagaccgctgcagcccacgtccacctgatagactatttactacacatagtaggttcagagccgctaaatgtccaagaccatggcgatgaaccttctggaggattggtgcaggggaatggaagtggacatccacaggtccttgttggtcacaggcatcccagaggactgtgggcaggcagaaattgaggagaccttgaatggggtcctctccccactgggcccgtaccgcgtgctcaacaagatttttgtgagggaagagaatgttaaagctgccctcattgaggttggtgaaggtgtgaatctgagcaccatcccccgtgaattcccaggaaggggtggtgtctggagagtggtctgtagagaccctacccaggatgccgagtttttaaaaaatctgaatgaattcctggatgccgaggggcgcacctgggaggatgtggtccgcctgctccagctcaaccaccccaccctgtcccagaaccagcatcagcccccagagaactgggcagaagctctgggggtgcttctgggagcagtggtgcagatcatcttctgcatggatgccgagatccgcagccgggaggaagccagggcccaggaggccgctgaattcgaggagatggcagcctgggctttagcagcagggaggaaggtgaagaaagaaccggggcttgcagcagaggtgggttctgccttaaaggcagagacccccaacaactggaatgccacggaagaccagcatgagcctaccaaacctttggttcgcagggctggagctaagtctcgctccaggagaaagaagcagaagaagaactccaggcaggaagcagtgccctggaaaaaacccaaaggcatcaattccaacagcacagctaacttggaggatcctgaggtgggtgatgctgaaagcatggcgatctcagagccgatcaagggcagcagaaagccctgtgtgaataaggaggagttggctttgaagaagcccatggcgaaatgtgcctggaagggtcccagagagccacctcaggatgcccgggcagaagccgagagcccaggaggcgcctctgagtcagaccaagatggtggccatgaaagcccaccaaagaagaaggccgtggcctgggtgtctgccaagaaccccgctcccatgaggaagaagaagaaggtgagcttgggccctgtctcctacgtcttggttgactcagaagatggcaggaagaagccggtgatgccaaagaaagggccaggctcaagaagggaggcatcagatcagaaggcccctcggggccagcagcctgccgaggcaacagcctcaacctctaggggtccgaaggccaagccagaaggctctcctcggcgtgccaccaatggtgagaatgatagcagaagtgactgggctcgtgccagcaagtggatgaggcaggaggagcaggagtggcaggtggggcagaggagcccgaggaggtggtgggtcaagcgggtgatgaggaggaccctggtgcatggcaggaggtggatgacacaccagttgaggagggtaagagcccagaccgcccttccaggagcccctgaaggccgatgctggagacatctggtgggcaggaggtggcagaggaaacccacaatgagtgtcactgtggtcatttgccactccatctgacccatcttccttgatgagaatttaatggtttgggcccaggcttggtggctcatgcctgtaatcccagcactttgggaagccaaggtgggcagatcgcct

SEQ ID NO: 37068 - DNA, 1051 bp, Artificial sequence
  DNA replication origin
cagggctggcgcgtcccaggccctgttcttggtgcaggaaacaggaccctcccgcagggagcatgcggtggggaggctggggttacgctccctagatgaggacgaaatccatgcattagggggtgagacctgctgggggacaaaagtccggcaagcagggggcccgaggagggccggggcaggagagggtttgcagtcgtcataaacgggcctgggaaagtggcctgggaagccctcactgagaaggtgacaagtgtagtggcgcgatcacggctcactgcagcctcgaattcctgggctcaagcgatcctcccaccacttcagcctccctctagagtagctgggaccacaggcacgcgccaccaagcctagctactttttgcattttttgtagagacggggtctctgaatgttgcaaagacccgaaggacgtgcggccggcggttgcctgggggaagtccatgaccggggtgtaggaagagccagggcaaaagcttcccaagccaagggtatgactgtagggggttattagcgtgtaattactgcccctcccatgccaggctaagtgctggtggagtggaggcagtgacgccaaagaaggccgcctgcctccatggtggtcgctgtctggctggattttcacctgaggcagcaaatgagcatgaagaggtccctggagtagggcgtgcagactggcagggcctcagggcctcgttaagcgctggggagccatgggagggatttgaacaggagagggagaggtttatgctttaggtctgtcgtgtgcagggtgcaaggctggagcaggaggaggctggggcgggaacctaggggacaggcctaaggctggaccggcgcagggtggtggggatggcaggaagtggttgaagagttttcaggagcctgatttcagctgaccaggtgactggcgggctgaggttgtgtgtgtatgtgtttgtgtctctgtgtggatctgggggtggacacattcgaatgtatatgtctgtgcgtctttattggctctgtagagaggagggcaggatgaaggagg

SEQ ID NO: 37069 - DNA, 925 bp, Artificial sequence
  DNA replication origin
cgcctatagcccaaggaagggcactccaggctgcaggaagagcagtgcaaaggccatgaggcaggaatatgcctggtgtgtcccagagacctgggtggctgaagccacaggagacacagagagggcagtgggaaacaaggcagagggtgagatgggggtggagtgtgtagacctgagctgcgagggagagctgcatgcgatggccatgtcctgcaccagcaccgtgcaatgcggtagccactggccacgtgtggctcttgagcacttgtgacgtggctgggaagactgaggacatgcatgtgtatttttatttaatcttaattacatttaaatccaatttaccccgtgtgattacctagttgaacaaagcatgtctagacagtcctaagaactgcagatatgacggcacaggaaggagaccttgggggatctggggaggcgagggacgcaatcagaccccaggtgtgacttctaagaggacgtctctggcagccatgtatggtggggggacacaggatggagggaggcagaaaactcaggtaggatggaaagctgagtctgaggtccagggcacaggtgaggggtggaggctggggggagagtgcctgcagctgtggcctggcagagtgtatctgggtggaagctagggtggggattggctgggcggggtctccatgggtgtccaggggcttcggagctgaggctggaagtggggaggcatcaggggtgggagtggaagctggctcagatctgcaaggggtgagatgatgctggggggtagggagagccaggcagggatcccgaagcagcaaaggacagtgtatgtaaaccagtgacaggacagttcccaggtattctgggcaaaccacagtcaagaccgtggacatctgtggcccacgctcccacaccccgcctgccccactgc

SEQ ID NO: 37070 - DNA, 1182 bp, Artificial sequence
  DNA replication origin
caccgcttccggggcccgcaaaacccgcgcgggcggccgaggccgaggccggggcgtcactcccgagaagaaagccgggagccggggctcggcccaggacgacgccgcaggaagcaggaagaagaaggggagcgcgggcgccggggcccatgccagggcaggcgaggccaagggccaggcgcccactggatccaaggccgcgcgcgggaagaaggcccgtcggggccggaggctgccccctaaatgccgctagtggccccccaagaagccgcccaggctgcgagcaggccccgcagggcacccgcccgcctgtggcccccgccctcccctcccctcttcctgtcctccgcagacgcaatctcctcgcttcacagcgcgcccgggccgcgttttgccagcgtcacgttcccctctcgggccctcgcaggccgggggcgccagcgatcccgacggaggaagcccggatgggaggaggaaagagaagtgggcgcccgaggcagcagcgcagggccgagatggggacgcgccaagtggaccaggattgggggcccgggttgcccccggagggggtgtgtgtgtggacgccgggcacctgcagaggcgagcagggctcttcgtggcgctctcggggcctgcgcctggcaggtgctgtaggccgctgtcgcccctaccccagtctgactgggccctgggtctgtggtggaggctcagtcaccagccgcgcagcgcgtgtcagggcgcaactctcagccaggggaggccccagctcccagccaggggaagagatgattccagaaaggaaagtctgagagatagaaggcggttgggaaggggaggaggaggaaaggggagaggaacggtgggagaagggaaagaggaggaggagggggaggggggagcagagggaagacacatgccagccctgcctactggggcgcccctgataacaaaggaaccagccccaggccaaggccacctgcccctgaccacaagttgaatttgtcactcagactgcagtgtttcccaacattctaattatttgcagaggtgttcaatttggggtaattcacttaaaatccagttttggttcttctgggctgagtgggccctggcccctcccataggctgtggctcccctgggtgccccctctccagtggagctgacccaccgctcagcgctgg

SEQ ID NO: 37071 - DNA, 1657 bp, Artificial sequence
  DNA replication origin
ctgctgccccaagatcagcgccaagggggctgcaccatggccatgagccttttgcaggactggtgccggagcctggacgtggacgcgcacagggccctgctggtcaccggcatcccggagggcctggagcaggcagacgtcgaagccgtcctgcagccgaccctcctgcccctgggcacgttcaggttgcgacacatgaaggctttgatgaacgagaaggcccaggccgccctggtggagtttgtggaggacgtcaatcacgctgccattcccagggagatcccaggcaaggatggggtctggagggttctgtggaaggaccgtgcgcaggacacgagggtcctgaggcagatgagacgcctgctgctggatgacgggcccacgcaggccgcggaggctgggacccccggggaggcacccacccctcccgcttcggagacgcaggcccaggattctggggaggtaacagggcaggctggctcgcttcttggggcagccaggaacccaaggaggggccgtcggggtcgcagaaacagaaccagacgcaacaggttgacccagaagggcaagaagagaagccgaggaggacggccgtctgctcccgcgaggagtgaggccgaggactcttccgacgagagcctgggcatcgtgatcgaggagatcgaccagggcgacctgagcggagaagaggaccagagcgcgctgtacgccacgctgcaggccgctgccagggagctggttaggcagtgggcgccctgcaactccgagggggaagaagacggtccccgcgagttcttggctctggtcaccgtcaccgacaaatcgaagaaagaagaggcagagaaggagccagctggggccgaatccatccgcttgaacaccaaagaagacaaaaatggtgtccccgacttagtggccctgctggctgtgagagacaccccggacgaggagccggtggacagcgacacttcggagagcgactcgcaggaaagtggggaccaagaaacagaggagttggataatcctgagttcgtggccattgtggcctataccgacccgtcggacccctgggcccgggaggagatgttgaaaatcgcttctgttatcgagtcgctgggctggagcgacgagaaagacaagcgagaccccctccgacaggtcttgtccgtcatgtccaaggacactaacgggacccgcgtgaaggtggaagaggcgggccgcgaggtggacgccgtggtcctgcgcaaggccggggatgacggggacctccgggagtgcatttccaccttggcgcagccggatctccctccccaggcgaagaaggctgggcgtggcctcttcgggggctggagcgagcaccgtgaggacgaagggggtcttctggagctggtggcgctcctggctgcccaggacatggcggaggtgatgaaggaggaaaaagaaaacgcctgggaaggcgggaagtacaaataccccaaaggcaaactgggggaggtattggcgctcctggccgcccgggagaacatggggtccaacgaggggtcggaggaggcttcggacgaacagtccgaggaggagtcggaggacaccgagagcgaggcgtcggagccggaggacagggcatccaggaagccccgggccaagagggcgcgcacgg

SEQ ID NO: 37072 - DNA, 778 bp, Artificial sequence
  DNA replication origin
tgaagggctgggtgttgtcttgagggcactggggagccatagcaggttccaggcagggggaggaacaggggcaaatttgtgctgccatgggtgaaatgggtgggatgggggaagactggggatgggagacctagggctgagagggggataaggaggcgcctggataaggggtggggccatgggtgggggaataccagggcgaagcccctggctcggaggagagggagggcctcgccctcttgtggtctaagggaggaaaggatggtctccagccagatgccccacctcattcaggccttcctcactgggggccccatctggagttctcctgtgcacaccacagcccagagattccagtaagtccggctgcctgggacaggccgccaggtcggccaaggatgaccaagaaaacaccatttggccccatcctggggagaaagaatgggcatttgtgtggccaggattaggggtggactaggggaggggacgtgtcagtgtgtgtgtgtgagtgtgtgtcagggtcggggtgatggtgtgtgtggacatgtgagagggtttcagtgggtgtggcatatgtgtgtgcaaaggtgtgtgaatcggtatgctggatgtgcaagtgtgtgtgaacatgtcggtgtatctggatgtgtgtgttagaatgtgactaggagtgtgagcatgattgtgtgttttgtgagtgtgttggcacctgtgtaagtctgtgtgtgtaggtgtgtgcctattagtgtgactgtgacactagctgacaggagcccac

SEQ ID NO: 37073 - DNA, 1119 bp, Artificial sequence
  DNA replication origin
agggagggggagggtcaagtttgcgatgtcatgtggatgaatgggacgggtgaggctgaggctggacccgacggggaggccgcagaaggcgtgggctgaaagcgtggaatggtgtgggctgaaggcgtgcagggcgtgggagggggatgttggggcaaagtccaggaccctagcccactcctagtttgggagaggagtctctctcaccctcagggttcgtccccagcctggtgatctgctgggagctgccagccactcatctcttgaactggcccaggcctggggccctgtgtccccaggcagagctcccatagttccccgttagcctagagggtcacagctcccagtcccccagtgtgggtcctgccactcatgggccctggtgggcctgagaatctagtgggcctcctggggtaggctctgtccctgaatgggcagaaacaacctttcagctctcacagtggggtgacatagtggacgagggatgggggatgctgggtctctggacgcatgcctgggggtctccctagggggttgatggttttggccttcaggcagaaagaacctggtggcaaagttccagaggttagcggagcctagcatggaggcggtgagtggggctgcagtgtgtgtgcgtgggggttatgatgaagctgcagggagcagatcacgcagggccgtggggagagccagggctttctgcgggaggctctgggagccctgggaggttccgagtagggaaaggacagggtcaggtttgtgccttaggaacacccctctggaagggcaggacaagaggctgtgaggccaggtggaggctgagccaggaacgtgggcaggagaggccaggtcagggctgggtggggctggagggtgagaagggaatggctggatctgagagatgttcaggaggccgacttggcagaagaagtgaagtgactgccgggctgtgggggctgaggggtcgggaggagtccaggatgaggctcagtctcagctgggtgatggggtggaaggtggacttccctgggatgggagcagcctgcttgggggttgctgctgaggctgcgtcagagttccgggcaacagcagcctttgggaggggccccttacccccca

SEQ ID NO: 37074 - DNA, 1374 bp, Artificial sequence
  DNA replication origin
ctcagagcccgcagcctcggcgaccccccagcctcactcaccatggcgaggcccggggtgtccggagcacggggatcaaggttcctccggcggcggcagcagctgcagcagttccagctccgccgcgcgtccgcgcctccacactcactgcccgcagcgcgcgccgccgccgccgccgcctcccgccccaacggtccctcaacggccgccgcgcgcgccccgcctcgctcggccccgccccacccggcccgcgcgccgccgcactgcggctcccacggatccctccgcgccccgctccacacctacgggcccgcgaatctctcgtccccaccctgcacaggaattgggtttgccgccgggcgcgcgcgcgctcgctcccgtcgccggactactttccctcgccgcgcgccccgcctcccgggcccacttcactttcttcggcggaggggcacagctcggcggtgcgtgacgcgtccctctgtgagccgcgtcactattgggcctggcccatggcggaaatgagagcttggcgcccattggtccgaccttccctgcaatgcgtcaaactggggcgagccactgcaaggtggtggtgggtaagtctgaactctgtggccgcgtggggctttgaggagtaacgaggcgaagggggaaacggcgtcgccgttagagaagcaaatacgtcgtttctgtggccaggaggtggtaaaaaggctggcgacaaatgcagaagggctttctcggctctcccctttaaccgacggacgatggttcaatccaaaatgctagggtttagaagctccgcccctaactgggcctttggaggtggcggggtctccaaggtgccacctaacgctcagaggttccgccctccgtggtcttgtctctgcgtcctaagacgcactcagccggtgggcgggacccctgggcccgcttcattcttgatccgctcagggtctgtgaaattaggaccatcccaggacagcctgtgggaacggggtattcattcagtcattcgtgctataagcatcaattaggcgcctgctgtatgcagggacctgagcttggctgggctggggagaccatactccccaaccagcctctccagacagacgacctctttccttattccagtgttccagccataggaggaaaaagaactgaaactttgtttataggagctcagaaaatgatcacccctgccccctcccccgtttaggataggagctgacagtctcctgcgtgtcccctccccaccatgttgatggttaagagatgggcaaacgagtcaggctggaccaatcattatgctccacctggaacagaatggagactgaaccaatgagagtccttccctggggtttggatctgcag

SEQ ID NO: 37075 - DNA, 2147 bp, Artificial sequence
  DNA replication origin
ggagccgcagtgcggcggcgcgcgggccgggtggggcggggccgagcgaggcggggcgcgcgcggcggccgttgagggaccgttggggcgggaggcggcggcggcggcggcgcgcgctgcgggcagtgagtgtggaggcgcggacgcgcggcggagctggaactgctgcagctgctgccgccgccggaggaaccttgatccccgtgctccggacaccccgggcctcgccatggtgagtgaggctggggggtcgccgaggctgcgggctctgaggcgggcttaacggggcaggacccctgagggggcgacagagcccagagtggggggcgtccgggcccggcgagagcctcgggacccttttctacccgcgttgtcgggggctgttgaacccagagcgggacgtctggatcaccagaggtttccagaagcgactttagcaccaaatgggatgtttaagtccacaaatgggtatctgagcccctaaaggggacatttgaaccccggatggaggatcgggaccctcagtgggacccctcaaaaggattttggacccaggatggggcgttgggtttcaggatggaggtgtttggaccccaggggacgaaataagaaagatgggctggggaggggagctattcgggccctgatgaaggcgtttggtcctgagaggatgcggggaacgggggacgaagggaggctgggctgctcctggatggggtggtggagggtagctgggcccgggcggggaggggcgacccctgggctcctgtggagcagaggagagggtcaaggatgggcggtcacttctacagatgagactcccgagggtgggggagggtgggggagggtggtctccagagcccagcactgcagaggaggaggagggtgaggtgcaagcttatgggaggaagagcctggggtgggtggcagcggagattagaagatactcttgaaggcttccgggacggagaaggatcagggtcgtggaggtggtgaaaagggatggtgagagtggggctcgccagtagtcgggggacagggacccttggggttaatttggaagtagctagaaaaggttccgaggttactagtgggttaagactgttgctctagaaagacagaatttttttaacggggtgggagtgttgtgtttgggtccaagagaagatggatttccaaggtgaggggtgggggaggacttgggcttgggtggttgggaggtgaggtggaaggagaaaatgaatggcagtcaggggggcctaggtttgggggtggatgtgggtagcaccctgccagtctccagggacaggccaggacaaagacggctcagtgtggatggggagtgggctgcagggcccggaggaagcttttctaccgtcctccttcctcaggaagaacgcggctgggtggaagacaccggggcagtgggagcaggtgggcggagctgttcgggcccctattgcgcactgaagcctcatgaaatggggatgggagatcaaagtttggggtgcctcgaatgagccagctttttcaagcctagaagcctcactctgtcgctgcccttttcaggccaagagcactgccttttcccagcaggagcgccggttttctcatgatccccagccccacgcaccatgctgcacctcgtcacttgtgccaaatgacagtgcagtacagtgtggcgtcagtgacaatcagatgcctattcccgtgccctcggggtgggggctgcagagcttgatcagagagtgcctctggggagaccccttgatcggcctgagggccacttgttccattcagggccctcgctgagcgtgtctgttaattcacagggctttgagagaaaaccagcagactagttctttcctactccctgccacccacaacacccacagccccaccaggctgagcctgggaaccgtgtgcagccatcctccctggcaaggctggggagaacaggcagccgctgctgtgtatcagatctcatacttgctgacacagacctgatggctcctcttgccgctaccccattttcccccagcagaacctggctaaaaggggccctgaagcactagcaggccccctacctccagaataggacccaagctttggccacaactagtttctctttctgtttgtaatcagca

SEQ ID NO: 37076 - DNA, 1195 bp, Artificial sequence
  DNA replication origin
gttgctcaagcacctaaagaactctggtcaggctggaggcaggcgctccaccccctgcgcacagtgagggcacagggccattctgttttgtttcttttgggcagaagggacaaacgtcagggagagggctgcagcgggcagcagcagaggactgaagctggcttgcactgcagtttttaaccctttccagcttgggcactctggggactggccagtgggtggcaggcagcccttgctgcatgcggggtttgggggtggggaggagatgcggggactggcttctcctgcactggtgtgctgggcatcagccaggcatagtgatcctatggggcaggagcggggctggggggttggggaggctgaatcccaacatttagctttagcagccaaaagacacattttccctggtttttgttgatgctgtgaagaaggcaccaccatcccgggaccatggtgggtctgttccccttcctttcacaatcagggaaaggggctccaagtctatagcatgttctagtctcgagtctgagagcctcagaaatagaagcagactattatgtgaatttgcagtattctacggagaggttccagaagctaggaacaaaccactgcctgcctcccctacccccatccccgtcccaaatattaacaatcactgatctaaaaaagttagaaaaaaaaaaaaaaaacctaacggaagaagaacttgcaagccccaaataggcagaatgggaggggtaatcaaaatgatgatcacagaggggagagggcttagggagggggaaagaggaagggagaaaacggcacacatgcacattctggaaaagtccaaagtgtaaaggggaggtggggaggccaaatgaagattcttctgcattgccttcaaaaaagacagggtggttgggcttctaaatgccaacctggtagccccaggcccatgagcctcttgatccacctgccccccacctcccaccatggacaaaaaagcctggagccatcccttaggtcctgacacctgaggaagaggcttagggaaagtgagaagggaggatgggcttctggttaccgagaccaggcaatgcccagggagggtcagggaaagaacagagaggagggcagcagtgtggggaggtggctgccatcccatctgcttttcattctttcccctggcctagaatggaaaaagcgagccagg

SEQ ID NO: 37077 - DNA, 1126 bp, Artificial sequence
  DNA replication origin
acatggctcttgccctcccactgggcccattttggcacctggtgctcctctacccccaagccctccaaaaacagatgtccggcagcctattcccagagggtgtgggctggggtgaggcggtggacagtttgctaatggggacagggtgaaaagcagaccgtttatgttgcacaaggccagagttgggagatgggtggcaggtgcattgggagggacatgcacagctgggaagctgtggccctgagcctctgggccctggggacatggcaagagtctctttggggaggctggcacctccctgtgctgaggccttgttgttcttggggagggcaggtagtgagtgggtcatggggcaccccgagctcatgatcactaaaccaggccatcttctggctttcctcaggggtctccatagccacccagggccaaaattttgaagctgcaaaggtgactctgtgatgcgggttgaggggagaaaggagagaaggcaagtccgttcctgcctcccaccgcagaagctgggcctttagtacttgttacacagccggttgaacctgacagcagagctgggggctgggtagctggtggggagcagaggcccattctctggatcgctactctggtctactgtgtgctggcccctggctatggagataaaccaagagttgctctctgtcctcgggcagctcagtatgggcgggtaggcaggcacggatctgtaattacacaatagttcctgtagctgacccttctggggttttggaggggttagaaaaatgaattagatgggatccagggatttcttctagcttgctgagagagagatgtttgtttagccagcaaaagtttgcggaggacctactacgttctaggcaggcattaaggctatagcagggaccaacaaaaccaagtcccaaactcaatggaactcacatctagtaacaggagatacaacaggtgaagacataagaaaataatttcagacagcgagaaaggttatgaagaaaataaagtgatgtgaaggagagtaaaggaaggctgtgtacttgagatgggggtcagggaaggcctccccgaggggacatctgagctaagggacgggaaggagctgcccatgcaaagcact

SEQ ID NO: 37078 - DNA, 982 bp, Artificial sequence
  DNA replication origin
ctctctcctcagtgctcagggcaaagcccttccaaccttcattcaacagttattgaacatcaacactgtgctaggtgaagctatttttctggccagccagtgaagacagtggggaaaatggtctgacagctgtccttagatgattctacatttctgtttggtccctggctttgacttctcccttgaaatgatgaaatgaaccaaagtcatggagtgaatgagagccgaaaggattctttgtctgagtgtgttagccagggttggctggctgggacgaggaggggaggctgcagaatgcctctggccggcctgaagaggaaatgcaggcatccactcccttctgactggcagccctgttccttgccgtgggtgctaccagcttccaaaggagctgagccactgcgtgtggtgagcgtgggggtggtcggcagcagaacatggctgacggacagtgcgtggggttgatggggggatggaaagcgaggggacggctgccaagccaggaggatgaggagctagcagtgctgagtgggaaggccacagctggggccgcatcaggggcagggagaaaagcacatggctcttgccctcccactgggcccattttggcacctggtgctcctctacccccaagccctccaaaaacagatgtccggcagcctattcccagagggtgtgggctggggtgaggcggtggacagtttgctaatggggacagggtgaaaagcagaccgtttatgttgcacaaggccagagttgggagatgggtggcaggtgcattgggagggacatgcacagctgggaagctgtggccctgagcctctgggccctggggacatggcaagagtctctttggggaggctggcacctccctgtgctgaggccttgttgttcttggggagggcaggtagtgagtgggtcatggggcaccccgagctcatgatcactaaaccaggccatcttctggctttcctcaggggtc

SEQ ID NO: 37079 - DNA, 1158 bp, Artificial sequence
  DNA replication origin
actggacacagcttcagagccagctttgaggagaggctcttccacctctgggccaaaggagtcagtgctggggttggtgtgtatgtgtgttggaggggggcaggccagaaactgagacaggaggagaggagccaaatcaggtagtcactgtattttattggaaaacattgatatatatttttcttcacagcttgaactgaacacaatattgcccggtttaaaaaaaacaaaaccaaaacattccgaaaatgtccacagcctcacgcctacctgcccttaccctcagctcttggctgggtctcccactatgccccatccctccttccctcagaggctgggtgccagagggtggatgagaagagattctcaaagctgggcaggtcccaggaaaagccacttgatcgacctgggcagtgaggggaagcagggggtggggggtggggtggggaggtggtggggggagccagatgaaatgaacagaaaaggggaaaaaacccagacgactgaactgcccacattgacttacttgtcccagaggcgaaagtcagaagcaagggcacggatcatgctctccgctgggggagtatgggggcaggcaggtgggcgagggaagaggcagggaagagggcacggagcacagatgtgaggaagcggcgccaagtcaccacggagaagcgggaggtgctggcggaccaggacgcagaggctgctgtagctgccgtcccctgggcagctggccgacaagactgttttattgcaggtgcgttctcttgagagcgtggtggggcccatcttccctctccccaccctttagctagcccagcatggttctgaacaaaatgaaagtcttaagggccatagaggggaaagaaaaaaaaagagaaccagcacattacaaagcgaccatccccacatccattcctaggacgggccctcagggcggtgggtgcatcgtgaggagggagcggcatgggatgttagcaccaggtatttacagaacagctcgagagcgcttcaggaacgcgggcaagtccaatttgcagagtggccaaatgagcagtccccacccagccaaacctcagaaagccaatcagatggtttcagaacagcagccagtgggatgtgagtgttgcccactgtcagtccccttctgtgagt

SEQ ID NO: 37080 - DNA, 853 bp, Artificial sequence
  DNA replication origin
aaccccgtctctactaaaatacaaaagaaattagtggggcgtggcgcctgtgatcccagctattcaggaggctgaggcaggagaattgcttgaacctgggaggcggaagttgcagtgagccgagatggcgccactgcattccagcctaggctgggggggaagggggggcatgggggggtagggggaggcgaaaagagagagagtttggcatcccagcactttgggaggttgaggcaggcggaggtcatttgaggtcaggaattagagaccagcctggctaacatggtgaaaccccgtttctaccaaaatacaaaaattagccgggcatggtggcatgaccctgtaatcccagctactcgggaggctgaggcaggagaatcacttgaacctgggaggcagaggttgcagtgaaccgagatcatgccattgcactccagcctgggagacaagagtgagactccatctcaaaaaaaaaaaaaaaaaaaaaaaaaaaaaaaaagtttggcacaacccaagttggtggatatttgtatcgtcttcctttacagattattatcctttgccattttgcagacttgtaaatggaggccaagggaagttaaatcgctgctccaagtttattgaagtggcagaggtggccccttgggacttagtgagcacgaagactcactcttgtgagtgagtctcaacctgggatttgagcccaatcctgtgggaaaccacagcccatctttgactcaactactagaccagaatttttctcaggtacccttactgctaagggggcagctcccatttcagaccccaccactgggacgccagcctcagcctggcctccccactggctctggct

SEQ ID NO: 37081 - DNA, 928 bp, Artificial sequence
  DNA replication origin
gagcccggccgtgttcgtggcctatgcgcgcaacagctccctgctgggcctggcccgaggcggccccgccctgtgcgatgccttcgccttcgccatgaccttcttcggcctggcgtccatgctcatcctctttgccatggccgtggagcgctgcctggcgctgagccacccctacctctacgcgcagctggacgggccccgctgcgcccgcctggcgctgccagccatctacgccttctgcgtcctcttctgcgcgctgcccctgctgggcctgggccaacaccagcagtactgccccggcagctggtgcttcctccgcatgcgctgggcccagccgggcggcgccgccttctcgctggcctacgccggcctggtggccctgctggtggctgccatcttcctctgcaacggctcggtcaccctcagcctctgccgcatgtaccgccagcagaagcgccaccagggctctctgggtccacggccgcgcaccggagaggacgaggtggaccacctgatcctgctggccctcatgacagtggtcatggccgtgtgctccctgcctctcacggtgagtcccctccggagctgggaggagtggggagaggaggagggcagctctgtgggttgtgcccatgtcacagatggggagactgaggctcaaaagaggtgagacatcgtgggcatggtggctcacgcctgtaatcccagcatgtagaaaggccgaggcaggaccggatgcggtggctcacacctgtaatcccagcactttgggaggccgaggccggcggatcatttgaggtcaggagttcgagaccagtctggccaacatgatgaaaccctgtctctactaaaaatacaacaaataaataaataaaaagtagccggacgtagtggcacatgcctgaagtcccagctacttgggaggctg

SEQ ID NO: 37082 - DNA, 963 bp, Artificial sequence
  DNA replication origin
caagctgaggagggtgggaaggagggagggacggagggaggagggaaggagaagctgacacacagaccgacacaggcagcgagagacacgaggagcaaagcaagtgaaggcacagacgcacgggacaggagagcctgggcaagactggagaggtgcggtgaggggctggggatgcagcaacacagagcaggagcaggtagagggtgtggggttagagggagaaaggtacggggaggacaaggacaagggaggggacagagacagggagatatcagcaagagaccgagagacagggagggaaagaactggcaatgcccggatgttctctgtctctttaatggcagaaacagagctagagaaggaaagaaacaggaggtggtgggggggtggtgggtgtcaggcatggtggctcacacctgtaatctcagcactttgggaagccaaggtggatggatcacctgaggtcaggagttcgagaccagcctgaccaacatggtggaaccccgtctctactgaaaatacaaaaattagctgggcgtggtagtggacgcctgtaatctcatctactccagaggctggggcaggagaatcgcttgaacccaggaggtggaggttgcagtgagccgagatcatgccattgctctccatcctggacaacagagtgagactctgtctcaaaagaaacgaaagaaaagaaagagagaaagagaaacaggaaggtggggagagacagagagagatactggagaagccagaggggagaggactgcatacccgcacacacaggagaactgggggttggctgggaggccccagctgccaaaaggactggccagcagggacatctgagtgggctgggtggtgggggtagccctggctccctctgaccccccaccttgggaaccctccagcccagacctgggatggcggattcgtgcaggaacctcacctacgtgcggggct

SEQ ID NO: 37083 - DNA, 1882 bp, Artificial sequence
  DNA replication origin
ccacatgtacaggcacccccagagcagggctggggggtcccttagggagccacggtggggctggaacttgggcgtccatcctgctggaagctgcgggtgccagctgggcaagggtgatagggagatgggggggaggggcaaaggggttgtggtcacacaccggggtacagagggcaagacggcagctgcccacagtccagtccttgggttggacacatccctcctggccttggacaagagacacccgcacagcctctctccttgttacaaagaccaatctgggatgtgctgcaggccgaggctggccaccaggtccctgaggcccgtgttaccccacgcacagagaaggaggctgaagtctaccagctccctctcctcacctgggaccatctcgcagcaagaaaaaaggtggtcagatggaaacaggaagccaagtcgaatggatctgagaccgtccccctgagaaacagcggggctcagagagggtctctgaggttttatctggcccttttgggctgggaggctgcctgggaagccaccgactccgtgggaagggagacccgtgaacgctgtgcgggtagcgggaacatgtgggtctgtcacactggcccgaggctgcagcggtggtggcttggctgtgtttggggagggtgggggacacatggcagcaatgttggagctgtggacagcttcctgtgatcaaaatatgattcctgaaggtcaaggtcaccagagcttggcctggggcctaggggtgctgtgcgagaagtcggacggtggcccagtgctacctttccatcatgggccatggaagtctcccaagcctgtccctgacaactggacaccaaatacaccccttcatgctttcttctcgggtctctgcagggtgagctgggtgcccagggacaggctcgagggactggcatgtctctctctggccaagcctccttcctcagctttctggaaggagtgaattgtgtccagggaccagaactctcagtggtgtctggaaaacactacatcagagaggaatttcctggtcatttctcaatccctgggcaatgtcctcagccccggggcctggagcccagaatagatcccagaggccaccctgagacagcccaggccaagaccaccccactgaagcctggtcaactgtgctcttcaggtccctcctagaggccccctactaccccgggaggctccaagcctaagtgatggtgactcaggaattccccacccaggccagagagggagacactgggggagggaggagacctgtgtgtggggaggtggcaggtggctcagtgatgggaaccaagagaggatgtggggaggagagtggaggcagcgatgggagatggatgtcctggattgggcgggtggacggggagtggggagtgtgccagggggccctctggagaacagtgagggagggcggggcagagagaggaaatgaaaaagctggggtgagcaggcaagctgaggagggtgggaaggagggagggacggagggaggagggaaggagaagctgacacacagaccgacacaggcagcgagagacacgaggagcaaagcaagtgaaggcacagacgcacgggacaggagagcctgggcaagactggagaggtgcggtgaggggctggggatgcagcaacacagagcaggagcaggtagagggtgtggggttagagggagaaaggtacggggaggacaaggacaagggaggggacagagacagggagatatcagcaagagaccgagagacagggagggaaagaactggcaatgcccggatgttctctgtctctttaatggcagaaacagagctagagaaggaaagaaacaggaggtggtgggggggtggtgggtgtcaggcat

SEQ ID NO: 37084 - DNA, 1276 bp, Artificial sequence
  DNA replication origin
ttgttcctgtccccttcatctgtccctccctccaccagcccctggccaccccattcacgcgcccttccaccctcgcacctgttaccggggcccgccctctcgcccccacctcgggacccagacgtatcctaacctacccccacagcccccactcccgcgcgtcttttaaccccttccccgccgcaaccatgtccaacaacatggccaagattgccgaggcccgcaagacggtggaacagctgaagctggaggtgaacatcgaccgcatgaaggtgctgggtcggggtggggaatagggcgggggttctgggcctgcggtctgtccggggctgtgtcggcccggctcggagccatagtgcaaggatgcccctgggaacagggctgggcaaggggcggggcagggcaggaggaggggccaggacgaggggaggggcagaacaggggaggggccaggacgaggggagggatggggcaggggaggggccaggacgaggggcggggtaggacaggggaggggccaggacgagggggcggagtaagacaaggggaaaggcctgtatggggcggggcaaggtgggaggaggggacagggcaagaggcggggcctaagtgggcggctccaaggagccgggcagggcggtgacatctccacccgggtgctcgcaggtgtcgcaggcagcagcggaactcctggctttctgcgagacgcatgccaaagatgacccgctggtgacgccagtacccgccgcggagaaccccttccgcgacaagcgcctcttttgtgttctgctctgagccctccggacagcttaccctcccctgccaaagtatggatccaataaacttggtaactgtggtggtgcctgtgctttcagggagactgaggcacgcacagagcttggggccaccgtaggggaagctgtgtccgttctcattccttctgagtgtgtgtgttgggggtaggggtggacgtggagggagtacgactccaccaaagcttcggaggagatgagtattcggtgctctctcctccacggtcgatcctgaacttaatggtcccgacagccccagaagacagctaactacttgtatgatacccaagaggaaactgagccaaaggaagtcctttattcagagtcacaaagctaggcggtaacagagcgctgacgggggtactccagtgctccctgaacccctccgccatcctctctcctctcctccccactggcttggacattcttagggtccccagtccccatcccacacttctcacccc

SEQ ID NO: 37085 - DNA, 1408 bp, Artificial sequence
  DNA replication origin
ctccgcggcgggtactggcgtcaccagcgggtcatctttggcatgcgtctcgcagaaagccaggagttccgctgctgcctgcgacacctgcgagcacccgggtggagatgtcaccgccctgcccggctccttggagccgcccacttaggccccgcctcttgccctgtcccctcctcccaccttgccccgccccatacaggcctttccccttgtcttactccgccccctcgtcctggcccctcccctgtcctaccccgcccctcgtcctggcccctcccctgccccatccctcccctcgtcctggcccctcccctgttctgcccctcccctcgtcctggcccctcctcctgccctgccccgccccttgcccagccctgttcccaggggcatccttgcactatggctccgagccgggccgacacagccccggacagaccgcaggcccagaacccccgccctattccccaccccgacccagcaccttcatgcggtcgatgttcacctccagcttcagctgttccaccgtcttgcgggcctcggcaatcttggccatgttgttggacatggttgcggcggggaaggggttaaaagacgcgcgggagtgggggctgtgggggtaggttaggatacgtctgggtcccgaggtgggggcgagagggcgggccccggtaacaggtgcgagggtggaagggcgcgtgaatggggtggccaggggctggtggagggagggacagatgaaggggacaggaacaagaggagcgatggaggggtgcacggatggaggtagctaaggcaggtggggagagagcagggaggggcgagggagggaaggaggggcgcacagatgggaggctgagacagaaggacagggccacaggtgctggatcagaatccaggtgtcctcacccccgggggcagagcgagagccaggaggggggcccctcccccaggccaattagcagtggctccagggagaactgggaattaagatcgcggcgggaggggcacagagggggcctcattagggccttggcagcagctgccctctccgccaccctcagggagcccccccaccctagccctggtcacctcaaagcctcctctgctcattagcagccagggcagagggctgggggagcccaactcgggcacctgaggagaggcctatcggatggacagagggacaacgggacgcgcagaggcagagacagagtaatggagggagagactgaggcacgggagaaatgaagagacggggaggaatagagagagggagagactgggggaggaatgaagtgatggaggagaaaatagagggacaaatgaaggggggagcaaggaacagggtgatacaaggcgacaggcaccgaggggacaaagggacagaggggacagagcaggggagatg

SEQ ID NO: 37086 - DNA, 843 bp, Artificial sequence
  DNA replication origin
cctgaggagaggcctatcggatggacagagggacaacgggacgcgcagaggcagagacagagtaatggagggagagactgaggcacgggagaaatgaagagacggggaggaatagagagagggagagactgggggaggaatgaagtgatggaggagaaaatagagggacaaatgaaggggggagcaaggaacagggtgatacaaggcgacaggcaccgaggggacaaagggacagaggggacagagcaggggagatggagggagggggtgtggggtgggagaggatggggagatggagggagggggtgtggggtgggagaggatggaggagatggacggatggggtgggagaggatggggagatggagggagggggtgtggggtgggagaggatggggagatggagggagggggtgtggggtgggagaggatggggagatggagggagggggtgtggggtgggagaggatggaggagatggagggagggggtgtggggtgggagaggatggaggagatggacggatggggtgggagaggatggggtgatggagggagggacgaaggagagagaaggggaaatggaggaaggggggagggaggaaggagcagagacaccaaggagataaaggaacagagacggggagatagagggacagaggaaagaagggaaggacaaagagggagatggaggggttggggagagatggaaacagaaagtgggagagaggaacaaggcgagagacaggctgatggagacgcagaagaattcattcactcactcattcactcattcactcattcattcccaggcggagagacggtggccacggagcaggcaaag

SEQ ID NO: 37087 - DNA, 967 bp, Artificial sequence
  DNA replication origin
tggttgtcactggacaggcgactgggtgttactatgaaatactataaaacagtgtgtacttgacaggttgtattgggtaattgcatgccaccgtgagacacagaaagtgtgagactgggacagggtgtgagattgagagagtttaaatggcatgcaaggccaggcgcggtggctcacgcctgtaatcccagcactttgggaggccgaggcgggtggatgacctgaggtcaggagttcaagaccagcctggccaacattgtgagaccctgtctctacgaaaaatacaaaaatcagacgggcgtggtgtcaggcacctgtaatcccagctactcaggaggctgaggcaggagaatggcttgaacccaggaggcggaggttgcagtgagctgagattgggccactgcactccagcctgggcaacacagcgagacttcatctcaaaaaaaaaaaaaaaaaaaggcatgcaaatgtgtgtgacatttggagacattatgtgtgacactgtggtacatttggtgctctgagataatttatctgactgtgtagcgcttggagctgccattggtggcggctgtgtgtggcatttggggcaaccgtgtgaggttgtgttgagcaaggtcattcgtgaggttgtgtggtgctaccgtgtgacagggcaagatagtttttgtctgtgtgagggacagtgagcatgaggctggaggggggtggtgacaccgaggtggcgagtgtggctgagtgagcggctctgtgggacacactggagaggtttgttgtgactgtggattaaatgtagcgaggcccggggcccacctagagagactgtgttttctagtgagtgtgagagaggcacagagagagtcacacaataggacagcagcggcagagacacagggagagggacaaagataggactgacagacaagagagagggcccagagagggagccccaaggtggcggggcggc

SEQ ID NO: 37088 - DNA, 1249 bp, Artificial sequence
  DNA replication origin
ctctttgtctctctggccgcctctgcctccatctctgtgtgtctgcgtcttcgtccctgtctctgagtttcggcttgggtgtctctctcctaccccggtctctctgtgtcctgtctgtctctgcctctcctgtccctctctccgcagcgccctccccgtctctgtctctctgagtccctagctcgctccttctctaaatctgtgtccctatagccccctgcgtctctctgactctccctgcatctccctcccctgtctgtgaatttctctgtgtccatcttctgtcctctccctccggtccctggctccctgccgtgcttcctctggtcccgagtctccccttcatctcccgcctggccctcctccctgtggccacctcctccctgcggcctctcggggcagggtgggcgcctgggcgtgctgcgcgcgccctcatgtggccggcagacgctgcgtgtgagcgccaaaaggggagtgctggggagcgggggacgctggtgttcgcggtgacactgggaaatggcgtgtgacacctggaggctgtgtgagtgtgtactgccgggagacggcgtgagacatctggagagtgtgtgagtgtgtactgccgtgatggtgtgtgactccaggagatctgtgagtgtgtactgctgtgagatggtgtacgacgccaggaaactgtgtgagtgtcgactgccgtgagatggtgtgcagtgccaggaccaggacaccatgagtgtgtactgccatgatggtgtactggtgagatggtgtgtggtgctgggagtctgtgtgtgactgattgatatgagattatgtgcgacaaggagagactgagtgggactgcatatgtcagagatgacatgtcgctgactgtgtgtgacactgagattactggtgatgctgagagattgtgggtgactgtgtgtgctgatgaaaggttatgtgtgatcgggtgtgggagagacactctttggggctctgtatgggacattgagagaccgtatgtgggagtgagagaccgtgtgtgacggtgcgtgtgagggggcagtgtgtgtggctgtgtgcaacatggtgagcatacggtgctgtgtgtgtcacacaagtagattctgtgtgagagagagtgagactgatgactgatgtacactgagaggtggtgtgggcaggtgtcatgagaggcacatagggggcctgggtgggacagacacagtgagtgtcagtctgtgttggccactctgtgtatggcttg

SEQ ID NO: 37089 - DNA, 834 bp, Artificial sequence
  DNA replication origin
cactcagtctctccttgtcgcacataatctcatatcaatcagtcacacacagactcccagcaccacacaccatctcaccagtacaccatcatggcagtacacactcatggtgtcctggtcctggcactgcacaccatctcacggcagtcgacactcacacagtttcctggcgtcgtacaccatctcacagcagtacacactcacagatctcctggagtcacacaccatcacggcagtacacactcacacactctccagatgtctcacgccgtctcccggcagtacacactcacacagcctccaggtgtcacacgccatttcccagtgtcaccgcgaacaccagcgtcccccgctccccagcactccccttttggcgctcacacgcagcgtctgccggccacatgagggcgcgcgcagcacgcccaggcgcccaccctgccccgagaggccgcagggaggaggtggccacagggaggagggccaggcgggagatgaaggggagactcgggaccagaggaagcacggcagggagccagggaccggagggagaggacagaagatggacacagagaaattcacagacaggggagggagatgcagggagagtcagagagacgcagggggctatagggacacagatttagagaaggagcgagctagggactcagagagacagagacggggagggcgctgcggagagagggacaggagaggcagagacagacaggacacagagagaccggggtaggagagagacacccaagccgaaactcagagacagggacgaagacgcagacacacagagatggaggcagaggcggccagagagacaaa

SEQ ID NO: 37090 - DNA, 1466 bp, Artificial sequence
  DNA replication origin
ccgccactgacccgcggccgcagcgtggagcagtcaccaccccgggagcgtccccgggccgccggccgccgtggacgcatggccgaggcttcgggccgccgcggctcgcccagggcccgcaaggcctcgcgctcccagtctgagaccagcctgctgggccgcgcctccgcggtcccttcggggccccctaagtaccccacggcggagcgggaagagcctcggcctccacggccacgccgcggcccagcgcccacgctggcggcccaggccgcagggtcctgccgtcgctggcgctccactgcggagatcgacgctgccgatgggcgccgcgtgcggccccgagcccctgcggcgcgtgttcccggccccggcccgtccccgtcagctccccagcgtcgtctgctttacggctgcgcgggcagcgactccgagtgctcggctgggcgcctggggcccctgggacgccgggggcctgcgggaggcgtcggcgggggttacggggagagcgaatcgagcgccagcgagggagaatcgcctgccttcagctctgcctccagcgactcagacggcagcggtggcctcgtgtggccgcagcagctggtggcggccaccgcggcctctgggggtggagcaggtgcaggggcgcccgcaggccccgccaaagtcttcgtgaaaatcaaagcttcccacgcgctcaagaaaaagatactgcgtttccgttcgggttctctcaaggtcatgactacagtgtgagtttggggatttgcttgggctcccccttcatggcctctgcacctccacactcccaaccactgacccttccacatctaccttccaaagaccatcgttttctctgcttccaaagacccccctcactctccccactcctaacagtcttggttgaaaaggctcccccaccaccaccgagaggaatggggaggagccctgtttgacccagttcagcttctagcttggaagcccttgggcaagacagttccccttctctgggcgtcactttcctcatctgtacagtaagtgtccatgtatgcaaaaggggtaattcggtttgaatttccccgttttagtttagaagcctagtctgtttgttcccctccaccgctctccctctcattcctgatgagccctctcattcctcctttccttgcccagctatggccccctctcattcacaaagtgccccctccatgtccctggacccttaagatatccccttggcaccctggtcagagactctgtgtctgactcaggtggtccctgcagagtgccctgggaagggaaggagcactgatttgggggttttgagggtcaagtaggggttggtaacacctggaaagaaggactctttcacttcgatccctggacaattatggaggattcggaggtagaagaggggaaggaagatggtttctatctcatgacccccactccctgtgagagggaatggg

SEQ ID NO: 37091 - DNA, 1572 bp, Artificial sequence
  DNA replication origin
ccactatcagctcgtgccgggaggacagagggctgagggggaggaggggacagagggaccgaggagagggagactgaagggcagagatggggaaggtgaagggtgaaaaggggagagaccgagggcagagggggagaggacacagctacccacagctaccccaacctcatgcctcgcattctccttgtcaggatggaaggcgccttccaagccgagccagcttggggtggggggagctagcgaaggcccccacaatccgtctctaactttgggagggggtggggcctcccacagctgtttctgtttccagaaaagaatgtgcaggggggtcccactcctgagagggggaggggccgggcgtgcagccccgggagcctggcttcagtcttcctccccactccccatctggggagggggcggtcgaggtcagcggcggggagagccccctccactgccacctcggctcaggtttcccgaaacgggaagctctggccacacacaggcttggggatggggatctgccgtggagccagggtgtgcgggctggggggaggggaagacagactgagcctgggacgtcgggcaagaagaagagagcgaggtgcagacaggcaggaagggaaggccaaggagacagatgcagagggacacagagatcacagagacagagagacaggatgaagaaagagaagcagacacagaaagtcacagggatgtggcaggacggagagagtgacagaacccaggacgagatcgggagactcaaggaatgacatagaaaggggagaggcatggggcgtcctcaagtcattccggagacctctgcccatcttccaccatgagaacacccagagtccagaagtctcccccaggcgctgcctcgacctgcctccccttgggtcaaggagagctggggccaggtaggaagcaggggaagtgtcaccaaagggtcaagatcccagtggggggtcctcagggactgtgagcttcctctcagcagtggtccctccctctggaggccctgagattcccctcctcccaccccgccccctccagagatctccaagcacaccaggacttagggaagatggagccctggtggcggggcccagagaagggcatgtttggagcctggctgtgtcaccttgggtgagtcgcttgctctctctgagcctcaatttgtttctctgttaaatggggactatcaccccgtttcccaagccgcaagaagacaacgcctgcaaagtacccggtctcgggtttgacacatacttggcgcccacaaggattttctttggggaaggggtgtaagagacagggcctgtgtttctcacgaggccccagtgggggcgatgcagttccccctcccccgatttgggggcggggaggccaggtccggcccgccgccggaactccggggtcgccagccccaccccctgtcctttctcactccctgcctacccgggtccccaacccccgcccggtgtctgagcatccaaccgagacagacagacacagacgggggtggagggacggacggacaggcagccccttaccagctgctcctccagg

SEQ ID NO: 37092 - DNA, 1065 bp, Artificial sequence
  DNA replication origin
tggtagaggcaggctcggcgtagtgatacagattggccgcctgagggtgccccagccctgcttgcggagcctggagagacagcaggaagccttggaaacgaatgtcaggctcagactcctaggaccagagaacgttgagaatagagcatcatagaaggctgagaacaaagccccttagaacgtagaacaaaggcccctggaatggaagaatgatgagcacacatcctcctagcacctgggagacaaaagctgcttagactctcttctggtcaaagcatagaatcttccacccagggtcttataattccagaatttggaatgcaatcgatcttagactcttagcagcaagaccggctacatatttggcctagtgcaaagtgaaaataaggggccccttgctcaaaaactaaaaatttcaagacagaaattgcagaacattcaaccaagcgcgaagacccttctaagtggattccaagccggtgaagccggccctaagtagaaacaatttcatcggaggacgtccgtctggttttacagctgagtgtctgggaaggcttcttggaagaggaggcgaagtcagggctcgaccccctaacccttttctccccctgcgcagcctcagaagctgaaggttgggcggggtggaggggtaggagcagctgccaaactgtcacgtgtacccattccctatttatagatcacccttcccctcgcgccggacagtccaatggtagccagcgctcgcccgcaagagggtggaacctgctgcaggaccggccaggcacagaccaatggcattgaagcaagggcgggcttgtttcattgtgacgcgtgggggggcgtggccagggccccgaggcagttgcacggagggggcgtggcgagcggagtgagtaggcagttgcgagcatgcgtcgtgttgggcggtgcggttgcacgcccgagagtcttcgtcaggaagcttattcgccaataggcggctgttgctcggtcgccgggggcgtggccatgcagataaggcgcgggtgggcggcccaatgggcgggcgcctatgcagatgagacg

SEQ ID NO: 37093 - DNA, 1779 bp, Artificial sequence
  DNA replication origin
gattcaaaccagcatccagctttctctggaataccatggagggtggtgtggtggggatgctggggtgggtgcggctccatcacctggtggagcctccatcccttgccctctgcaggtgaagctgtgtgactttggctttgctcgcatcatcggcgagaagtcgttccgccgctcagtggtgggcacgccggcctacctggcacccgaggtgctgctcaaccagggctacaaccgctcgctggacatgtggtcagtgggcgtgatcatgtacgtcagcctcagcggcaccttccctttcaacgaggatgaggacatcaatgaccagatccagaacgccgccttcatgtacccggccagcccctggagccacatctcagctggaggtgcctggggcccgcctaccccatgggcgggtgggttgtggggtggggctggagaagtgggcggagccatgagaggggggtggacccggaaacagcctggcaccttgggggtggagcccagtgctggggcgggcctactggagggatgtggctacaggaggagccgtcctgtaaaagatgggctgggactcaggcctagactaggttacttgggctggaaaccaagtgccccagaagcgctgaggacacttggaaccttaggggggctgagtgagacttggcttgtctagggtgggaccaggaaagggactggacttgagggtaccaaagggctgcggtgaccaggagaaggggctgagcctcccaaggcattggctgggacctggagcctttgggtttacgaccccaaaagggtcagccttgcaaaaaggaggcaccggtgggtagggttgagaaacaagggcatggctactttgctgtgtactggggccgtgacttgggtgaagatgggcctgaagcctggggtcggttcagtgaccaagggagccagtctagggacgtggccgtggagggtttccgaagaggtccaggaacagggctgaccctgagtcctggaagctgggagtggatgggagtggggaggagaagggagccaggactgaggcagacattgcactctgcattctggggctttggtgttgtggctgggcctgatgaagtggcaccgggcctggtgacttgaacctacttgggaatgggtctgtaactttccctgcttggaaaagttaagtcctaaggcctggagctttgaggctgggtgtgggatggcatgtttagagggccagaggcagggctaagatactggggtgtgtcagaagccaggagaacaagggacctgtgttggagccagggagctcaggaagacagatggagtatgggaaggggggggatcattcattcatttatttataaccatttattcaacaagtacattcatgtatttgtaaccattgattcaacatgttgagtgcccacgatgtgccaggcattgactgttccagctctgggaatactgtgatgacttggacagaaggggtcaggtgcagggtagctcattgagtggtccgcgaagggtggaaaggggaagggtcctctctggagggtgcggcttcatggagcaggtggagcagggtgacacggaggttgctcggtgcaggacaagacaaggtcttggtggtggtctaagagcatgggccctaagcagtgagaatgtggattgacttgagtcctggagtaatattgggggtgctcaacactggctttttttttttttttgaggtggggtctcgctctttcacccacgctggagtgcagtggcgtgatctcggctcactgc

SEQ ID NO: 37094 - DNA, 805 bp, Artificial sequence
  DNA replication origin
gagcaagggaggggcaggatcaggtgtgtacgttaggaaaatcccgcaggctgccatctggagggtgggtggaaagggaagtgattgtagccaggaggctgagtggggatctgggtgggagagaggggttaggccaggataggactggagaatgtgagagggggtatggatttaaaagatacagatgtgcagagctctccccatttctccaagctccccctcctccctcctgcaaccctgggcctccaccagaatttcaggatgtaaagatccttctgggccgggcatggtggctcacgcctgtaatcccagcactttgggaggctgaggtgggaggatcacttgaggccagaagtttgagaccagcctggccaacatggcgaaaccccatctctatatttaaatagaaagaaaaaaaagatccttctgggcacctggcaggtggggtggaggtgggcctgttctgtcttggcctgtgggaagcccccttccctctccaagtgccaataccccagggacatccttctccttgtttgtcatcctcctgctcctatacctgacccgttggggtctgagtttgtgggttacctgggccctgaccccgctccccaccctgcagagcctgcggcatcccgggatcgtgaacctggagtgcatgttcgagacgcctgagaaagtgtttgtggtgatggagaagctgcatggggacatgttggagatgatcctgtccagtgagaagggccggctgcctgagcgcctcaccaagttcctcatcacccaggtgcgtctgccctgcccgctgcca

SEQ ID NO: 37095 - DNA, 1220 bp, Artificial sequence
  DNA replication origin
actcaggaggctgaggcacgagaatcgcttgaacccgggaggcagaggttgcagtgagccgagatcgcaccactgcattccagcctgggtgacagagcgagcctcttaaaaacaaacaaaaagcaactcccgggtgtgtgttggggggaaaatgtcaaaacaaaccaaacaaacaaaaacagtccccaactccctagtttcccagagatgccccctgcattcccaagcagcatggtcactttctgcatgtgacttctcaccccttcctcttccttcgcagctccctggggtacatccccctaatgagggtggtgcaatcggtgcgacacacgacgcggaaatccagcaccacgctgcgggagggttgggtggttcattacagcaacaaggacacgctggtgagtggccggggcggggccgggtacggcggagcgaaggctggaagaggggcggctcagcttgagtaggcggggctaggtgggtggggctggagctaggcgcgagcggggccagtagtgggctgggccgtgctggaggcggggctagaattagaagtgtgggctgtaagggtgggactacgggcaggagttagggaagacccggggctcagggcaaggtcaggggcggggctagagttaggggaggagcttggctggaggaagagggctaagtgggggcgagtctggggttagggcgtgggggctgggctagggttaaggctaggggcggggctggggttagggcgtgtggtggggtggggttacggcgtggggtaggtgctagagttacggcgtgcacgtggtgctccaggcacctggagccccaagcagctccacgggatagggactgggcaggaaagtctggcggttcacgtgactcttcaaacatctctgcagagaaagcggcactattggcgcctggactgcaagtgtatcacgctcttccagaacaacacgaccaacagatactataaggtaagcctccgggctttcagctccctcggacttcccgctgtgcccacaaactttcccacacctcctcctacccccagttactccagacagatcctgcaaatcacaccctctgcccacccccagcctccctgcttccagctcatcagcaagtgctgcccatccgattctggccccaccactttccagccagggggactccgggcaggttcccttacttctcagtgcctcacgcttctcacctgcaaa

SEQ ID NO: 37096 - DNA, 768 bp, Artificial sequence
  DNA replication origin
atggggtgatggcagggctacaagctgaaactggggacagagctttggggggagcctttgaggtgtcccttgttggagtgagaaaaggggtgtgggtgtgttcagggtctgggggacagatggggtgatggtggggctacaagctggaacttggggcagaactctaaggaggggtgggcctgaaggggctgatacacttacggatagtagtgccttttggaggagatcgtgctggcggggggtgatgggacaggaccaggtgagagattgggtggaaagggcacaacttctcaagaagagacctaggaggggcagacgccatgtctcttactctctggcgccccctgcaggctgcgggctgaactaccacaagcgctgtgccttcagcatccccaacaactgtagtggggcccgcaaacggcgcctgtcatccacgtctctggccagtggccactcggtgcgcctcggcacctccgagtccctgccctgcacggctgaagagctggtgaggagatgggggatgggacgggttggtggctaggggggtgacttggcccaggcatggggccaacgcactgatgtgtcccctccattcttgccaacgacagagccgtagcaccaccgaactcctgcctcgccgtcccccgtcatcctcttcctcctcttctgcctcatcgtatacgggccgccccattgagctggacaagatgctgctctccaaggtcaaggtgccgcacaccttcctcatccacagctatacacggccca

SEQ ID NO: 37097 - DNA, 1303 bp, Artificial sequence
  DNA replication origin
cttcagccgggggtacagggagatcctgtctctacaaaataaaataagacaataagaagtcatacttctgcctagtatggtacaatggacctgagtacaactgagaactctttttttttttttgaaactgagtctcgctgtattgcccaggctggagtgcagtggcgtgatctcagctcactacaacctctgcctcctgggttcaagtgattctcctgcctcagcctccggagtagctgggattacaggcgtgtgccactacacccggctaagttttgtatttttagtagagatggggttttgccatgttggccagtgtggtctcaaactcctgacctcaagtgatccgccggccttggcctcccaaagtgctgggattacaggcgtgagccaccatgcgtggcccacactactaagatttaatcacactacttagggattgcctggattccaggtctacagaaaagagaaagtggggtacagggggtgagcagacctggagggatagtgaccttaggggtgggggtgaggagaggcattttcttttggaaagttggggttggggaaagagggggaaccaaaggggcctcagaaaaaggaaggtcagggttagaagggggaacaggtgtctctagggagatggacaggagttttggggaggactagaaggaggtgcttaccatagaggactggggctgggtcagagctttggcggggacttttgaggcatccattgttgcagtgggaaaaggtggggtgtgaggcgcgttcagggcctggggggcagatggggtgatgtcggggctacaagctggaactaggggtggagctttggagggaacctttgaggtatcccttgttggagtgggaaaattttgggtgtgaggcgtgttcagggtctgggggacagatggggtgatggcagggctacaagctgaaactggggacagagctttggggggagcctttgaggtgtcccttgttggagtgagaaaaggggtgtgggtgtgttcagggtctgggggacagatggggtgatggtggggctacaagctggaacttggggcagaactctaaggaggggtgggcctgaaggggctgatacacttacggatagtagtgccttttggaggagatcgtgctggcggggggtgatgggacaggaccaggtgagagattgggtggaaagggcacaacttctcaagaagagacctaggaggggcagacgccatgtctcttactctctggcgccccctgcaggctgcgggctgaactaccacaagcgctgtgccttcagcatccc

SEQ ID NO: 37098 - DNA, 1623 bp, Artificial sequence
  DNA replication origin
gtgcagccggtctccagaactgttgtcatcttgcgaaactgaagctccttgcccgttaaacaactccccaattcccgctctgtccctgcccagggcgtagggatatatgtgttttgttcaggggtggagctgggatttgaacccaggcagaatgtagtatgagagcaaatgaaggaaggaaggaaagatcacaccttgcggctgggagcactgtgagaaatcagggaacgtggggtctggaaaagctttggcctaccccgcctcaagcatccacccctattttccgcctacagcctcggccaccttcgaggacttccagatccgcccgcacgccctcacggtgcactcctatcgggcgcctgccttctgtgatcactgcggggagatgctcttcggcctagtgcgccagggcctcaagtgcgatggtgagagctaaagggttgggggcggggcctggggcggggctctgcaccgggggcggagcgtaatggtcctggcacggggacagcgtggggaggaggagcgggtctcagagctgggggcgcagcctaggaagtaataatgggaagaaggatgggcccagaagcagagcttggggaaggagtggtggggctgggccggggctcaggtctaggggcggagcctaggaggtggagctgggagggacaagtaggggcttaagaacagagcctaggggagcagaagggtggcgggggaagagggtggggcctctatcagttagggatcaagcagagaaacatccaggaggagatatatattgagatatttatatgcaaggaatcagcttacagaattgtgtgggctggctaggcaactcaaatctggctgggcacagtgggggaggccagtaatcccagcactttgggaggcaaaggtaggtggatcacttgaggccaggagttcaagaccagcctgggcaacatagcaagactctgcctgtacaaaaaataattagccaagcatggtgacagacacttgtggtcccagccacttgggaggctgaggcgggaggatcacttgagcctgggagctcgacactgtagtgagccctgattgcaccactgcacaccagcctgggtgacagagcgagaccctggctcaaaaacaggaaaaaggccggacacggtggctcatgcctgtaatcccagcactttgggaggccgaggcgggtggatcacgaggtcaggagattgagaccctcctggctaacatggtgaaaccccgtctctactaaaaatacaaaaaattagccggacgtggtggcacacgcctgtagtcccagctacttgggaggctgaggcaggagaattgcttggacctgagaggaggaggttgcagtgagccgagattgtgccactgcactccagcctggtgatagagtgagactccttctgaaaacagaaacaaaaacaaaacaataaaaagaaaaagaaaaaaaaatccatcctatcaggaagggcaagtgggaactcaggcacaagctgaagctgatgtccacaggtggaatttcttcatccgaaaagtctctgatctgctttttaaaacattcagctgattgaatgagacccacctagaacaagcaggatcacctctcccacttac

SEQ ID NO: 37099 - DNA, 1030 bp, Artificial sequence
  DNA replication origin
cgggttcaagcaattctcctgcctcagcctcctgagtagctgggattacaggcacgcggcaccaggcctggctaatttttgtatttttagtagagacggggtttcatcatgttggccaggctggtttcgaacttctgacctcaagtgatccgcccacctgggcctcccaaagtgctgggattacagatgtgagccaccgggcaccgcctatccatgttcttttttgttgttggtggtggtatttttaattaaaaattttttaatttggtaaaatatacataacataaaaattactattttaggccgggtgcagtggctcacgcctgtaatcccaacactttgagagaccgaggcgggcagatcacctgaggtcgggagtttgagaccatcctggccaacatggtgaaactccgtctctactaaaaatacaaaaattagtcgggtgtggtggcgcatgcctgtaatcccagctactctggaggctgaggcaggagaactgcttgaacccgggaggcggacttgtggtgagccgagatctcactactgtactccagcctgggtgacagagtgaaactctctaacaaacacaaacaaaaaagcccacaacattttaagcacttttaagcgtacagttcagtaatttaaagttcacgcacactgttgtgcagccggtctccagaactgttgtcatcttgcgaaactgaagctccttgcccgttaaacaactccccaattcccgctctgtccctgcccagggcgtagggatatatgtgttttgttcaggggtggagctgggatttgaacccaggcagaatgtagtatgagagcaaatgaaggaaggaaggaaagatcacaccttgcggctgggagcactgtgagaaatcagggaacgtggggtctggaaaagctttggcctaccccgcctcaagcatccacccctattttccgcctacagcctcggccaccttcgaggacttccagatccgcccgcacgccctcacggtgcactcctatcgggcgcctgccttct

SEQ ID NO: 37100 - DNA, 952 bp, Artificial sequence
  DNA replication origin
tcccccttccagccaccaaacccacgccggcgccccctccccgtacaattggggcgctggcatcctgcccggctcgcgctggggttgggagggggcaggcaggaagcgagggcctgcggggtctctgcgtttccgggggaaacagccggccctgccctgggagggtcacagtccgcccgctgctgaaggcggctctgagcttttccgtcgccacatccctctcccgcccctcagttccctgagtgtggcttctacggcctttacgacaagatcctgcttttcaaacatgaccccacgtcggccaacctcctgcagctggtgcgctcgtccggagacatccaggagggcgacctggtggaggtggtgctgtcgggtgagaggtggtggccggcctgggggcggggcctcgggtgggggcggggcatctgggggaggagagggtagggggagttagaagtcaggagaggccgggtgtagtggctcacgcctgtgatcccagcactttgggaggctgagctggagctggggggatcgcttgagcccaggagttcgagatcagcctgggcaacatagtgagattccatctctacccctttctctccctctgaaaaaaaaaaataaggagagttgggggcttctggaagatggttacagagtggggtcatgaaggcgctctttagggactggtctaaactttcatttatggattaggatgctagtgacacgctttgtacagtttgaaaattcattgagctgtgcacttgtgatgtgcggcctttcctgaacatatgttatacttatttatttataaaactagtcaagtgcagtagttagaagggggaaaagaggagaagaaggagttggatctgtaactgactgtgttatgcttaaatataaaggtaaaaaatgggccagctgcagtggctcacacctgtaatcccagcagtttggg

SEQ ID NO: 37101 - DNA, 1150 bp, Artificial sequence
  DNA replication origin
ggatggtggggagaggggcaatggaggggggcaatgccccctatccctccatcacccaaagctcaggtctccttcctccctcttccgcacaccaggccccagacccctctgccagcgccccctccttcaacctctccccgagctggatccagggagcctgcgccctcaccttctggtccacgatggaacaggccagctgcttcacatgagccagctcggaggcggcgggcaacagcacgaactcgcgggtcagcccgatctggatgtgaaaggagaccccggaacccggggccgggatctggggcagtagcggtggcggcgactgcagctctaggccgccggggggcggaggagaccccggcccgggagagccagggagcccggcgggataagagggggcggtggccatggggggaggccggggaccggccgcctggagcccacccgggacccggccggggggccccgggggaccctgggttctagatccgcgggatctcgtgagcaggtggtgggagagcggggatccgagaaaagatctggcaggcggaggggacctgaggatggcggggtcctgggaaggagagaaaggcactatagtgggtcagaggcccggaatccagggctcccagaagatcagaaaggagaaaagtagtgggttggaggtcccagcgattgagattccaagaagcctgagaggaaatctagtaggtcggggtcacagggatcaggagagcccgcgattcaaaggccccttccctagaggagggattgagaagggggcagagggaatcccaggatccagtgctccaagaagaggatcccactcagaaggcggcccgggggaattcaccttgggggtggagggcaggagtctctgagtcggggaccgagtggattccagagataaaggggttcgcagggacccgaccggccaggggatgggcagaggggtcccgagggccggagtgggtagaagggaatctcacgagtcgcagaagttggagaaaagttcggtcgggagccgtgaggaagggggcgttgccggagcggggttgggtggggggcagggagggtcgccaggcgccagtagctctttttccccctccaaagtttaagtcggcggcggcggcggcggcccaggaggaag

SEQ ID NO: 37102 - DNA, 1245 bp, Artificial sequence
  DNA replication origin
gagcggggttgggtggggggcagggagggtcgccaggcgccagtagctctttttccccctccaaagtttaagtcggcggcggcggcggcggcccaggaggaagtgtccggagcgacagtgcagtcgaccaatcggcgcgggcctcggcgacgtcagagaggggcggagcctgccgaggggccgggggcggaaggggagggtgggcccggggcctccgagttgggggctggacctccgcctccagggtccgggacaagggatggtgtgagggatggagggcaggcaggcgagaccagttccttccctgaacacagccaagcctggaaagttaacttttccctcggctggacagggaggggaaacactatcacccaccgccggtcgcaggcgtcgggcttggaggccactggccctttaaggaggggagccctctccggcaggcgtccggcgcccatggcaggggacgggtgggaaatcggtatcaggtcccggcccgctctctgggttcggcctctctgttctccgagcgtcacccctgccctccccgccgcgtcccagcccagggaagggggtgctgcagagcgtcccccggccccagcccatttaacacatggaaagaccgaggcctccagatgggtaggaaggggctcgccttaggtctgtctccagcgatggtgggcaaggtgcatggcgctaactggatgggtggggagggtccatccccccgcccaccccaaccccgccttaggatagtgtggggctgccccgagggaggacagcacacccataccacttcatagatgcagagtgtgtctcctggggatgtggagtacgtgtgcgtgtctttctctccatgtgactttgggtgagtggcttctctgtgagcctcagtccctccatctgttgggactgtaataggactgaccccacatgggatggtgggagccgatgccatggtatactggtgcctggaaacgcagcagttcagtaagaggtggttgtctctgataatacgcggaaaggggtggccacctccagcactcaggctttgatgggtgggcacacccattcagtcacccagcaagtatctgtgaggacctactgggtgctgggtgggccctgctgtaaaactccagccgctacaggggtcaggcttgatctctcctccccagctaataatcaaatagtggctaccatttagtttacacagaataagctgaagcctcagagaagcaaaacgtcttg

SEQ ID NO: 37103 - DNA, 914 bp, Artificial sequence
  DNA replication origin
ccagccctgcccccgtcctgatactcaggcctgcccgcttctcggtcgagtggggtgcttaccgaaggcacaccctgggtgcctcgccagcagggagtggagcacacgtggtcgccaccctcaggaatctctggcttgttcactctcatcagcaattgtcagttaagcagaacaagtgaggccacgtaggtgatgctaagcacgatggagaccacgagggccaatatgtgctcctctgcagggggtgggcagggagggcctctgtgggcattaaatggagggtaagccacacgagtggctgggaggagaatgttctaggcagagggcacagtgaaccccgaggtccagaggcaggagagacgcagcctgcacagaagcagcacgaggccggcatggccgcaggcagtgaggcgtgggctgcggggaggttgtggtctcaggagtcagccactcagggccttgggctgggatagagtctgagtttgactcagggttgtgggaagccagtgctttcgagcagcggggtgacataatctgacgtacctgatccactctgagaaggagaggtgtgggagggtcacagaggaggcaggcggaccagttaggagatggctcgatgtctgggacagagctgatggactttagcggtggtgaggcgagaggtgtcagcttccccagaggctttcaggcagtcgacactgaaggactgcagctaaggggagaggaaaagaaacgagcgactccagggtttggtgtgagccattggagcagcatcccctgagacggggaagcctgggagtggaagttctgggggccgccgaggttgtgtgaagtgtgaggggcctgtttacccccatgtggagaagcagagctcgtctggagctgcggggcatttggcccctaaacataggtct

SEQ ID NO: 37104 - DNA, 2409 bp, Artificial sequence
  DNA replication origin
gggcgcgcaggccggccccggggcctccatgatggaggagcgagcggccgccgcggtcgccgccgccgcctcctcctgccgtccgctcggctcaggcgcgggccctggccccactggggcggccccggtctccgcccctgcccccgggccgggcccggcaggtaagggaggcggcggcggaggcagccccgggcccacggcgggcccggagcccctgagcctgccggggatcctgcactttatccagcacgagtgggcgcgcttcgaagccgagaaagcccgctgggaggccgagcgcgccgagttacaggtgagcgctgtcccgggacccccgacccccaacccggcccggcccggcccggcctcacccgctgccgccgccgccgccatcttggagcaatggccgccgggacggccggcgggggggcgggaggggaccgcgacggtcccggagggcgagtgaggggccgtccgaggggtgtcctgagggcactccggggtgggacgggaccgggacggcccgaggtgggagtggagggaccgggggtgggagggatcaccgggaccggccgagagaaaggggcggagggaccacaaccagctgggagtgggactgggactgggactgagcacgctggccgcggggctcctgagagaggcgactcgagccctggaggggaggctaagagaactcgggaaagggtgtggagaggagctggaggggtctgggagacctgagtggtctcctgtgggagtaagcagaagcttgccgggcgccgagggactcccgaccccgaccccgaccatggccctagccaggtgcaggttggaggtgggagcgtccaaggggggaacttgggacccgctgggaaagagcgggtccagatggggaaccgggaggatttagggagaggaagtcgggaacctgggatcggtgtgtttcggggcgactggacggtgggcacggaaggagggctgtgtaaggacccgaggggtgggaggagggtttcaaggggtccaggatgaaggtgtgtgccttcccctctgaggagaaactttggggatcccgggcatgtgtggctgcacagtgcagggaagggttctttggagtggaagtgtggacagagcagggaatgtaccctaggagcctggatgggagagcttaagagtggaagttccactttgggggtgtgcaggagtgggcgcgatggcactgagatggcacgtgtgttgtaggatgtaggtagagagccctgaactggagtgtggggtgttgggcatgtccagtatggaggtgagggtcctgggatggtgccaatgaggacgagttaggggttaccctggggtgatgctttaggggggagaattttgtagagcccgaaggcaacatgaggaggcatctcggaacgggggtagactggggttggggggaaggggatatgtttgtggaagtcttgggaaaagaccccgtggtttttggggtagcttgggacagggatgttgaatggaagagtctgaggagttgggctagggtttgtgacctcgtggagcgtcaggtccattggcagtgactggaggaccatggagatgtccggatttgaagggatcaggaatggcccgctggaagtctgaagattcttggactgggttattattagcagaaattgtcattacctgcttgtagcagcccacctttccccttccgatttgccgtttgctatctagtaggaagctggtacccaaataaatagctgatgagaattgtgtcggtagggatggggtgcggtggctcacgcctgtaatcccaacacttggggaggttgaggtgggagaatcccttgagcccaggagttcgaggccagcctggccaacatagcaagacctcatctctacaaaaaagtacaaaaattagccgggtgtggtgacatgcgcctgtagtcccagctactcaggaggctgaggtgggaggattgcttaaaccccggaggttgaggctgcggtgagccatgattgcaccactgcactccagcctgggcaaaagagtgagatcctgtctcaaaaaaaagcattttgttcataggatgagtaaagaccctccagtaactctccccctgccctcacttgtggtggctgaggcttggggctgggatgggagcagaatccttatgtaactgctctcacttctgtcccactctctacttccgaagctctttcccagcatacatctcatcagatcttcacaatgccctgtgatgtaggcagaggcagtgtcattacctcactcagcaataacggtaccagctgcaatttagtgagcacataccatgtctggggcgctgtatcaagtactgtagatacgagctgtcatttaattcttgcagcattctgggaggataaaggatattcccc

SEQ ID NO: 37105 - DNA, 2029 bp, Artificial sequence
  DNA replication origin
ggggcgcaagagtagaaacagggggcttgccttagaaatggtagtcagaggggacagttactctgagagtttacttgtctctccagtccccacaaaacaaggtaaatgaatccaaattctcttcaggccttgggttcactgggtctgagttgcgatttggcctgagcctcagtccctgcacctgtggaatgggaatgtgacggttagaaaaaaatgagagggctgggcgcggtggctcacgcctgtaattctagcattctgggaggccgaggcgggcggatcacgaggtcagaagttcgagaccagcctgccaacaaggtgaaaccccatctctattaaaaatacaaaaaattagccgggcgtggtggcaggtgcctgtaatcccagctactcgggaggctgaggcaggagaatcgcttgaaccagggaggtggaggttgcagtgagccatgaccgcgccactgcatttcagcccgggcaacagagcgacactccgtctcaaaaaagaaagaaagaaaaagaaaaaaatgagagacatgggaaagccttaaggaatgaggaagggcagtttccatgagagtgtaggtgacactgagggacttcttacctcctaggttgtaggctgggggagttccaggagggcagttccagcccagctgagctgcgctcctgagaggaggagaaccagaaaatcccaaatcagccatttccgtacaatagagcacaatttcatcttatccacaaaagtggcaagagaaaggtcagggaatcctttctcttgaagtcctataatctcgggcaccacctggggtgtctcaggagtggggtggggtgaatgggagggatgtcagttattatagcaacctataaccatccctctagcatgaatgtgtccagaaaaggtagggctagaagccaacagaagctgttaccatgacaaccccttccatagacacactctacctctgagagacattcttaaaacatcccctggccgggcgtgatggctcacacctgtaatcccagcactttgggaggccgaggcgggcctgaggcagatcacctgaggtcgggagttcaagaccagcgtgaccaacatggagaaaccccgtctttactaaaaataaaaaaaaaattagccgggcgtggtggcgcatgcctgtaatcccagctacttgggagggtgaggcaggagaacggcttgaaccggggaggcggaggttgtggtgagccgagattgggccattgcatcccagcctgggcaacaagagttacactctgtctcaaaaaaaaaaaaaaaaaaaaaaatcccctcctttgttgggcttggttcctagggtcactcgaagggggctgctctattatcatagtaaccaggccttgaacttgcctgtttctcaccttccggaggaaggtccaggccctgtaaccatagcaactgcccctcagcagagcatctcctctaaataaaaacacctggttagtttggtgcatgggcctcccacgatgggaaggggaagacggttaccatggtaatgccaactaggtggctatgggggaggggctggggaagaggtgcttctcttagagatcagtgtccttggggctggggtcctttctacctgaatgctaggtgggggggaggttgccatagtaatcaatgaggataggagcagaaggaccaccacggacacttaggttaccttagcaaccttctcctggtgcagagtcctaagaggtttggggctccataaccacaaaggtggaagcgaggggaaggctgctccccaccacctcgcccccaccgctggggaagggttaccatgacaaccaacctggccggcaatcagagaggatggggccactgctggtcgccctttctctcagagtaaaagtaattgtccaggagagtggtgtttgggtgtggaaggggtaaggctctttctctggggcgaagtgggaggaggggggcagaaagcggccccttcctcagtctcactccagcgagggggaccgtcgcgcggggcct

SEQ ID NO: 37106 - DNA, 1229 bp, Artificial sequence
  DNA replication origin
cccgccgagcgcgtccctcgcgctcagccttccagcgcgcgtgggccgtggccagcgggggctggcgcgccgcggcgaaggtcaagtccagcagctgcaccgcccagccgcgaagggcggtctgcagaaagaggctggtgcccaccggccgggccaggggcgccgagaggttgaagaggtcgcgggcgcgcaggagcaccacagcatctccgtccagggcgtcgcagcggggcgcggcgggggctgcgccatagcgggcggtccactctcgcaggctgacgttcagggccaggcacctggcagggttggccgtggcaaccggggcggccaccagacgtgcgcttcctgcgcggagcgcctccaccatgcgctccagcaggccaggtgcctcagcccgcgccccatcaggtactagggccacaaactcggtggccacgtaggtctccgggcgcgaggctgcggctggccggtccagggcgggctggagcagcgccagacgcacgttggggatgcggggcagggccaggggcgggtaggggagcgtgtcggctgccaccaccacgggctgggctgggtcttgctgcaggaaggagtctaccagctcgggcaccgcgttgtcaaatgcctcgaactcccgcaccaggacggtgacacgggggccggcagcagaggcacgacggggcccccgggcccgggaattcctaggctggtgctgcagccacgagacatagaagaggaccagaaggttgagggtgatggcggccgccagggcagcctggcagcgggtgagccgcatggggccgaagtctggggctagctgggcctccggggcatcctgggggagggggacgaaagggaaggcagcagctgattgtcagaaccacccccttctgccaccctcagccttgcccctttctacagctctttctcaattccctttcttttccctatttggtttcagctttgacttccccttctccaggaagcactccctgacctcccagtctgggccatgcaccaactctgggtgtcctcagaatttttttttttttttttaaacagagtgagtcaaactaatagaaacataaagtagaatgacgggtgccaggggttgcaggcaggggggaatggggagttgtttgataagtacagagtttcagtttgggaagatgaaaaggtcccagaggtttgttggcacaacagtatgaatgcatttaacactactgaac

SEQ ID NO: 37107 - DNA, 2086 bp, Artificial sequence
  DNA replication origin
acgccctggacggagatgctgtggtgctcctgcgcgcccgcgacctcttcaacctctcggcgcccctggcccggccggtgggcaccagcctctttctgcagaccgcccttcgcggctgggcggtgcagctgctggacttgaccttcgccgcggcgcgccagcccccgctggccacggcccacgcgcgctggaaggctgagcgcgagggacgcgctcggcgggcggcgctgctccgcgcgctgggcatccgcctagtgagctgggaaggcgggcggctggagtggttcggctgcaacaaggagaccacgcgctgcttcggaaccgtggtgggcgacacgcccgcctacctctacgaggagcgctggacgcccccctgctgcctgcgcgcgctgcgcgagaccgcccgctatgtggtgggcgtgctggaggctgcgggcgtgcgctactggctcgagggcggctcactgctgggggccgcccgccacggggacatcatcccatgggactacgacgtggacctgggcatctacttggaggacgtgggcaactgcgagcagctgcggggggcagaggccggctcggtggtggatgagcgcggcttcgtatgggagaaggcggtcgagggcgactttttccgcgtgcagtacagcgaaagcaaccacttgcacgtggacctgtggcccttctacccccgcaatggcgtcatgaccaaggacacgtggctggaccaccggcaggatgtggagtttcccgagcacttcctgcagccgctggtgcccctgccctttgccggcttcgtggcgcaggcgcctaacaactaccgccgcttcctggagctcaagttcgggcccggggtcatcgagaacccccagtaccccaacccggcactgctgagtctgacgggaagcggctgaagccctgataacctcgcctttgtttttcgggggtctgtctggatgtggagaagctctgtgtgagcggtgaggggtggagggatgtcgcggagaggggaagggggaaactgaccaagaaagaaattctaaggagagcatgagagaaggctggcattggcaggaggagagcaccaggacgaggatgggaagcgacctccagatttatcaaatggtcatgcccactgggagccgtggatatgcgtggggacatcctgggtcatctcagtcatggagggagacggggatgtcacgccgtcccgcagggcccagcacagccccagacccgaaaaaagtgttctgcccaagattccgagagccctgcgctctagggcaggggcagagttttggaaacagtgcaggctctggagccagactggcgagattcaaatcctggctctatcgcttcggagccaggtgggcctgggggggcgtcgcagtctctctgtgcctcagttgcttccaggatgcgggacccttggctgcaggggttgcttccgccactagagggcgcgccggtcccgctcctggtggcccactgtggctgcccgggcgacagtacgcccagggcctgtgttccatagccatctactctcttgagcctttggacttctctccaagcccctgtgggaggcggacagcagtgaccacctccccttcttttggactgcgacctccttccctcctgggagagccctgtgacctgcatgctactcttaactgttctattcaagactgaatagaagtatttcagtcttgcagaggaggaaatgctcagagctccgaggtgcggctgtggtcgagaaccgggtgctgggccgggcgcgggggctcacgcctgtaatcccagcactttgggaggccgaggtgggaggatcgcttgagcccaggagtctgagaccagcctcggcaacatgccaagaccccgtctctatttttaaaaaagaaaaagaaccgacttctgaatcgcagctccactcatgactaatacctcattatttcagctgtctgcacctaattccccacttgcacggcagtgtagacaataaccatagctcacactcactgagcacctactgggtaccaggcaccattctcagtgtttcacctggatcaactaatgcgtccctcacctc

SEQ ID NO: 37108 - DNA, 1099 bp, Artificial sequence
  DNA replication origin
agccactgcgtctgcccaagaccccatctcttaataaaaaaaaaaaaaaaaaaaaaaaaaaagaggaaaagggctgggcgtggtggctcacgcctgtaatcccagaactttgggaggcctgaggtgggcagatcacgaggtcaggagatcgagactatcctggctaacatggtgaaacccccgtctctactaaaaatacaaaaaaaaaaaaaaaaaaagccgggtgtggtggcgggcgcctgtagtcccagctactcgggaggctgaggcaggagaatggcgtgaacccgggaggcggagcttgcaatgagccgagatcgtgccactgcactccagcctgggcgacagagcgagactccgtctcagaaaaaaaaaaaaaaagagaaaagggtagaatagggtatgggttgggtgggtgagggtgggggcaggaagcaggggtggtagaattaaataaagcggtcagagaaggctcactgaggtgacattgcagccaagtcgagagggaggtgtgggaagagccaaatggaaatctggggggcagagcagccaagagaggaacagcctgtgcaaaggccctgaggcaccagcaggcctggcatgttcaaggaatggcagaggctggagtaagagagggaggaggagagtgggaagaggtgaggtcggtgaagtaaggcgcatcctacagaggctatggggagcaccttggatttttctctgggttctgagctgcggagggccacgagctgccatgatggaaacaggcgccctctggaggccatatggggaacagacggaagaggttggggctcaggagtcccggcgtgaaggcaattgcaatagttcaggtgggagatgatggcagctggccagggtggtacccagtgtggaaggtgtagaggggccagatttggggtttgagggcagagaaactgagatttctggtagcttgaatgtgggatatgacgggcagaaggagggcgtagcaggggaaggaaataaagtggcttgttctgtatgtgactggagcccagctccttgcaccaacccgggctcctgcacccctcagcaggcccagggatccccaccgccaggccgg

SEQ ID NO: 37109 - DNA, 1201 bp, Artificial sequence
  DNA replication origin
caccgtctctcctgggcatttcattcatccctgctggccctgtcccctcccaagacaatagtaattcttagtgtattattggtgagagtcagcaggacccagacagtagaatttaggtgtgaattgtgtgggtattttgggaggtagtagtctatactctcccaggggttccaggactcatggattttgtaatcctggtattgagttccctagtgctgcctgcttgtgggaaaagagcttagatatagcaagtgagggctgggggtggagtcaggacatggtaggagggaaggggggtctaggttagatgtgggggccttgggccaagggacagactggggacgtgggtgggacttcggctgggcaggtggtatgggcaggatctggtgggcggggctttggctgggcaagtggtatgggcgggatctgggtgggcggggctttggctgggcaggtggtgtgggtgggctctgggtgggcggggcttcaactgggtgggtggtgcaggtcagacctggagggtggttgggtgacagggctttgcttaggcaggctctggtggggatccactgggtggggtgggtggggctttggctggttggggtggggtaggcgaggcctcacctgggctggacctggagggtgggcggagccccggtcagcaggttaacctaactcagctcccccatcccttgcagttccgccacgctgccgctgatgatgaagtgcgtggaggagaataatggcgtggccaagcacatcagccgtttcatcctgcccatcggcgccaccgtcaacatggacggtgccgcgctcttccagtgcgtggccgcagtgttcattgcacagctcagccagcagtccttggacttcgtaaagatcatcaccatcctgtgagtgtcagggggctgcggatgggacccccggacccctgttgacccccatcttctcccacaagacaggcatctgcctaacctcccaccttctccctcagggtcacggccacagcgtccagcgtgggggcagcgggcatccctgctggaggtgtcctcactctggccatcatcctcgaagcagtcaacctcccggtcgaccatatctccttgatcctggctgtggactggctagtgtgagtgtgggtctggagactggggcagggccaggggtacccctgggaaagaggatgagtgagtgagagtcc

SEQ ID NO: 37110 - DNA, 834 bp, Artificial sequence
  DNA replication origin
aaatgattgccctagagatttatttccctctttcttacactgcctccccgtggccctggaggcactcttttttttcttttgttttaaacaatggcgtctcgctctgttgcccaggctggagtgtagtggtgtgatctcagctcactgcaacctctgcctcctgggttcaagtgattctctgcctcagcctcccgagtagctgggactgcaagtgtcccccaccatacccagctaatttttgtgtttttagtagagacggggtttcgccatgttggccaggctggtctcaaactcctggcctcaagtgatccgcccaccttggcctccaaaagtgctgggattataggtgtgagctgccatgcccctggggggctcttaagttctgctctgattcaacctcagaactccttccaccgtctctcctgggcatttcattcatccctgctggccctgtcccctcccaagacaatagtaattcttagtgtattattggtgagagtcagcaggacccagacagtagaatttaggtgtgaattgtgtgggtattttgggaggtagtagtctatactctcccaggggttccaggactcatggattttgtaatcctggtattgagttccctagtgctgcctgcttgtgggaaaagagcttagatatagcaagtgagggctgggggtggagtcaggacatggtaggagggaaggggggtctaggttagatgtgggggccttgggccaagggacagactggggacgtgggtgggacttcggctgggcaggtggtatgggcaggatctggtgggcggggctttggctgggcaagtggtatgggcgg

SEQ ID NO: 37111 - DNA, 1769 bp, Artificial sequence
  DNA replication origin
gcggagcccaccgccaacgggggcctggcgctggcctccatcgaggaccaaggcgcggcagcaggcggctactgcggttcccgggaccaggtgcgccgctgccttcgagccaacctgcttgtgctgctgacagtggtggccgtggtggccggcgtggcgctgggactgggggtgtcgggggccgggggtgcgctggcgttgggcccggagcgcttgagcgccttcgtcttcccgggcgagctgctgctgcgtctgctgcggatgatcatcttgccgctggtggtgtgcagcttgatcggcggcgccgccagcctggaccccggcgcgctcggccgtctgggcgcctgggcgctgctctttttcctggtcaccacgctgctggcgtcggcgctcggagtgggcttggcgctggctctgcagccgggcgccgcctccgccgccatcaacgcctccgtgggagccgcgggcagtgccgaaaatgcccccagcaaggaggtgctcgattcgttcctggatcttgcgaggtcagctcccgctcccccgggaggtggggaagagtgttacggatggcgggagtggtcacgtggacaggacggggctttggggcccctggagcagagacttccctctagagtcttaggaaaactcgacaggatattgaggggaggctccagccctcgggagtgtgagtctagtctcctggggaaggggtttctaaatctgggggcctgggtacataagtggggtcttatagagggagaagaaagtgatttggggagacataggagggtctgcctaggggagaaagacactgaggggaggggaccccaggaggaacttttgcggggggaatctttgcgtggtcaagggccccaagatggggcttctagatataatttggggccagggttggagagtttgggtaaggagcccctggaggatctgagatctgagtaactcccaccaggccctcttcccagccctggggcacccccacaccacgtgtcactcggacataaccaggctctgtttttggcctccgcttcccgcccatttcagctggggtctggccgcttcccctttatcttttagatcagccctgccacccctgcctttccctcccgtttcctcctctgtctgggccaccccctagcaggcagcccagaagaggaccagttagaaaggggagcagattcttttccttctcctggcctctgccccgcgcccccaagaatggcctcccccactttgaggagggcggggggcagaggcccccttgcgcttgcctttagggcttgctcattcagtgtctccacgttggggacttcctggaagttgggggaaggaaatgatgagtcacggaacagggttctccagcctctggggcgtcagtgcaggctgagatgcgagactggggcaggcttggtgtcccgagttgaagcctgggagcaccttctggctgggggagattagctgggtcctggcccagcctgggcctgggtggtacaggcggaccttcaggcaggcacacccactccgaggctgtttatgagcacaggcctcccctgcgtgccaaaacagctgtagctcacacttggcctgccacacaggcttataaccaaatgacatacagctggacacattcacgcagacactcagctgaggctgtagcatctcgacaaacacatggccagataccagcggtcatacacacgctcactgtgtactaagacccctgtagcacagccattcagtgatgccaccagcca

SEQ ID NO: 37112 - DNA, 820 bp, Artificial sequence
  DNA replication origin
agcgttcggagactggacgagtaggggcggggctgatacccgagatgggccaggtcccccatagaaggcagattaataatacccatctccaggagccgggcccagagacgacggggcggggccaggaaggggcggggccttgggagggtgctgtttcccgccaaaggaactgggttgtgggttggagcccttaaaccacaggggttcgttccctggtgcgagggtcgctagaaagctccggtggtcctcggtgattcatttgcaactcaactcagctttggaactcctcagccctgagtttggtctttagtcgcctctgagaactttaattcctcgaatataaagtgcaggtgttaaaagcttttgtctcatatgattgctgtaagatttaaataaaattgatgtatttatttagggagccgtggctcaagcctgtaatcccaccactttgggaggtgaagcgggcggatcacttgaggtcaggaggtcgagaccagcctggccaacatggtgaaacccgtctctactaaaaatacaaaaattacctggtgtggtggcacgtgcctgtaatcccagctactggaagcctgaggcaggagaatcgcttgaaccccagaggcagaggaagtcattcaccttgaggccacacctagagaggatgacacgtgcatgcccacctcccaagcccctaaccgcacccactctgctgcctccccaaattctctgttagtggccgtttgggaggttaacaatgaattatgattccttactccacctgacagtgttgaaatcctcattcctttcccatctctagcctgtt

SEQ ID NO: 37113 - DNA, 1193 bp, Artificial sequence
  DNA replication origin
gctgggcactgtgtctcatgtctgtaatcccagactttgggtggctgaggcaggaggatcacttgaggccaggagttcgagaccagcctcgccaacacagggaaaccctgtctctaccaaaaaatataaaaattagccaggcgtggtggcgggcgcctgtaatcccagctactcaggaggctgaggcaaaagaatcacttgaacccaggaggcagaggttgcagtgagtggagatcacgccctgcactccagcctgggtgacagaatgagaccctgtctcaaaaataaataaatgaatgaatgaataaataaataaataaataaataagcaagcttttaaatcaagcccatgaacactgtagaaaaaaaaaaaaaagaaaagaaaacattcccttgtttgcagtctctgttgactcctttatttcctgccttctccactacaatgtagcctctcctaaccctgtgttccccaatccctggcagggtgcccgacacagggttgacgtccggcaaatatttgttagatgaaggaaggatccaagatctccaggagaaaacagggtttggtgaagaggtggcgggggcggggatgagggcagagagttccaggcaccccgattcaaaaatgagcaaaggacttgaatagacatttctgcaaagaagacatacaaatggcccataatgcacacgaaaagatgctcaatgtcatgaatcatcagagaaattcaaatgaaatctaccagggaacagcaggggcaaaggtgtggagcagagagagggttggtgttttgggggccctggaggaggttgtgtctcgctgaaaggagggagggtgggagaggcagtgggaggaggaggggttggagggaggaggagggataggagggaaagagggagaggagggagaggaagggagaggacagaggtgagagagaaggaggcggggaggagagaggagaagggtggaggtggagggccagatgtgagtcagctcccacccttacagacctagtgcgaaggaaagatcgagagtttttatccaccagacatttggggatcattttgggtaggggcagaggtggtggaggagatgcctttccgggaaaccctgaagttggcttagagaggagggtgctgagggacaggccgcccccgccagagccttctaaggactttctgcacagcattccacc

SEQ ID NO: 37114 - DNA, 1329 bp, Artificial sequence
  DNA replication origin
gtaccctcccaggctcaagcaagcctcccacctcagcttgccaagtggctgggactacaggcatgcacctccatgcccatctaatttttaaatttttttttcttttcaggtgggttctcactctgttacctaggctagagtgcagtggtgcgatctcagctcactgcaacctctgcctctcggggtcaagcaattctcccacctcagcctcccgagtagctgggaccattggcatgtgccaccaatgccgtactaatttttgtatttttggtagagacagggtttcgccatgttgcccaggctggtctcgaactcctgagctccagcgatccgcccaccgcagcttcccaaagtcctaggattacagccatgagtgaccacgcctggctaatttttaaatttttcgtagagatggggtattgctatgttgtccaggctggtcttgaaccatggagggttttgagcagagcatggccattggccgacttgaggctgcgctatagggcaagagcatagaggagactgctcggagagaggtggctgcagtggtccaggtgggagatgctggtgaccggaccagcatggaagccgtcggtgtggccaggagcgttttggaggtggacccagctgaatggccaagaattggatgtggaatgtgagagaaagcagagccagggcgacaattagatttcccacttgagcccccgggtaggatggagctgtcattatctgatatgggcagatgggaagggcaggcggaggtgaagatcaggagggaagtgttgggggtctggccccgagtatcgtccacatcccagcagagatgtccaggaagaagtgacgagtcagggttcttggagagagctgggtaggatatggaaacggcatttctgcacatagagggaaaccgaggccaaggagctcaccggggaagtgaggatagaccgaggagagcaccagagggccacgtctgcaggcagagagatgagggagaggagaaccaagagattgggtgtcccagcagccaggagggggacagggttggacttacctctccaggaggaggtcactggtggtgtcaccaagagcagcaggtgggaagggggagaggaactgggtgtcgggtgttctggctgtgtgggcaccttgctgctaatgtagtggctggtcctgtgctgagggctggggcgcgggaggggtcagtgaggcccaatgatacaggggcagccggaaagtccggctgggcaaatgagaatgttacagaggaggctgaccctcaggtcttgagttcctccatgcctccaggatccaggcccgcccattcattca

SEQ ID NO: 37115 - DNA, 982 bp, Artificial sequence
  DNA replication origin
gaggggatgttgagacaggggcaggagactgcctgtgagagagggatgatctcaagaagagacctggcacaggaaaccaaaaggaggcaactgtagggaatgaaacttaagggtctgggaaagcgctgtaaaaggagagaggacctggaggtaagatggacactcggaaagaatggggagcaactgaataggtctttccaagaggagagatcttgtggggtggggagtaggcttgaaagtgtgagacctggggaggaatctttgttggggcaaagactcaacattggatttaggagtgcccctatcccccaggttggggctttggatctaggaaagggttctttgggctggaagttgggaaagaaaacgaatgagaaagagtgtcagagcgggggcggagtctcctccaggaacagggtccttggaggcaaaatgtgaccttttgaagaagggaggaagcttgggagtgggacaagggatgtcaccagtaaaaagcccattgaggccccaaggaggggaactgagactgagaaagtggaggtcaaaagggaacaactccagaggagggggattggagacagggaaggttggggggcatctagaggggacagcagaggcgtgaggatgcagagattcaggacggaggggacttgagattccaaatgggaagaaaacagggagaggtatacaagggaatttgggagtaagaggcagagctttttgtcaactctgtgggtttgcttctagttctcctaactgtgtgaatatgtctccggctctgctcccaggctgtggctgcctggtgtaggccccccaacgtcccttcctgcctgggacccctgccctgctaggaagtggttttccctggctcagcaggagttcttggaaggagagtgtaacatcctgttccggtccagtttggttggttgggggagggaggatagagtgtgtggagaatgaggcttaggaaagactctcaggc

SEQ ID NO: 37116 - DNA, 1026 bp, Artificial sequence
  DNA replication origin
gccttcaccgctggttcttcagcatctcgggaattgtagtcctctgtaaagatgtttgtccacaaatcccagcatgcacttgggatctgactcgtttggtaggaaaaggactggctctgactcttcacccatcttcacccaggctggcccctttggtgaaactacaactcccaggggtctgtgcgcgagaaggcaggcgggtttttctaccggaagtccgctctagctctgggccctacaactgcaccctgagccggagctgcccagtcgccgcgggaccggggccgctggggtctggacgggggtcgccatggtaacgggggagcgctacgccggggactggcggagggggggcccacgcgtaaatagccgaggctggatcgggcgctgacaagtcccttctctgccgcggatggtctgggtcaggcgcgggctctggggattgggaccgatccagggccgggaaggagggcacagggcggtgattctgcgcgcgggggttaccaggggtctcgcggcgacgggcattgggggtggtgttccaaggggaaagggctgtgcaggtgggaaacgttgtagatggttggaagctttgaaacgagaggaaactcgtgagacacagtcttgtgggtagcgagaaggcattggaggtggggagagggcgtccgaaagaggaaggcgctctggaagtgtggcgggagcgctgggacgagaacgcgagaccttggaaaaggggagggaggttttcttgatgggaggagtctctagagacaaggatctgattgcaggtggagaggggatgttgagacaggggcaggagactgcctgtgagagagggatgatctcaagaagagacctggcacaggaaaccaaaaggaggcaactgtagggaatgaaacttaagggtctgggaaagcgctgtaaaaggagagaggacctggaggtaagatggacactcggaaagaatggggagcaactgaataggtctttccaagaggagagatcttgtggggtggggagtaggct

SEQ ID NO: 37117 - DNA, 1212 bp, Artificial sequence
  DNA replication origin
cactccctccctccctccctccctcgcaatggcggcagcggcggcacctccttcctgcgacggccgctcccgcgcgcgcgccccctcgctactgcgcgtgcgcggcgcgtggaccgttgcaggggtataacggcccctgggcgcgcgccgcgaagggacaaccagcgaggcagtgggaagaggtcagagcgcgtgcgcacccgaggggcttactgccacagccgctgcctgaggttaggaacggccgcggacggtgcagtgcgcgtgcgcccccgaaaatgccgctattgcggcggccgccgtcgcgactgagcgcgaggcgacttgcaaacgagcagagggagcgggatgggcgagcgcgcgtgcgcggggggctgccagccggcgcagctgctggcgcagggcggagggagtggtccgcaggagctgcgcgcgcgtctcaagcagccgatctactgcctcgcgctggctcctggagaaagccgaaggagagaggcatggcccggttttgggggtggggggcgaagggcgcgatcccgctcgcgcgggacctgaccagccaatgggaagcaatgggaggtgggtttgccgcgcgagccgcagccgccgggataacggaggaggccagaaggagcgacgtaacgtggggcggtggggcggggctgagaaggagggagcgcaccagagagggagttgattggaggatatgaggaggcgtggcccgcctcagcccaatccgagccccgcaattcgtcgtcccggaagaagaggcggggctggagagcgcgtgctctttctcctggctgtgaagaaaatctgcagccaacgcgcgcgtccatgcaacttgtttttggttctgtgaacgactgatccccaggagagggaagacggcctggtcctgtgtgcagcccaagcctgtcacttagcattgtgcaaatggctacaaatcgaatgtcaattagggcgcctgaagggaaaagagtagtgatgggagagggcaccgctgtaacccttgactcctctgaactgaggaggtgttcctctgggactcctccggaagtacagatcgtggaagatgagcttcccgggcgccgagccaatatttgtggaatgcatgaagaaaggctgtttcctattacatttggcatttctgccatcagtctcttcatctataaaatgggataataatcgtacctctctcgtagggctgct

SEQ ID NO: 37118 - DNA, 2162 bp, Artificial sequence
  DNA replication origin
ttagaggtggaaggggagagagggtactctatgcaatggctcagagaaggaaggagggaaagtgagaaagagaataaagatctgcgagcagctgcaatccccttttccaaaggacacaaagctgcaaagcccagagataggaagggagagagcaaacagcagaggaaagaaaatggggcaatggaaaaagatctacctccccccacactactaacctagtggaagtgggggaaatgggggagacactcccagactccagagagtagtaacaatcaaccaacccccacctatttacccagatctctcaggatccctggggagagaaccctcagggttagggcgcagagagagaatctgcagtctcagagcctggagagcctaaggcccaatccagcccctttgcctctgcagcagagggatggaaagaaagatatgcctgaaaggggaagtgctcaatggggaatgggtgggccacgggtggtgagctgcgaggagcaggtctgataggaactaaatgggaagagaaggagcctggcaggatacaaggggaaggaaaaaaaaaaaaaaggtgaggaaggaaacaagtccaagaggaacagaattgggagagggatatcaaaggggagtgataatctatcacagcactgaggcagctccaagaggaaggtgggggggaatacataggaaagaatgattaagaagacatcgtaatgtcacaattggagtgagaactccaaaagaagacaagaggcagaacagtggagggtgggcaaataaagcagagtgaagggtgagggctgaatcaaaatggtggggggaagagactgtcatgtggaaaacttaaaagactcgggagggaacagagaggggacacagtgacaagaaccccagtgttaaaggaccgctccaagaaaggacggcaatacagaagttaaaaaccggtctaaaaatatgcgggcaagtggacagctccgaaggagccgagctggggagggaaacactaaataaagaggatggagcagaattgaaaaaaacgagaagaaagtgtaggtacaaaatggatctaggggcaggtctgtgagatgcagaacaggaaggggatgggtgaccagcccgggaggtatcagaggtatagtgaggttaaagggcatgtctaagggctaaaacggggaggagaggaattggagcaaagaggggacaggaagcagttttcaggcagagaactgaaggagagacaggccaaagaaaggagaagcaaatgaatgcagtagctcagaggagtgccaaaaaggaggtggggaagagaggaaacctccaagagaacacgggctgaaactgaaggcagtctgagttagggatacatcatttaagtgaatagcagaaatgggagacctgcagagtcagagaagggggaggaggctgcttcccgggaaggcagagtcagaagcaagcaggtgaggggagcgcagcaagatctgaggtcgggcaaggggcagagctgagaggcagaaaggtctggaagagaggaaagggtctgaatggtaaacgggaacaagagctgagaaggggaacaggcaagcacggtgcagccaagtccgaggggatcaggggaatgagctggggcacggaagggtcagaaagccagccgaggggcatcccggggtgcagcaggctctgcgagagggcagacaagaaatgcgggtagtagggcccacgagggaacgggattcagtccaaggggaagacctggggcagcagtgcctggccgaacaggggtctcagatggatctccaaagggttggaaccgcaggtcctaaagggacagctcccagggtgcaacagattctgagacaggaataatagcacagaaggtaggtcaaagaaggggccgaggacagatctgaagggtggtgagagcagaatcgagaagagggagaagcgtcacggatctcaaaagtgggagccacaattaagagatgcagaatggtcaatgaggagaagatgggtcccaggagcactgcagagcccgggaggagcgaagggcattatggaggggtggaagggggaaggggggcgcagaattgggaaccggttggctgaagtcgggtaggctccgaggcagacaccgagatcccaacgggtcggggatgggggcggcggcg

SEQ ID NO: 37119 - DNA, 1565 bp, Artificial sequence
  DNA replication origin
tagaatacaactcacagagctggtgtgaggactgggtgagacagtgcatgtaaaaggcttatggctggccttggcccagagtgccggcactgcgtaaatgtaagcaattgttgggatcctataacaggaacttaatttagtctaggagtcaggggagacctcggagggagcattgtttagtcacagaacagaggtaaaagtggaaggaacaactgtagggaggccctgcaagttcatcaggactgcagtgaagtataaggggagggtggcaggcttgagcctggtgacaggagcccccgaggccacatgttgagaagtttgtgttgtaccctagatttttatcctagattgcagggactgggatcagccttcctgcctgaggcttacaggcttctgactctgaaaagtattctttcttagggaagagaggccaggaaaggaagggacactgggctgtgattggtgacatgtttgcctcctttcatgggtcattgggaatcaggaacctgaaggaagttaacctctgccctccttaatgcttgggaggaatctgcttgtaaccccaaggggcttttctacttgggcctgccgtggaaaggaagcgggtgttttgtgtgtgtgtgtagtggggtctgtgtgtggggggtaggatatgtgtgtgtgtggtggtggcgtgtgtgatgggatgtgtgtgtgtggtgggatgtgtgtgtgtggtgaggtgtgtgtgtggtgggatgtgtgtgtggtggggcgtgtggggggggtgtggtgtggtgtgtgtggtagggctgtgtgtgcggtggggtatgtgtgtgtggtgggtgtgtgtggtggggtttgtgtggtgggatgtgtgtgtggtggggcatgtgtgtggtgggatgtgtgtgtggtggagtctgtgtggtgtgtgtgtgtggtggggcatgtgtgtggtggaatgtgtctggtgtgtgtggtgggatgtgtgtgtgtggtagggggtttgtgtggtgggggatttgtgtggtggggtgtgtgtatggtggggtttggtgggattgtgtgtgtggtgtgggggtgtgtgtggtggggtgtgtgtgtggtggggtttgtgtggtgggctgtgtgtgtgtggtggggtttggtggaaagtgtgtgtgtggtggggcttgtgtggtgggacgtgtgtgtgtgtgtggtggggcaggtgtgggggggtgtggtgtgtggtgggatgtgtgtgtgtggtggggtgtgtgtggtgggatgtgtgtgtgtttgtaggggggtgtgtatgtggtggatgtagtacacctgtattgtgctcgcggtctgtttctttgttggtggatctttagcctgtaagatccctcacagtggtggcaccagctctcctcggagtcacactgccatcactccagtgccactgggcctgcgtgggcatgccagcaaagtcacacttcagagcatgaagacgtctcacgttcttggcaggacggctctcccagctgctcctggctttgaatgttcactcccgttttgcagagcgcagtcggctcacctcgattatggaccacact

SEQ ID NO: 37120 - DNA, 1002 bp, Artificial sequence
  DNA replication origin
acgtgtgtgtgtgtgtggtggggcaggtgtgggggggtgtggtgtgtggtgggatgtgtgtgtgtggtggggtgtgtgtggtgggatgtgtgtgtgtttgtaggggggtgtgtatgtggtggatgtagtacacctgtattgtgctcgcggtctgtttctttgttggtggatctttagcctgtaagatccctcacagtggtggcaccagctctcctcggagtcacactgccatcactccagtgccactgggcctgcgtgggcatgccagcaaagtcacacttcagagcatgaagacgtctcacgttcttggcaggacggctctcccagctgctcctggctttgaatgttcactcccgttttgcagagcgcagtcggctcacctcgattatggaccacactcttcctccagaatgggcagggtgtcagctctaggctggcctcaagttctttgccagcgtggtttcttaagcccagctgttgggatatgcattttcttgaaagtcagggaaaagaatggagccccctgttgggctcagagcaggtccagaagtcctacttgacggttcatggcagcaaatgcataggcagcttctgaaggatcagccagatgctagagccatctgatcccccagacctggtgcgatgttgcacctcctccctcctcctcagccctgagatttatgacatggccgtgtgcgcatcgctggcatcgggaatgtataaagccacagtgcctgcttgtggcactcacacccagtcaagtcatcgtaatagagtgttagtggccttctatcatggggggaaagtctggcacaggaagaagcaggtcttgactgacaggggaattacctgggaagacagctaacgaaggggcaggggagggacagaggacccgagtgttcaaggaggagagcagccagaaaaccacccaggcacctcccgagcaggaaggcagcagggggagctgcggggactcgtgtgatttcaatagtagcgcttctg

SEQ ID NO: 37121 - DNA, 807 bp, Artificial sequence
  DNA replication origin
agcatcctcctccccggcaaaggccagggcactgtcccgaccatgggctctgtacaagcagagggaggcacccggaggctggtgtgagcagctacgtggggtggtggtccagggaacagagggagggcactggagccattgcctgcctagttcagtcctcaaatgggtccaagccagctcaggtctgcagcgccaggcccagggtacctggcagcccagccgatggtaccattggctggtgctcccactgaggtcttgagaaggtaatggggagagccacttgcccctgcctctgtccccagtggacttggttttgttcaaggccaaatgccaccccgtcagagagaggaccggttctcctgtcgccccaggtcttggtggctcacagcgtgtgttcggcttgaagctgggagggaagcagtggctgcattggggactggggggtgggtggaggcgactgtgggggcgacggctgacttgtgacaggcgtggaagtgaggaaggggacggtggaagccacggcagagggggagctgggcctggcgccggggggctcggtgatgggccgattgtagaagaagaaggggcactgctggataaagagttcaatgattgtctggtaggtgcgcgtggctgtgagggcgtccatagtgctgaaatcaggtctcatcaaggtgggccagaagcagatggagaggttctcgctggtcatgagattcaccttgttgttgtggctgaccctgcgggcgacaccaaactcaatggtcagaactgtgcagggccccacctggccctgggcgctcatgg

SEQ ID NO: 37122 - DNA, 881 bp, Artificial sequence
  DNA replication origin
taagggtacagcccggctggcggcctccttgggaacgtgtaggccacggctctgccaccactaggtacctgctgagggcgctggctctgcagatcagaacaacggaggatagctttgtgcctggacccagagagtgtgggactccccgcttcatccccaccgtcccactccacagccttcccgaaacattccctggcaaacaaaggaacactaggagaaaaaatggaaaaacccttccagtaattaaaaaggaagaaaccacagaaagaaaactacagacctcaagattccactctgtgcccgcctctgccgggagggagggaggcacacaggtggagctgaccctcgtctttgtggcagcaaaaccaggatgcctggagctgtggcctgagggcctgctggggtcccactcacccacttaggtctagtcgctagatcccccgttttcccaagaagagggttcgagcccttggtggggacagctggggagatggcagtgcaggctggaacctgggctgccccagaacacagtccattacgatagaaacactaattgagcatgtgcgtggggtgggggtgtgtgtgcacatgtgagtgtgagtgtgtgtgggcgcttggtggggggttggggacagctggaaggtgccaggtgcacttggggttggggttggtgtgttgggtgttgaagtggaatcgtttcatcccagccatggaggccaccagcaggagtgttcatggggatgtgggcgaggtggggcactttgaaggaatggcggtctgctggtgccctcgaaggggcatccttcctggtcttcgctgacccagaggcgctgtgcctgcatatcatccaccaccaccctagcccagccttcccactgccc

SEQ ID NO: 37123 - DNA, 2124 bp, Artificial sequence
  DNA replication origin
gttcatggggatgtgggcgaggtggggcactttgaaggaatggcggtctgctggtgccctcgaaggggcatccttcctggtcttcgctgacccagaggcgctgtgcctgcatatcatccaccaccaccctagcccagccttcccactgccccaggaaaagctcttctcctggccacctctgccccccagcacctcaaacttgcatggctgggctgtggcctctgcggccaggaagcctgacactaggcaccccccaggcgagagctagtggggtgcagagggccccatgccagacagcccttggggctcgttgcactttaagaaataggatctgtggtgtattccagggggcctgatggacacctttcccgggcgtctgcagctgccctgcccgtgcccgcctgcagtggttggagacgggagtggcccttcggctcccgagctccctctggggacggctggctcactgtctccagttctcaatggccaacgaaggtgcttggaaacacctaaccttgcaagttttaccgccttttgaggaacacaaatcggagaacaaacccagggttcaggcgtgttttctgtgaatgttggatgatgaatttttgtctcttctggtggagctgtgcctggccctgtaggcccagggttggctggaaggtgacatctgtgtttcgttttagctgaggttggcagaaacgttcccaaactcccccagccctggaccccagcagatgaggaaacggccccatttactgaccccgcccccttttcgaggttatgctcacctggtcagctcctcacgtaattgggggtggagggaaagcatggtggtgccctgggccgtccctgtgtgaacgcaggcaaaagcagcccagtccccctcactgcttgagctaacactgccacctcttttgtgtgagcacaaaagccacgtcccaagccacctggcccgattccacagatgtatgtgcggccagtgacttccccaggagtgtggagggggtggtgaggaggagcacctgggctctctacccctctcctcacagaagtacctgaaactaggtctggggcactcccaatgcagcgccttgtcagccaaggtgggcaggcagggactgtggcagcttatgtccaaagggagcccccatgcacaggaagccacagggttcctcttgtttcccccgctaacttcagcctctcatctgctgctccgggctgagggactagaggacatctcggtcgtttgaggggcatggccagtcgtggcaggccggccttcagcgtccggtcagggaagcgtgcagcccaaatgggcacttgcatgggagccacagaggagcgtccctggggattgttgggaccatgctgcccccactcccgcttttgttggggctctaagttctggaaggtgtgtgcacagagggtgctcatgggactcgcatgcagctctcagcactgggtgggagggcgttggcttgtccagaatggggacgtggggcagccacccctgcccagcgagagcgcagacaccgtgtgaggggacagcagcccttggtgcaaagccagagactgatcctggctctgacggctgaagagggaagacccaaggctgggtggcgtggctcgtgaatccacttagaattcttggcttgtgtcgcatactgggtgtcacggcacacatttactctgcattgtccccgtctttcccatcgcctagcgtttggggaggaacagggagagagcttcggggcgtctgtctccgtgctctcctgcctccaccgccttggttttgcttcctgctggaggcagggcacctgctgcgacccagattcttctgcaggatgtgtctgtctttgtcacggtggacagagggtgacatcataggagcagctcgctggccagaaggggatgggggcatccctgtgcctcactcagctcctgctgctcttagggaaaggaggcctgggtcaagccagcatccccttggtaaagacccccgcaggccaccaggcattctggacacgcacacacacacacacacacacacacacacacaaaacttcacagcaggccagctgcagtgacttgtcatcaagagtcacctcagctgcgcccccctcc

SEQ ID NO: 37124 - DNA, 1243 bp, Artificial sequence
  DNA replication origin
gcccgcctcggcctctcaaagtcctgggattacaggcgtgatccactgcacctggccccaagctgctaattaaaaaaagaaatgttttgtagagacaaggtctaactttgttgaacaggctgttcttgaattcctgggctcaggtgatcctcctctcttggcctcccacagcactatgatgacaagtatgagccaccatgctcagctcagaaagtactctgaaagaacttatttttttcctttgaaagcacggagagtctacggccatacaccctgaacccactcgatctcatctgaaagcaaagagacccatcttggctgggggagtcagggagggctttccctgtggaggagtctgaggagctgaaatctgaaggaccaggagaaagttagcaaggtgggatggcctcaagggaggacagtcttggaggaggaggggacaatactgcaaaatgcccgaggtgggcaggccccaggggagttggagtatctggaccagagtgcaaggaaaggctcctgggaggtgggcggggtcgggggtgggaccctgtggaagagttcaggcttcctctaagggcattggagatccctggaggatgttacgggaggagacacatggctagatgtgagatctgatctgccctcatggagatgggagtgggtgagcatggagggcagatgtcttggtgagatcagacagggctggggtgcagggagcaggaaggggagtgtgctggaaggcaaaatggaactgggagttgtacctggttgactggaagggagagagacaccccaagggggcccccagggtctctctctggcttgagggggggatcctggggaatggacctgtttggagaaagggtcaggagtttggctgtgggtgtgtcacagtggagtccccaagtagagtgtcatagacaggtggatatgatgttttgcttgcagcggaggtctaggctggagtcacgtgggagagggtggtttacagatggggcaggtcaagggcaaggttgagaccaccgcgttcgaaaaaccgaatgaaggcttaccacgcataaggcatcttgttgggcctcctggggtggcctatctgggagccgcgaagctgccccccaaagctctcaacgtgggtgctggtggttgtgaggctcgtgtttagaaagcacacaagtcttgaagagcaagagcgagagaaggctgagcacaggggctcacgcctgccctcccagtgctttgggag

SEQ ID NO: 37125 - DNA, 1546 bp, Artificial sequence
  DNA replication origin
tcccatgtctacttctttctacacagacacggcaaccatccgatttctcaatcttttccccacctttcccgcctttctattccacaaaaccgccattgtcatcctggcccgttctcaatgagctgttgggcacacctcccagacagggtggtggccgggcagaggggctcctcacttcccagtaggggcggccgggcagaggcgcccctcacctcccggacggggcggctggccgggcggggtgctgacccccccacctccctcccggacggggtggctgccgggcggagacgctcctcacttcccagactgggtggctgtcgggcggagaggctcctcacttctcagacggggcggctgccgggcggaggggctcctcacttctcagacggggcggccgggcagagatgctcctcacctcccagaccgggtcgcagccgggcagaggtgctcctcacatcccagacggggcggcggggcagaggcgctccccacatctcagacgatgggcggccgggcagagacgctcctcacttcctagatgtgatggcggccgggaagaggtgctcctcacttcctaggtgggatggcggccgggcggagacgctcctcactttccagactgggcagccaggcagaggggctcctcacatcccagacgatgggcggccaggcagagacgctcctcacttcccagacggggtggcagccgggcagaggctgcaatctcggcactttgggaggccaaggcaggcggctgggaggtggaggctgtagcgagccgagatcacgccactgcactccagcctgggcaccattgagcactgagtgaatgagactccgtctgcaatcccggcaccttgggaggccgaggctggcggatcacttgcggttaggggctggagaccggcccggccaacacagcgaaaccccgtctccaccaaaaccagtcaggcgtggcggcgcgagcctgcaatcgcaggcactccgcaggctgagtcaggagaatcaggcagggaggttgcagtgagctgagatggcagcagtactgtccagcttcggctcggcatcagagggagaccgtggaaagagagggagagggagaccgtggggagagggagagggagacggagagggagagctcctaattttgtatttttagtagagacggggtttcttcatgttgctcaggctgtgtcttgaactcccgatctcaggtgatctgcccgcctcggcctctcaaagtcctgggattacaggcgtgatccactgcacctggccccaagctgctaattaaaaaaagaaatgttttgtagagacaaggtctaactttgttgaacaggctgttcttgaattcctgggctcaggtgatcctcctctcttggcctcccacagcactatgatgacaagtatgagccaccatgctcagctcagaaagtactctgaaagaacttatttttttcctttgaaagcacggagagtctacggccatacaccctgaacccactcgatctcatctgaaagcaaagagacccatcttggctgg

SEQ ID NO: 37126 - DNA, 886 bp, Artificial sequence
  DNA replication origin
gaggagcgtctccgcccggccgccatcccacctaggaagtgaggagcacctcttcccggccgccatcacatctaggaagtgaggagcgtctctgcccggccgcccatcgtctgagatgtggggagcgcctctgccccgccgccccgtctgggatgtgaggagcacctctgcccggctgcgacccggtctgggaggtgaggagcatctctgcccggccgccccgtctgagaagtgaggagcccctccgcccggcagccgccccgtctgagaagtgaggagcctctccgcccgacagccacccagtctgggaagtgaggagcgtctccgcccggcagccaccccgtccgggagggaggtgggggggtcagcaccccgcccggccagccgccccgtccgggaggtgaggggcgcctctgcccggccgcccctactgggaagtgaggagcccctctgcccggccaccaccctgtctgggaggtgtgcccaacagctcattgagaacgggccaggatgacaatggcggttttgtggaatagaaaggcgggaaaggtggggaaaagattgagaaatcggatggttgccgtgtctgtgtagaaagaagtagacatgggagacttttcattttgttttgtactaagaaaacttcttctgctgtgggatcctgttgatctgtgaccttacccccaaccctgtgctctctgaaacatctgctgtgtccactcagggttaaatggattaagggcggtgcaagatgtgctttgttaaacagatgcttgaaggcagcatgctcgttaagagtcatcaccactccctaatctcaagtacccagggacacaaacactgcggaaggccgcagggtcctctgcctaggaaaaccagagacctt

SEQ ID NO: 37127 - DNA, 1253 bp, Artificial sequence
  DNA replication origin
gcccccaaacctcccagccaggtgtccagatgccccagacccccgtgtccaggtctcccaaccccagatttctccaggactcaaacatccgtgcgccccttcccccaggctcgggataccctcgtcccaccccctatcccccaggacactggagttccagccccccattcctctgggacccagaagtccccctcctgccagcccgcaagcttcccctacccgcaggaccgccagtccgattacttggccgcagagcaggctccgggcgcggcgtggggccggccgggcggcgcggaggggcagctccatagaccccggggcgcgcggggcgcagcgggacgcgcgggctgtggcgcccagctctcggcgcccacctcggcctcgcagacttggagacgcgcgaccagcgctgcgggcgggggcggggtctgccggagccccgcccgccgcgtctccgcccccggacccgccctgctcgcctttccctggtagggggccaagctaccctggggtccgagttcccttgccccacggtaacgtcgggggtcagaatgtagcacctcggatcggagctaccccactccaaaaggggaacagcggagtccgggcactgtctacaccccttcaggaggcagttagtgccccagcagcccctcgggacaagacaggtaccctgcagccgagccccatgtacgagtgaagactcacgtcagtgcttcctccagggacacaaatccagaattcgagaccctccctttccgggagagaactcctgagtgtcagcacactctccccccacagggctgggacttcgcatccaaacccaacccgccttaaaagggggacatacacctccctcgtcagggaccaggatccagctctctaaggagctccagagaccaggatcctggcgtcttatctccatcccccgccgcagggacgggaacccttacatccaagctccccattagatcataaatgggaactcaggggttgtagtacctcgcacagaggacgggaacccaggcgtccaagccaggccttccccagtctgataggaggtcctacagttcccctagctccttctctccatgcagcccccacttcccgttctcagggtcctccctggcatgggggtctccaggcacttaaaagcctctacatgaccttaacatggggaaagaaaatggagctggggccgggcgcggtggcttacacctataatcccagcaccttgggaggccagggcggtt

SEQ ID NO: 37128 - DNA, 1125 bp, Artificial sequence
  DNA replication origin
cgaattctggatttgtgtccctggaggaagcactgacgtgagtcttcactcgtacatggggctcggctgcagggtacctgtcttgtcccgaggggctgctggggcactaactgcctcctgaaggggtgtagacagtgcccggactccgctgttccccttttggagtggggtagctccgatccgaggtgctacattctgacccccgacgttaccgtggggcaagggaactcggaccccagggtagcttggccccctaccagggaaaggcgagcagggcgggtccgggggcggagacgcggcgggcggggctccggcagaccccgcccccgcccgcagcgctggtcgcgcgtctccaagtctgcgaggccgaggtgggcgccgagagctgggcgccacagcccgcgcgtcccgctgcgccccgcgcgccccggggtctatggagctgcccctccgcgccgcccggccggccccacgccgcgcccggagcctgctctgcggccaagtaatcggactggcggtcctgcgggtaggggaagcttgcgggctggcaggagggggacttctgggtcccagaggaatggggggctggaactccagtgtcctgggggatagggggtgggacgagggtatcccgagcctgggggaaggggcgcacggatgtttgagtcctggagaaatctggggttgggagacctggacacgggggtctggggcatctggacacctggctgggaggtttgggggcggcctggttcctggggttagggggtgttctgaacgcctggtcctggaggaatgaagacctaactgaaaacgttaggggatcaggagaccaggacacctgggccccgagtgtcgggtcaatcctgggggcgtcctggggcagaggctgcggcggctgcgtccggggctggggctcgcgcgccggggtcttcagggaggaagttgtggtcgtggggatgtggcggtccgaacacgtggcgccatcccgagaggctggggggatccctgggcaggacacaggatgggggtccctgccctctgccccctgcctccttagcccagccgggaaaacagggtgcagatccggggagtcagacaccggggatgggcttggggggcggg

SEQ ID NO: 37129 - DNA, 964 bp, Artificial sequence
  DNA replication origin
cccaacctcttgcgcccatttgacagtttaataaactgaggcttggagagcagaagccacctgatagggacacgcaaaggtcctggctgactccagagacaagcatctgggcgagggcaggcccgcagcccggatctgggctgcagtgactccgcctggagggccccgggaccctcgccccgcgcatgagcactcaccgaggccagctggcggccccgcggctctcagcccccagggcggcgcccccagcgcggcgaaccggcgcaggcggaggtaggtgacgctgaggcgcacgatggaagccttgtccagctggctggagatggcgccgggcagcgggagaagcttggccagctcgaagaactccaggttctccttcccgcgccgcgagcgcgccgcgttccgggacttctccttgcgctgcgcctgcaggctgggcgggcggcgcggaggaggtgtcggcggggccccggggctcaggggcttgggaactgggggcgagccccgcctcccggggccttgggaacgggacgggacgttgggagtggattccacatctctggaggtgggagcagaccggagtgtggattttacactccgacccagggacagaacctcgagtgtcaattctggtgggaaggaggaggaagggcgagagattaaagatgttgggcgtgaattctgaggaccgggactagaagcagaacgcaggggaccgggctcaggacggtagttaactcaaggtaagaccttctagccctaaggggcgggtcagggagctgggtgtgaactgccccttggcacggggacagaacatcgggtgtgaattggacccgggggggggcccgcggccaggggggcggggctttgctcaccacggtccggacggcgccttgaccatcagcccgggtagaaagtcccaggggacgctggcgccgcggcctcccacgcatttgacctcgct

SEQ ID NO: 37130 - DNA, 1356 bp, Artificial sequence
  DNA replication origin
ggctggggcctggcagaagcagatgctgcagcacagagccgggactggtattaatagtgtgattactattgttattacccgaccatcaaaacaccaggcggcgaaaccccgcccctcccccatgggcgcgcagcccccgcctccccagccccctagtgtctgggctgagcttcctcctcccaggagtaccccacaccctcctggctgttcctccctgcctccacctccgcctggagctccaggaacaattactggggggctggggggttgacggggaccccctccctcaagatacagctcggaaccagccgggtgacaggcaggaacaatgctgcctgctaattgtcgcaattttcccctgtcatttttgctaattccttcattttccctctcccaggatcagcctgggtcagactgaaccgctgcaattaacaacattaatgggcacgtcgggattagggggtgtggtggtgggggggcttggggacctgctcttccccatacacgggtccggtcccctgtgaaagggacccccagagtctcctgatcactgactgatgtgtctttttacccccagcctccacctcccgatcccaccaactccccgatgcctcccgctgtttcctcctctccctctcccctcaaaatgtccccactcctctgtcccccacattcagcaggagacttttcaccacttccacatccgccctcccatgtccagaacccaaacatcactcatccatttaacaaacacttgctgtggttcttatcacagcctgctcagtgtcctcatctcttgcgcagagagggagcacgaggagcagagagacgggagaccaggggcagagagaaggggaccaggggcagacagacaggagaccaggggcagagagaagggagaccaggggcagacagacgggagaccaggggcagagagacgggagaccaggggcagagagacgggagaccaggggcagagagaagggagaccaggggcagacagacaggagaccaggggcagagagaagggagaacaggggcagagagatgggagaccaggggcagagagacgggagaccaggggcagagagacgggagaccaggggcagagagaagggagaccaggcgcagagagagggggacccagggggcagagagagggggaaaccgggtgcagagtgtggggggacctggggcagagagaggggggacctggggcagagagagggggatccaggggcagaaggcagaagccaaggcctcttccaagttcccagatctcccccgtcacctgcccttctcaactgccctgaaggaatgtgctgaccctgggtcctggagagaagaggctggggc

SEQ ID NO: 37131 - DNA, 1088 bp, Artificial sequence
  DNA replication origin
gctgtaatcccagcactttgggaggctgaggcaggcggattgcctgagattgagagttcaagacaagcctgaccaacatgaagaaaccctgtctctatttaaaaaatacaaagttagctaggcgtggtggtgcatgtctgtaatcccagctactcgggaggctgaggcaggagaatcgcttgaacccaggaggcagaggttgcagtgagctgagatcgtaccattgcactccagcctgggcaacaagagggaaactccaactcaaaaaaaaaaaaatagccctcatcagccaggacagtggctcacactgtaatcctagcactttgggaggccgaggcaggtggatcacgaggtcaggagatctcaaccatcctggctaacatggtgaaaccccatctttactaaaaatacaaaaagttagccgggtgtggtgggcgcctgtagtcccagctactcaggaggctgaggcaggagaattgtttgaacccgggaggtggaggttgcactgagcgaagatcgcaccactgcactccagcctgggtgatagagcgagactccgtctcaaaaacaaacaaacaaacaaacaaaaaacaatagccctcctctgccttcaaggatgaaccatgctgggtgccatgtggggtgccaaggaacacactttggggaccacagagatccagtccatttttcttgctgctatggtgagaccaggagagaggaaggatatgcataggcctggcaagggagatggtggctgagccaatccaggtccactgggggtcccttacctgtgagagacccagatagatggagactgtctctgagatgtagaggaattttccttcctggttcaaggcgaacacaaagccatccagggactagagccgggagagacagggagggggaaggagaggacccggtgtccctctgtccagccgccaagtggtaagaggttctgaaacctgggtctccacctgaggtggactgttttggtggggagggggcttcagtggtcctcggaaggggcagggagtggagggatcttgagcattcgccttcccagtccaggtaccccccacaatagatgg

SEQ ID NO: 37132 - DNA, 850 bp, Artificial sequence
  DNA replication origin
cgctcaccaagagggggctgcacgtcaaggcctcagggtacaaggtgggtgtgagcagtcaggctcctgtattccaggcagccatgtccccagattgagggtgaccgagggaaccaggctggtggcttcactggctgcaggtggcttagggaactgggtctgggaatgggactgggggggtcacacagtgtccagtcctccagcacctgtgggggacagagggaacccagcccagtgatggtcctcttgcccccactggcccgccttgtccctcctccaaccatgcccaccaccagcaggtcatccacgtgactgggcgccttcgggcccacgccctgggccttgtggccctcgggcacacgttgcccccggcccccctggctgagctgccactccatggacacatgatcgtcttccgtctcagcctgggtctcaccatccttgcttgtgagagcaggtaccggggttgggggctgtggcgggtggattgggggcacaatggagatctgggggtacatggggagtcagagggagtgctgggtctgcaggatagggcactggggagccatgggaggcggaacagcaatggatgggacagggtgatggggagaagggagggaaggcaggggaccagggcggaggcctagcccaggggtgccttcggggatggaagaggggctgtgtcttgggtccgggccctccttctggggctgcagatcttggcccgtctctggtctttcatttctcatttctctggtctttcatctctcatccatttcctctcctgcatcccgcagtggaggcaaattaagtgctgaaatagtcccatgctctgaggtgtccagggtgc

SEQ ID NO: 37133 - DNA, 1037 bp, Artificial sequence
  DNA replication origin
ggaagggcggcgaggagcggactaactggagaggcaggagggcgggtggagggagaggggggtgaggacccgggggagacagaaatggacagaggagctcacagcccggagcccaaaccactgcagggagagccggcgtttaattctcagggctacgggcagagccgggcctactgtcctgggggaccccggttgtcgcagggtccggcgccggcagctctgccagtcctcagtcccccttccgcggcagcctggtgcccgcgggccccgggtagggcaggcccaggggcgggtaaaaggcctccgggagcgcggggcccggacccagcctctgcaggtgcgggtacaccaggcccagctccgcggggccgtagcggatggtgccgggtgtgcacaggccccgcaccaccggcggcaggaagcccgcgtgcaggagggtgggcggggggtccccgggaggcgccaggccccatggccgcaccggatcctgcttcaggacccctgcccggatgacagaggtgaactcgggcctcggtgtggccgggtggctggagggatcctcgtcgccactgtcctcggagcctttggtttccctcgggccgggctccactttgatgcgtttgccctgggtctggggggcctcgttctccgctggggcagcctgcttcccttccgtcggaggctccggctctggaagaggaagatgctgagggcctgtgtgtgtccccagccctcagtcttcccatctgtggaatggagctgtgcttagtgggccagacctgtagttctcagctgggagtggggtttttttttttgtttgtttgttttgtttttgttttttgtttttttgtgagacggagtcttgctctgtcccccaggctggagtgcaccagcaccatctcagctcactgcaacctccgcctctggggttcaagctattctcctgcctcagcctccccagtagctgggattacaggtgtgtgccaccacacccagctaatttttctattttaagtagagatggggtgtcgccatgt

SEQ ID NO: 37134 - DNA, 828 bp, Artificial sequence
  DNA replication origin
cccagtagtaagtatagaacccccattcttcccccaccagaagacacccctcccataggcactaggtccatctgaatgggtggcccaggacatggttatggtcccctcccctccgatctgattctcaaagatgcaggctagcccctggcacggccctgcctctgttcctgtctcctcaaccctggctttgctcccagaccatcccccgaccttggccctgttgctaccctgcctctcccgcaggcttcttcctgctgggcggcctgtgcgtggtgtggggcagcgcctcgtacgccgtgggcctggcggcgctgcgaggacccatgcagctgacgctggggggcgcggccgtgggcgcgggcgccgtgctggccgccagcctgctctgggcgtgcgccgtgggcctctacatggggcagctggagctggacgtggagctggtgcccgaggacgacgggacggcctccgcggaaggccctgatgaggcgggtcggccgccacccgagtgagcgacacggccgtggggcctggcaggcgctggacagcgcccgaggactgggacattaaacctgacctcccctcctccagatgcagagtattggttcgtgttccttgggaagggcggcgaggagcggactaactggagaggcaggagggcgggtggagggagaggggggtgaggacccgggggagacagaaatggacagaggagctcacagcccggagcccaaaccactgcagggagagccggcgtttaattctcagggctacgggcagagccgggcctactgtcctgggggaccccggttgtcgcagggtccggcgccg

SEQ ID NO: 37135 - DNA, 2561 bp, Artificial sequence
  DNA replication origin
gggcactaccggcctagatgacagaggagggaatcactgccattccgaccaatggacagttcacgccggacctgagtggcgagcgcatagccaatgggtaagccattcatcctgagtgacatgggttgcaacctaccggaggccggtggggcggtacggcgcgcggcggccgtagtgcgaatcatgggaggcggctggtggtgggctcgggccgctcgccttgcccgtcttcgcttccggaggtcgctactgccgcctcagcggccccggagcgggggcgcccgggggtccttcgcccccggccacggtccccgcgccggggcttcgccgcccccagtgtccgagctggatcgtgcggacgcctggctcctccgaaaagcgcacgagacaggtcggtggctaggggtgggggcggtgcggatgggacgggggtcccgggctcgcgtgggaccttgatggggcgggggcttctgcaggaaacggggcccgggctcggctccgagaagggcttcagtgtgagcgcacggaagcgcagactgcaagagcgcaggtgcccgcagaggggatgggcttgcggggaggacgaggaccccgggtaacggggcgccgtagggattggagggggtggtagggttgcgcgaggcagcctcgtagaatcgcgcctgccgtggggagaggggcttcagggagagcttagggtctgtggagttgggtacaagatgggtccatcccgattgcagaggccaccactgtgcagagagcgggagtgtggatccccgcagaagagggggaagttcaggattggagaaggggacaaccaatcgggagaaagctctctgctgattggagggggaggtgatctaggctgcagagggcggggcttgtgacggaggcgaggtccagaatggagcggactggccatgtttgttttttttttaattttatttttttaatgacggtgtcttgctctgtcaccgaggctggaccgcagtggcgcaatcgtagcccactgcagccttgaactcctgggctcaagctatcctcttgcctcagcctcctgcttagctggagctacaggcatacaccaccgcacccaactattttaatttatgtagagacggggtcttgctttgttgcccaggctggtctgaactcttgggctcagagaatcctcctgccttggcttcccaaagtgctgggattataggtgtgagtcacctcactaggccaggaccgggcatctagatatagggtgtggtgggctgtttgtaaaggacgtgaatggggacggacgtgggtgggattggcccaggccatactcggtaggacatggatgggattggcccaggccatactcggtaggagatggcggcatttgaaggaaaagaagggcgaggctgaagagcggcctggattaggaaacagtttgtcccagagttctgagaaagaagtgagtgggcaggccgtgggggtacacgtagagggaggggtttggccaagatgactcctcagatggaggttctgcaactttgcccctagattgtcctccacattctgcagggactatcttgaatcctttattttttttgagacggagtctcactctgtcgcccaggctggagtgcagtggcatgatcttggctcgctgcaacctctacctcctggattcaagtgattctcctccctcagcttcctgagtagctgggactacaagcacgtgctaccacaccctgctaattttaacatttttagtagagacagggtttgactatgttggccaggctggtctcaaactcctgacctcatgatccgcctgccttggcctcccaaagtgctgggattacaggggtgagccaccacacccggcccttgaatccttagtgttacagagtttgggggagaggggcactgaggtggaggccagagaggatgtggggggatatggttaggtgagcggcttcctggaagaggtgaggatttgggatgggcttgccttgcggctggatgggatggggtgagctgaagggaggcccctcagtttgactgggtaagggggattgaggaggtagggttgggggtgatgttaatccccccatgtccccctccctccagccttcctctcctggttccgcaatggcctcctggcatcgggcatcggggtcatctccttcatgcagagtgacatgggtcgggaagcagcatatggtgagtgcagaccccccctctcgccccacggaaccagggaatgcagagcccctatcacctgccctggtgagagtagactctcctaccccatcccactcccagtagtaagtatagaacccccattcttcccccaccagaagacacccctcccataggcactaggtccatctgaatgggtggcccaggacatggttatggtcccctcccctccgatctgattctcaaagatgcaggctagcccctggcacggccctgcctctgttcctgtctcctcaaccctggctttgctcccagaccatcccccgaccttggccctgttgctaccctgcctctcccgcaggcttcttcctgctggg

SEQ ID NO: 37136 - DNA, 1090 bp, Artificial sequence
  DNA replication origin
atgaagagcttggcctgcagccacatggtgggccagggagacgggcagatgcagccacaagcacacacttcctgaggcccctcaagtggcccagaggcaggatagcaggcctcccccagcaccccttgcgcccatctctcgggctgtgtccataggtgggcctcctccagggctctgcagatgaggctggccctcagccagggtgggagcatggggggagcagaggctccccatcccctggctgcagggttcccactcagtccgtttcttaagtgtccacaaatcccacagagcaacacaccttggaacacctgcatctgctggcttgggaaaggaaacccgaacacatcaatacctcatgccctgcaggtcacacagtgtaaggaggtgcgaggaaaacagagaacacttggccaggagccaccccagggtccccattgttggggcctggcggcgcagccactgcacggatcctggagctgtccggggctgggctgcagtgcaggcatagcgggtgcgtggcttgaggaccaggacagaccctggtgtgggcaagcagggtgtggcccacctgataggacaggtggggtaatactgacagaacgtgcgtgctcctaggggctgcctcctagaggtggctcttcaggactctgccccacaccggcccccactacctttgggtccagttctcactgtggaggcttctgctgcaggctggggggcatccgcttgctctagacggagggtggcagggagggcacgtgtggtaatccagggacaggagcaggcatgcgccagggagcccccatagtgccgctgggggctttttccttaataccttttcactctcactgtctcctgagtgggttgttacagcctgcactgaaaagacagtgatggtgcaccctagggttctagaaacgcctggacctgcttccacgcaggccctgccatggtcttggttccgggtctcttcgggcacagggtgaggagcgttcaataccttcccagacaccaactgttccctttgtcctggggaaaaggggccatgctttgcccagaaaacccactgggcctccagcaaggcccg

SEQ ID NO: 37137 - DNA, 2561 bp, Artificial sequence
  DNA replication origin
gagtctgaggccaggcactggcgaaagttcacaggtttgcgggcatgagtcggtttgctcagcaggagcccctgagcccgccacactgaccagaacttaagatggttatatacaatttacaaatctcaaagaaagtactactttaaaaaaaaataaaagagacggaaagcaaaagaaaaagaaaagaaaaaaggaacacccagcctgcctccccttgcccccaagttccctaccctgggtgctgccctgaatgccaccctaggaagggtggctggagccgcagctctggctggacactactggcaaaagggggaggccgtggggtcgaagcctttaaaaacatccttcagggatgccgcatcctgctcaccctcgcgggccggactgttcccagcaaatgggcttcctgagcccgtcttgggtgtctgcttcaccgtcccgaagagggtgggcacgggcaggttgtgcaccccgggctggggtggggcaccctcggggggtggggtggcggtggtggcagcgggggctgcagcagccttgggccggggccggttgtagctgttgtatctgtccgtgggggtgcccccatcagcaccggccttccctgtctctggctgttccagggcagacttgcggacgaacgggggctccttagccttggaggccgagctcttgccattgccctcagcacccttgggctgggcacccgtgtcagcagccggctctgtggctttgccccccgcgttgggagtcctcgggtcgtagaggctgataccgctcagcacactgctctgcccgccccctccgccctggcccagtccaccggccgccagcacgcgggggtcgtagggagcggtggctggtggggaggcatccccactcgggctggcggtgggagagggcgcctcagcagggccgggcttggcagcccgggaggaggccgtagagtctgtgggtttctgcagccgagggtcggtgggggccttccgcacccgggggtcactgggtttgtcgctggaaccgggggcggccgaggagccggtggcattgactgtcttgaggatgcgagacagaagttcaaagtcggggaggttggcgccctgtgtgctggaatccgtggaggcgcccgggcgctgccgggcgttggggggccctgccgtggcagcgcggtgcagccgggggtccagggtgggcatggattgcagggccgcgggcacggggggcactgcgtcctgcttggggatgggtagggggatcaggtcctcgggattccagagcacggtgcgggcgaagctgggcttgctcagggtcacgtccttcttgatgtggctgaactgctgcagctgtgaccgtgggtcccgcagagggtgcccggggagtgggtccaggggaatgttcacggccttctcccgcagggcccgctccccttcctcctcctccgttgggggcggcccagaccccttggaactgctggggcccacagggctggaatgaaggctgccttcgggcttggaggtgggcagggcgcgagccagccgaggatcggagggtcccgaatcacctgggccagacccgccagaagcctccacatggcgggtgagtctggggtcccggctgaggcgagggtcagccagccggcttcctgtggggtgtcccttctggaggcgggggtcccccagcccactgctgctcagctccccaactgaagccgggggtcggctggacgtctgctgcctcaaggtcttcaggatggaggtgacactgcttccaccctcatcctcatcacttgagtaccagtttccggtgtcacctgggaaagaacagaggagcagggaggggtgagtgggcgcatccaccacccgccctcttggatcccacagcagcccaccgtgagcagctcctttgcttgtgcctctcagaacctcaggtcctcctctctaaggctccctccccacagtgggcggctgaggagacccagagagctaaggcgctcggtttatgccatgctccccagctctcctcagtggcggcactgcactaagtagtttgttttatttaaataactcacaaccaccccaggaggtagtgatactatcatgcccatttgacagatgtgaaaacagaagcacagtgccgttacattggagtcagggccaggatcgggctaggactcctaacccagagctctgctgtttcctcccgcccacctccgggctggttcagcccccactgtggcaagtccagctgtgggcacctctttctggaggtcctggtagcagacaccattgactcagttctggctgggcctggggctcagagacacttgaccccaaaccggctcgtgatgtccccatgtcccagggaggggctggtgtggaccaaccgcagtcaccagctgataagaggcagggccggctgggcagactcagacatgggctcaagcaaaacctaggccagtacagcctgggccatcaggggagcggcccctcctcctgctgtcccactggctcctgcgctacagtcagggccacctgtggcctctggcttcaggatctagacac

SEQ ID NO: 37138 - DNA, 947 bp, Artificial sequence
  DNA replication origin
ggccctgggggtccaccgggtccagggaacctagaagagggaaaaggtgcctgtgacggaagctgccgaggagggcagtggccacaccccagaggagaggcggagggctgcagagccgaaggtcatgggccccagaccaggactcccacagctggggagagaggcaggactctcccacagccaggcttgccctaacaagaggagcctggctgggcccaggacagcgcccactgcctgtcacgggggtccagggcactcacctcacacccagcttctcagccagctgtcccgtgggccgcaccacgatctcaaacaaggaggggatcttcttgttgtacatgtcctgctgctgcagctgctgcggggacagtggctcatgcaccggcatgggcatctgagggggcccgggcggtgggggagggggagggggcgggggcggggggccaccctgcatgggcctgccgttgggagaggttggagcctgcgggccagggggccgaggaggggtgggcaggaggcccacaccagggggcggtttgggcagggggttgatgccctgcttcttcagttcctccacctccttctcatcctcggcacctgcttctgcatcatcggccaacatctgcgggtgtgaaagaacaaaagaaggtgtggacggggtcaggatggaaacggacctctccaggtctgagagctgaagtttatgaggaaaagtccataatacaaggaccttgagatctaaaggcataaagaccacaatggctctgtaacaaaaatcatcatcagccacctctctgctccactctcggggaccagctggtagagggggggccattcctgctctatggcaaaatacacataacaaagcatactgtttaaccatttaaagtgaacgattcagctgggcgcagggactcacatctgtaatcccagcactttgggaggcc

SEQ ID NO: 37139 - DNA, 1002 bp, Artificial sequence
  DNA replication origin
gggaggaagaggaggaggaggaaggggggcggccgccatgttgggccgggccgcggaggaggaggaggaggaggaggaggaggaagggcggggtcggtgggtgtctctcgatcgcttgctcgctcgctctttctcgcttgctttctctcccggcctcatgcgtttcccccccctcgcggcgctcgcccgctctccctcgctctcgctctgtcttttttgggcgccatgctgaggggaaggtgaggaggcgcccctcggaccccccgcgcccgtccgcctgtcctggggagggggcgccgtggggggtgctgcggagacccacgggggtcctggctgcccctgcgcccggagctggcagctacgggcccgcttgcccgtcgcctggcttcggggaaggggatgggggaggggctccggaccctttttggggggatctcgaacaacagccccgctcttaggggtttggggttgggggtctcccagcccccggcagtatcctttctcctgggggaggcacaccctgtcctacttggatgataggtactttagcttaggaggcagaaggtgggggttcattcaggtcccttctccatccttgtaattgggggtcatttgggtgggtgctctatagcacttgtattttttggcggggggtgttttttagctatcccctagaaggccgaattggggaggggggagatgcatctccagcccttttgatgaaaaccccagcctatttttttagagaagactcttccccgtgtttttgctaaagggcaggggtcctctcgcttttcgtaggtaggtgacgtgagggaggattctcagccttgttttgcgggggtaaggtttggtttccctgccttgtagggagaggaagttggtcccgcgctttctcctggggttcccccctctgtcggggtaaaatggggcaccgtctcttccgggagagaaaaggagatttccttgtgctttggcagggcgttaaaggaagcgccccct

SEQ ID NO: 37140 - DNA, 2138 bp, Artificial sequence
  DNA replication origin
gtcgtcagggagcgggaggcggtggtggaggaggtgcggggtggccgggcgggcgtcgggggaacacggaggaggcgaaggcgttgatggcggcggcggcgatggcggcggcggcgactctgatggcggcggcgggggggtcccgggcgcggcctccatagttcctttgggggggaggggatgttaatgcacgaaaaaggactgcttgggcgtggcgggaggggcacacttaagctcggagggctcctgatgggaatggggtatatattttttcggtttcggaatcacctctgcgctgacctccgcgtaggccgcacggcctaggcctcggagggccgctcgccgcctgctttctccgcagcccacccttgcggtcactcgctcactggcgcggggccctcataggggcgagagccccccccccacgcacccccggggggcgggacacccgggagacacggacactggtgggtggttgggtgtaattagcgcgggccgcgcgcgatggagcaagcgaagggtaaggggagaagaggagagcgagcgaggggggtggggggttaaaaagaaaaaaaggatttgagggagagagggaacgggccgcggagacgggccgactgtctcccttctctgcccgccctgggtgccccggctgcccggcccccgccgcaatcaggaattgacacaaaatggcggctcggcccgaaccagcctagaggctgaggcgggaggaagggtgagatgggagggggaactgagaggcggaggcggaggccgtgtcacgtgcaggagaggggtagagaccgcttgcccgaaggccggcggaaagagccgaaggcaaagggcgaggccgaggggaggcggaaatagccgaaaggagctgagcaggagcgaggaggcgacgggggagagccagaaagagctgaaggtggtgatatgggtggggctagagagagcatgagaaacctaggggagccataaatagcctaagccgatcgggaccggggaaggaggagaaactgagacggtccggaaagagccgaaagcggtgtccgggtgggtggcaggaggtggaaacagccgaaagaaaagcagccagggtaatgcgattaagagaatgagctgaacgggcggggctgaaggggagaataaacgactttcaggaattcgccggagagcaagagggaaaaaccgaaaattgctagtttgaaggaaggcgggaagagccaatagttttaggtgggagaatgggagggaaggaattcaggctacggagagggaaaaaaaaaataaccgaaagctggaggccaggtgccgagagtcggaggtttccggagaagcgatgaagcccagccagcccggaggtgacgtcactcgacaacccagtcgatgatgtcatcattggatgcgagaggggcggggcttggtagtccctcaggggagtttaaggacctggggtgtaggacccatggaaggctctcaaatagcagagctagaaacactggccggtgtcgtagactgtacaaacaaaatcttttgaccctcataaccgtcctaacataagctgctgctattcccatttgcagactgaagttcggtgttttaagtaatcggttcacggtcataggattagttctaaaaagcacagcaagattttttttttaagagacagagtcttgctctgtcgcccagactgcagtgctgtgacacgatcatacctcactgtaacctcgaatccagggatcttccttaaatacttgttagctctttctacagtgccagtccctgtgatggagcatgggaacagtttctgtcttcatggaacttaaccgataatgccccaagggagagaaacagagttaaagaataaagggggtgggtggagtgttagaggagggtcttgtaattgttcttttaggctggtacatgaaaaagaagagatggttccaggcagaagaaataccttatttcaggcggggcgatgttgctcacgcctgtaatcctagcactttgggatgccggggcgggcggatcgcttgagctcgggttggagaccagcctgacgaacatggtaaaaccccttctctactaaaaatacaaaaattagcaggacatgatggctcacacctgtagtccca

SEQ ID NO: 37141 - DNA, 1064 bp, Artificial sequence
  DNA replication origin
tgggatctcagtatgcactccttaaatatttgcagaatttaagtgccacataagtgaccacgtgggcaacgccctcggggccttaagccgcgccatttttggggctaggattggttggaccctccgtcacgtgacatgcagtcgccggatcgcctttgagtctcgtgaggtacttttggtcccaggctccgcggacgaggtactgcgcaggcgtgggagggtctgcgcatgcgcagaagcactccgggcgtgctgccggcggcggtaggtggcgcgcgggtccggcgggcggttggcttgagcgggaccggagctgaggcaggaagagccggcgccatggtggagaaggaggaggctggcggcggcattagcgaggaggaggcggcacagtatgaccggcagatccgcctgtggggactggaggcccagaaacggtcagggccggcgcggcttgaggccgctagggtctggagggggcgtctattctgaggcgtttgcggcccggaaggagcgggaaggtgtgatttgaagggaggaggcgggaattctgtgctctgggatcgtctctctcttggggggactggaggagttgattggggatgtttctggaaggtctgggaagtggttgggagggccgttccgaaggatgggagctctgaagggggcgttggggagtcctgagagagcgggagaattcaaactcaggaaatccgaggcccgaaagcggtgattgtggggtttgatcgcggttaggggataagaggggctggggatacgtggaaagggtgaggtgagggacgcagttcattcattcgagggtatgggacctggttccgtgctgcacacaggggagactggactggccaaccggacagacgggagcttacactcttgtgggagctcacgggcgggccagtctgagagaatgcgggttttgaggagttttggagcaagttatctcaaatgggaatcttgagaggctcggagaggctggagggggacggccgtaggctcccgaaaaggttgcttgtgtttggtatggggctgtgtcttgataggacagg

SEQ ID NO: 37142 - DNA, 1219 bp, Artificial sequence
  DNA replication origin
actgtttttggcttgagcacctacctggaacgatggaattgccattttgaaagatatggagagctgtaggtttggtggggtcggggaagagtcagttctcttttaggtttcagatttgttttttttgtttgttttttttttttttgagacggagtctcactctgtcgcccaggctggagtgcagtggcatggtctcggctcactgcaacctctgcctcccaggttcaagcaattctcctgcctcagcctcccgagtagctgggattacaggcgcccgccaccatgcccagctaatttttgtatttttagtagagacggagtttcaccgtgttggtcaggctggtgttgaacccctgacctcgtgatccacctgcctcggcctcccaaagtgctgggattacaggtgtgagccaccatgcccggcctcagatttgtttttttatacaactaagtagaaatatgtgaggggttgagttcagaggtaaaatttgggtgatggtgggtattgtgtgagtacagagtatagaattaatggaggggttggggaggcagacacgtcaggagaatttagtttgagggggtgggagctttcagaaggttttagagggtgcagtggtgggatgggaattacctcaggctcatttcagatctgtggggtcttctttgatggggtggggggatgtcatcatgaggcattaacattggtgggagggttgaaggcacctggaatagattgggaattaagtgatgagaatgtgcctctggacataggtggactgcattgattttagggactgctattttctggatggagtggaaagaggatttatgtgagttggaggaaactttgaggaagcttggtgtgttctgagatcctaaagggttggggaggggattctaaggtactggaagggttaatcgaaggggtttgcggcagcagatagctttgtttgaagtggggcaaagttggtgaggtttaaactggaatgtagttagggaactttcagagggatggggatgatttttctgagaagcagtgaagaatggatgggggcctctgagtgggagatgacctaagggacaagtcagggtcagggcatggaatttgtgggaggtaggaattattctgagggagtggagctgtaccaaatttggtggagaacatgaaaaggattggctgggggttgcaggagggagggaagaggttgtttgtaatttg

SEQ ID NO: 37143 - DNA, 853 bp, Artificial sequence
  DNA replication origin
tgggacttccgccggaggagggggcggcaggcggcccccgccagatgtgcggcagctgctgccctgcgcggctgggtcgctccgcggacaggcaggtggggggtaagtgggtgggggggaatcgcgcgcccgcagagccgcccaaggactccgcgccgcggctggcatagccggagcccgagccagggccagggccagggccagggactaggccgccgaggagtggagctgcgcgcccgtggcccgcggccgcggggactgagggcggcgctgggcggcgcggctcatatatcccgggctatttatagccggtgagtcagcagccgcgccgcgcccgccccctgccgtccctctcgcgcggcccgcagcgccacacagtttcccgggcgccggggcgggccggggaccgcaggggtgggctcgcagccccgccccgcgggaggccccgccccccagcccctggcacggcctcgattttttaaaacaaatattcgaagcccacagcagagaatgggaaatcacaaacatcatgcgcccaccaggcagctctgttcagtttgaacattacacccgcattgcttgcttattaagaaaccaaacaaaaccgcagaaacgcatgtggtgaagctccttactctccccatcccttccccctccttgcatccaaaggaaatctctcgagttggcctctctcaacccctgcaggtgttgcttttactccgtatttaccaggccagaaccagggcttagaatcatggagcattcttagcttagcgtatatgacatagtttttgtttctccccagaattcctttttccctcaatattaggcttcagattcaccatatgggcaa

SEQ ID NO: 37144 - DNA, 987 bp, Artificial sequence
  DNA replication origin
gggtcctaaccccgggtaggctggaggtacagtgggccctggtacttccctgctgacctgctcctcctcccgtgtcccgcaggccccagggagcgccatggcccgcgcacgccaggagggcagctccccggagcccgtagagggcctggcccgcgacggcccgcgccccttcccgctcggccgcctggtgccctcggcagtgtcctgcggcctctgcgagcccggcctggctgccgcccccgccgcccccaccctgctgcccgctgcctacctctgcgcccccaccgccccacccgccgtcaccgccgccctggggggttcccgctggcctgggggtccccgcagccggccccgaggcccgcgcccggacggtgagtgcccgccccgcccccggggtgataggagccgggaagagagagggctggagactcggaggaactggagaagtgggagaggacggggggaggtggcgggcccagccgggccactgggagggtgtggccaatgtggtctttgtgttgcaagaagcaggaagacggaggctgggggtggagggggaggtcaagtgggaagtccctcctggaatctgactgcagtccccgaattgcagcccactgtctcttccgggcctggggcaacagctgcatcccagctcccctcccccagtctgggtcctctagaccccctggaggattcctgttgcagggagagtgggccgagcgggaggactgtcaactctggcctctggggaggggtcgagaggccttttgcttttatttgcatctctttggccaggggctgtcctcagcagtcccggcggaggaaggagagggggaggggccattgtgttgggaagtcccctcggggaggtgggggagtcttggggagggaagggttaaaggtcccctgcctgatgggctgttaaccctgtggtgcccgtggagccccatccctgccggcaggcgctctagggaaagtgtgtcctgg

SEQ ID NO: 37145 - DNA, 2435 bp, Artificial sequence
  DNA replication origin
gccgggtggactccctggaggaggtgacaggagtgcaggcggagagcagtgtgggcgccctgcctccccacaccgcgcctctccaaaccccgcgagggaccctgggccagggtcgccgggtgagaggcggctcggcgttggggcgccggtctgggcgcacaggtgcctcggcggtctggcgggtttgtttacaaacaatggggtgcgggctcggcagcgccccctggcggccagtgcggccccggggaagagggtcgaccccaggggtgccccagcccccaaagtccgggaggggcgggggggcggcacggaggggcggccacacccagggcgcgcgcccgctgggggcggcgacggggggcggctcgcgggccgtggagtctgcggctcctgcgggcgggggctgcgccccagcaacagccggttattggccccgcgctcgcctggcgggcggggcgggcgcacgtggcggcggtggggggggctgtgacagcggaggggggtgtctgggaccgccgtgggagcgcgcgtgtgcggggttgtggatctgcaggtgtctcgcctgggtgtgtgcgcgtgtctggctccgagtttgtgctgggttctgcagggagtggtggtgtcgatccagaggaatgttggggtttctgacccgtcggggtgtctgcgtgagtccccgcgcctgtttgtgtggggttctgtctgtgggtgccctgcttgtggggtgggtggacctgcgtgtgttgtcggtgagagttgtctgtgtgtgctgttccgggatgatactgggggtctgtggtgcctgcgtgtgctggggtgtggaggttgtagtgtgtgtgtgttgctggagtgagctgtttgtgtgtttatgtgtgtgtcttgcccgagcgtgcgatatgtgtgcttgtgtcttgcctgtgtgtttctgtcttggctgaggccgtctctgtatctccggggcatgtgtcttttgcccagcgtttgtgatgctgcgcctgctaaatgcaaatgtctgttttctgtccaggtgtctgtgtgagttgtcaggtgtgagtgtgtgtgtgtatgtatgtgtgtggtggggggttgtttcagtctgggtttggcttgtgtgtctggcatcagcgtctgggatttgaggacccaggatctgtggggtctatgcagtgtagacggtgggtgttgctggcagcctctggatggggttgtgtctgagcctgtgtgtgtgtgtgtgtgttgggtctgaggggcttgtcactgtgatcggctggctcatgtgtgtcatgtgggctgcgtgtgtgtagtgtttatgtcagtcacgtgagaccagtgttttctgtgggtgcgctaggtgtgtgtgctgctgggctgtgtgggattagagttagctgtagggtgtgtgtgtgtgtgtgttgctgacagttggtgatgatgtttgagggttgcgtgaggagggtgggttggtgtctggtggtgtgttgaggtctgatggcatgtgtctgtgtgtgcctgatctacgtgtgtcctgagagttggtgacatgtgggtgtgttttgggggtgttgatgtatgtgtgtccgtgggtgtctgttttgtgttgatatgtgagtccagaggtgtgcaggtcttatctctggagtgagtgtgtgtgtgtggagaggggcatgtttgggaactgaggcagtgcctagcttgtgtgtgtgtgtttgtgtttgcaaaggctgcattgtgtttgcatgtgcccctgggcatatcaacagtgggtcagtgtgtgagactttgacagtttggatgtgtggggatggattgtgccagccagtgtgcgcagtatgtagagtgcttgtgatggtctgtctggatgctcctgctttggtcgggggtgtgtgtgtattgtgtgtactgagtagtgatgtccgagactggggccatctcagtgtttgtgtgcaagtgggaggtggggtgggcggtcaggctggccagtcccgtgtgagtccttgtgtgtgtgctgtgggggcctcgctgtgcctcactgccctccctgtgtgcccgtcgctgtgttgggaaagttgtccccaccagcccatgctgtgagtcccaagtggagtgagtttgtgttgtgggactgtcacagccctcatacacacacctgctagacccctccatccgtcctgtgtgagccctgtccttgctgtgagagccgtcctgtgccccctgtccctcctgtgtgcccatcaccgtatgcacgggaggctctccaggccagccaggacccggtggtgtcatcccccggctgggcgtgtctctgtggggccgtcaccccctccgcatgcacacacacctccactcttctccatctgggtcctaaccccgggtaggctggaggtacagtgggccctggtacttccctgctgacctgctcctcctcccgtgtcccg

SEQ ID NO: 37146 - DNA, 1187 bp, Artificial sequence
  DNA replication origin
gcccaggcatgtccatgccaggtgcccagggctgcttccacgacgtgggtcccctgccagatttgtggtgagtgtggccaggtgtgcatgctccgacgtgtgtgcagtgggccagttagcaagaagctgtcacaggtgtgactttgtgacatgtgtgggtggtcagtttcttctatgtctgatttggtttgtgtctctgaatgtcagtttctttcctttatttttatttttaagacggagtttgctcttgttgcccaggctagagtgcaatggcactatctcggctcactgcaacctccgcctcccgggttcaagcagttctcctgcctcagcctcccaagtagctgggattacaggcatgcgccacaacgcccggctaattttgtatttttagtagagatggggtttcatcatgttggtcaggctggtctcgaattcctgacctcaggcagtccacgcaccttggcctcccaaagtgctgggattacaggcatgagccaccgtgtcgggcgaatgtcactttctgatagttttaatgtgttagctgtgaaattgtgtgagtgcatttgtgtatgtccctgtgggagtgtgatttggatttggccgtgtatccaggtatccctgtaacaggtgtctgtgtgtatgtgtgtgtcccctgtgcctatcagcaagtttgtgtttcctgataagcactccgcctatgtctgtgtggttgcaccaccgtgtgtgtggtgtgggtgcctgttcggtagggttgtttgtgaacacagtttgtgggcccaggtgtgatcatcagtgtgggtgtttctgcaactgtgtgtggccctgtcattgtgtccgtctgcttgtccaggggaccctgttagtgagtctgtgcatttccgtctgggtgtgtgtaagtgtgagccccatcagtatgtgagtgtgtgtgctcatgcccctgtccatggtgtggatttgcgagactgtggccttgtgtctgtgagtacatcctctgggctctgcctgcacgtgactttgtggaccctggaacgcccgtcggtcggtctgtgtacgcatcgctgggggtgtggatctgtgggtcccagtcagtgtgtgtgtccgactgtcccggtgtctgggcgatctccccacaccccgccgcacagcgcctgggtcctccttgccttgggctaggccctgccccg

SEQ ID NO: 37147 - DNA, 1198 bp, Artificial sequence
  DNA replication origin
accactggacccggcctggacccctattttttttttttttttttgagacgcagtctcactctgtcacccaggctggagtgcagagtggcatgatctcagcttactgcgacctatgcctcccaattctcctgcctcagcctccttccagttcaagcgattctcctgcctcagcctcctcccagttcaagcgattctcctgcctcagcctcccgagtagctgggactacaggcatgtgccaccatgcctggctaattttttttttttttactttttttttttttttgagatggagtcttgcttgccctgtcacccatgcttgagtgcagtggtgcgatcttggctcactgcaacctatgcctcccaggttcaagcgattctcctccctcagcctcctgagtagctgggactacaggtgtgcaccaccacgcccggctaatttttgtatttttaatagagacagggtttagccatgttggccaggctggtcttgaactcctgaccccaggtgatccaccggcctaggcctcccaaagttctgggattacaggccgtgagctactgagcccggcccaggacccctatttttatggggccaagatgcctgcattctcttctgggaaggatcatcagccctgtgttcaaaagccatgatgcctgaatccagtttggggagagacagcaagtccctgtgttcatggggtcaggatgcccaggtctacttctgggaggaggacagttcgtgtctatttgcacagatgctcatgttgaggctggggtctcaaactagtggtccgcaggccgtccacgagtgcgttttcttgactctgtgcagtttcgtattttgagtgttaatgcctctcccacgggcgcacagcacagaggaacgataactccgacatgggttcaaatgatgaccttgagcaagcagcttctccgctctgtgcctcagtttccctcactgtccaaaagggatctgcacaggcaggaccaaaaatattgtgaagataaaatgagttcgtatttgtaacatacttagaatagtgcccggaggtagtaagccggatgtgaagtgctggtgagacaaaatagagctggttgactgcagacctaaaaccgtctcgtctccaagatcttgtctgccattctgggcaagcagatttcgcagcctggggagagggagttgggaaggacttaact

SEQ ID NO: 37148 - DNA, 1288 bp, Artificial sequence
  DNA replication origin
ctgttaccgggtaaacttccccgccccccccagcgcggccattagtcaaccccccccaggatgatgtcatcgcctcattctggaggctgagtaatcctcaactccgccccgccaggtaccagggtaggggcgggccgcacctgggctcaccaagtctggagctggggtctggagctgcaggcggctctgccttgggtctcccgggagggaggggactgaggaattgggcctctctgaagtggcccagccatgcacgttacggtctctcgaggctgggggctcccagtctggatccacggggccaagtaaaggtgctgcagggctggatcttccagacctgggggtctgggactggggagggccccccaacctctccactactccctcctccccagccacatcactgtgaggggctgggtcgcttggccaggtgtctggggaatcagagacacggggcttggacttctggggtccttggcactatgaggcctgggaccctggcgcaaggtggggggtcggtgccaacaggtaaggaaagcggctctgaagtcagatgcccacgtcctgggagatcaaccacctggaccctggggaaaagggctcagaggggtgggaagtgggcaggtctgcaccttggagctgggcaggtggtcccacctaggtaaactggacacctgagggtctggtgactgttagggacaggagtgtctcccagcatcaatgtggtgagggccaagatgcccaggagctctgtaacatctcagggtcgggagcccaaaggcctgagtccgtgtttcttgtgggagtgggatgttcagccctagttttcctgggatcagacatgactgtgtccccttctggggggaccctgagttcttgtgtcccggggctgggacatctgcatctcctaagaggagggggctcatctccttgttttcacggggccaggcatgcctgggtcctttgggggtgcagtgacaccctatttttataaggccaggacgcctgggttgttttctgggagggaacttcaaccgttatgttccagagccacgatacctgcggggcggggagcgggggagcgggaaacaaccagtccctgtcttcacggagtcaggatgctcaggtctccttgtgggagggggacccttggtggcacaaggccaactccagggtgccattctgggggtaggaacagaatgcacaaccccgtttccagcccatcccaactgcccatcctcacccgagagtgcgggacaggggagcagggaggtggatggtgcacagc

SEQ ID NO: 37149 - DNA, 2257 bp, Artificial sequence
  DNA replication origin
acctggccaagcgacccagcccctcacagtgatgtggctggggaggagggagtagtggagaggttggggggccctccccagtcccagacccccaggtctggaagatccagccctgcagcacctttacttggccccgtggatccagactgggagcccccagcctcgagagaccgtaacgtgcatggctgggccacttcagagaggcccaattcctcagtcccctccctcccgggagacccaaggcagagccgcctgcagctccagaccccagctccagacttggtgagcccaggtgcggcccgcccctaccctggtacctggcggggcggagttgaggattactcagcctccagaatgaggcgatgacatcatcctggggggggttgactaatggccgcgctggggggggcggggaagtttacccggtaacagcggctgccgcacggccccgcccccggggaagggctgggagggggaggcacagcctgcgctggcgcacacacaaacacacacacacacacacacacacacacacacagcgcatccctcccccaccgtcccacatctaacacagcttcctggggcaagggcaggggtgcgggggttgggtgtttgtgtgactatgtgtgtgtgtgctggagtcctctgtggatttgtgtcagtgtgctgttgtgtcagggggttcacacattacggtggggttgtgtcagtgtgtgctactgtgtgtcacttgatggattgtgtgtcagtgtgatggtgtgtgtcagcatgctacatttgtcacaatgctacatgtcatgggctgctgtgacaatgtgattgtgtgtcagtgtacaattgtgtgatgttctggtgtgctgtgtgtgatcatgatggtgtgatgtgtgtggttctgtgcagcatgctggtctggcagtgagatgtgtgtgcccatgtgattgtgtcctgacgctgggatcgtatatgtgtcagagtgatgttgtgttgggggaagatctgtgaaggtgctatgtcactgtactgttctgttgtcatggttggatgtgtttgtgtaatgctgggtgtcactggggttgtgtgtgtatgtcatggtgatggtgtgtacgtgtatacaatgctgtgtgtatatgggattgtgtgtgtcactgagtgtgtcagtggtacttgtgttgtgggtgttgggactgtgtatgtatcactgtgatagtgtatgcccatgtgctgtgctgggtgtcgggggaagatgtgcatacatactactgttattgtgtgtgcctggacaatgcggtgcacggtgggattgtgtgtgtgtgtgtgacattatgactgtgtctgaaatgcatatctgtgggactgtgtatcaccgacagtatgtgcatgtgcaatgctgtgtgttactgtggttgtgtgtcattgtggttgtgtttgtcagggtgatgttgtgtgtccatggaactgtgtgtctaatagattgcgtgtatgcaatattgtctctcactgtgcttgaatgtgtcactgttgcgattgtatcactgtgatctagtgagtgtgttgggaccaattggttgtgggatgagtgtcactgtattgattgtatgtcactgatactgtgtgtgtcagggtgatgttgtgtgttcaagggactgtgcatacctcatggagattgcatgtgcctgggcagcactgtgtgtgcctgtggttgtgggtctggggagtgctatgtgtcctgggactgtctgtgtcactaagttgtttttttgttttgttttgttttgttttttgagacggagttttgctcttgttgtccaggctggagtgcagtggcagcgaccttggctcattgcaacctccacctcctgggctcaagcgattctcctgcctcagcctcccaagtagctgggactacaggtgcatgccaccacactagagacggagcttcaccacattggttaggctggtcccaaactcccgacctcaagtgatctacccgcctcgacctcccaaaatgctgggattacaggcctgagccaccgtgccaggcctgagccaccgtgcccggctgtcactgatattttgtgtgtctctgtgatgctgtgtgtctgcgtgttcctgggacctgtgtgtctgtcgctgtgtgtgtcattgtgattgtgtatgtgcggtgggcgacgctgcttgtctctgggacggtgtgtgtgtgtgtgtgcgcgccgctgtgattgtatgtcagcgcgcttcgctgggtgtcgggggaagg

SEQ ID NO: 37150 - DNA, 1247 bp, Artificial sequence
  DNA replication origin
ctgaggcaaggagaatcgcttgaacccgggaggcagaggttgcagtgagccgagatcgcgccactgcactccagcctgggcgacagagcgagactccgcctcaaaatatatatatgtatagtccatctcccctggtggttgtgaggatgaattgggtttgtatttgcaggcttcctgagctggcgacatcgtctggtgcaaaggtgggctttttgcgcggcgcctgtgcttccgccttctgccgctcgggggcagcaggcgtccggcggattcgcccgcgcggccgggccgggaaaggagcgggggcaagtccgcaggaggaagctgatgaaatcctggccaactcgcagtgagctcatcccgcccgggcgcctccggaagccacggggccgcccggcctccgcctggcccgagcgataaagctctcgtgccgaaccagggcgggaagtccttcctgaagtctgccctgcgtggggcctgctgccagaagcctgggccggaggggaggggcgaggacgaagtagcgaaccgtccgctggctgtcttagaaggatgaaaagtgaattctgagcctggctgtgggagtaagagagagggcatcggggaagggagaggggggcgggagagacagagacaagaggtgggagagacgacaggaagaagagacaaaggtggggagactgaggcagaggagggagagagagagagacagaatccaggagggacagctgagagagtcagatggagcgacagagacagagatgggggagacagagacacggagagacagagatgatggagacagagactgggagagacagagatgatggagacagagactgggagagacagagatgatggagacagagacagggagagacagagatgatggagacagagactgggagagacagagatgatggagacagagacagggagagacagagatgatagagacagatggcagagacagaggtagcggagagagactaggagagacagaggtggcggagacagagacggggagagacagcagtggtggagactgatgggagagacagatggaagaaacagagaggggatatgagagacagagacaaaggcagagagatctacagggagacagagacaggagagataaacatgggaaagagagagacagagagacccagcgagtggcagagataggggagtcaggagcgacgcaagggtgtgggagatggagtcaaagtagggggtcagaggtg

SEQ ID NO: 37151 - DNA, 2414 bp, Artificial sequence
  DNA replication origin
ctggaggcggaaacagcttgaagaaagaggtagaggccagggagtgaggacggtgtctccttttcctggaagttggtaattcaggcagaaggaagttggatgagcttgcggaacacccggggggccagtcggccccgctcccgcatccatcgcggaggcgcggcccctttaaggctcccggaaacggtcccacaggaccggaagtgaccctctttatttcccttcctcacgtggtgcaggcaggaagtgacgcgcctggcccgggagctgcggtcgcagaggccgacggagccggagtcgcggacgccgcggggtctccgggacaggtgacctgggggagggggccgggagcgcgcccagagaaggcggggcctgaagccccacgtggcggggagtgcgaacaggcccgggcggggtcggagttctctgcggggggcggggacaggacgcccacatgggaagctggaggggcgctggcggggcgggccgttgggtgggtgggcagggtcggggcggggcgtggccagagcctgggccggcggctgtgggcgggacctaaaagttgtggctggactgtgggcggggccatagtgttgcttgttcagctgtgtggcggggctcggacgccgggcggaagctctgtgggcggggccagaaagttttgccttactggaagtgggtccagattcttggccgggacgttgggggcggacccagaggctgacgcaatggcgggggcggggccacaatgtagtgggggagccagggggcggggccagggtgctggcggggaatgctgggggtggagccagaaagtttcgtctgagccacgggcgcggccagagcgttggccgggaggcggggaagcggggagttgagccagaaccctggggaagccatgggcggggccagatgctgacgcaacgaggtgtgggagggagtcagggggcgtgtccaggaggttggccaggccaatcggaggcggggccagagggttgactgggcaggccgggggcggggctggaataataataagagatggtaggggcgggtgtaggctgttgcctgcgagccaggaggcggggaaagagcgtggctgggaaagtcgggagcggggccacattaatggcccatgggtgggggcggggccagaagtctggcgggaaaggcggggccagaaagttttttcccgagccgtgggcggggccagagcggtttccaggatgtcggggacgtggccctggcattcccagccggattgaggctggagctttgcacagaaaatctggggcgggcctgggtagttttgtccttgttggggcgggtggagtattcagtggggcaaaacgccagttccaggaagcctcgccagtgagttctgggcctgtgtacagaatcctttcgggggaggcgggaggctgtcgaccttccgtagggcgctggagacgggactaggacgtccctgaggaaggcgcgggcttggaatgttctctgagagcttgggcagccaataagagtggggttcggactttctttgagcgtgggattgggaatgtttctgaaccttacctggtggagctagaatattcgcctggatatgagaggcaccaggatgagcacagggaggtgggtctggaactttcttttgcaggctggttggaggggttgtagttggaactctcttgagatagggaacccgggctaacactcataccacagggtgtggcggctggcctagaatcagcctttggaggagagcagtgttggatacttaagcagtgggtgggggccagaacatccccaaggtgggtttgactagatcgtttacatgggaactgggtgagtccacaaagatcatgaaagggctgagtctgaatttctatggagaagatggaggtggcagttgaaaggagggagagtgagggctacaattctcttggggtacagggttttttgtgtatggctgtgaggatcccgcagtatgttagagggtgaagtaggttggggggccattggcctttgtcctttttttccctctgtccccaggaaccctcagtgctgcgtctagattctgcaggggaggtttgctgggaccttggctccacgcagccagcgaaatggtgaggctgaaaaatggggtctctagaatctgagttttggggaagggggcttgggaggatgggatccataggggcagactctcagaccctgggggaaagtccctggtatggatggaggtttttccttccatccctcaactgcctcccggtctcaggcagccacactcgatttgaaatcaaaggaggagaaggatgctgagttggacaagaggatcgaggctcttcggcggaagaatgaggccctcatccggcgctaccaggtgccctagccccgccctgggagaccccatcccc

SEQ ID NO: 37152 - DNA, 1904 bp, Artificial sequence
  DNA replication origin
gaaatcaaaggaggagaaggatgctgagttggacaagaggatcgaggctcttcggcggaagaatgaggccctcatccggcgctaccaggtgccctagccccgccctgggagaccccatcccctctcttccccgcagtgagtttttctcacctctcccttccttaaaaccttttcatggctccccatcactgtcaggataaaggccaaaggccttagcctgacatcccttctttcattccattattcattcattcattcatttgttcacaaatattccccaagatctttaccagccccagtgctgagtggtgctggggatatagctgtgactgagacagacccaggcctgccccctccagggtccaccgtctagtcagggagacagccctgtcctcagggatgccccagagcagacaagtctggaatcaggaaattcaggggtctgtgggagtccagaggaggctcttgacccagccttggggatatcagggagggcttcctggaggagtggactctgaggcttgagtggtgagtagacaatagccagttgaaaaggcgaggggaacatgtttcaggcagaaagaacagtttgtgcaaatgttggaagcaagagagagcttggagcttcaagttggagggttggttaggagagaattgacctgggcaggtcagcaggggccaggctgtgctaggccctgaatgccaccaggatgagtttggactttgtcctgagggcactggggagccagggagagccttgagcaggggtgggaccggtcagaacagctctttaggaagacgcctctgggtgctgtgcggtggtgggtgcgaggaggtgatactggagcccagagaccaaggaggaagctggggctggaaccctagtgggagaggaggtacctggctcagggcagggctgttgagagggactcagttactgatgggcagttcagggcagggggaggaagagggaggatttaggacaaggctgctgagtaggtgatgtggctctccctgagatgggatctgggaggtggcatgggtttcatttattcattcttcatgtattcattcattttaaaaaaggcatattgaatttcccttgtgggccaggcagcgttctagacttgggatacacgtcagtgacatacatcactgaaagcagacagacattcctgtccccaggcagattctgccgtagtggaggaagcagacagtgagcgagacgcatatggtgctgggtgcaaatgggatgagaacagagagggtggcaggggagctggtttccacagggtgctcagggaaggcctcacgagaaggcagcattggagcagagacctacaggaggtgaggggttggagggtctctgggaaaagtgttcctggcagagggatccgctggcgcaaagcccctgaggcaggtttcagcctggtatgttgtgggaatagcaaggaagccggagtgatcgtggggagagggtgagagatgaggtcggggaggtaccaaggccagaccccacgggtcccacaggctgtggggaaggctgttactcagaggggcaccacaggaacgttctgagtggggctgcaacgtgctgaggtttgagggatatgagcggccttcttgttcagagtccaggagagaggcctgggctggggccagacttaggaggagttcaggggtctgggagtccgtctggcagacagggcacctgatgcttccctaccccggctgtctgctcctaggagattgaggaagaccgtaagaaagctgaacttgagggagtcgcagtcacagctccccgaaagggccgctcagtggagaaggagaacgtggcagtggagtcggtgagctcgtcactggggtgtgggaccctgaggatggggaggggcagagggttgagg

SEQ ID NO: 37153 - DNA, 1053 bp, Artificial sequence
  DNA replication origin
cttctgcctcagcctcccgagtagctgggattacaggcgtgtgccaccacacccggctaatttttgtacttttagtagagatggggtttcgccatgttggccaggctggtctcgaactcctgacttcaggtgatccgcccacctcagcctcccaaagtgctgggattacaggcctcgtgagccaccacgcccagcattttttttttttttttttttttttgatacagagtctcattctgtcgcccaggctggagtgcagtggcatgatctcggctcactgtgacctccacctcccaggtttaagtgatcctcctgcctcagcctcccaagtagctgggattacaggtgcccaccaccacgtccagctaatttttgaattttcttattcccgtgtaagtgctagaaccagaagctcacaggggaagtgagctgcccaaggccaggtagctcacagaaccagattcaacccatgtccacggtgggctgtaagccactcagctagacagactcccaccctgctgacctgcacgtcaggggtgagtgaggtagttacagtaaaatcactgctccccataaccaaagccggggaccaagagaaacacacagaaacagaatgccacacagagcctgtgctcacaagcacaccagatagagagagcccaccagacagacacacagtgccagaaagggaggagagatggggacggaggatgagtgggcaagcatgcaccagagagcgagaaaaagggagacagagagggacagggagggacacgcagcactaagcaggagaggggagggaaggaaggcgaggaggaacaagaagacggggagcaggagtaggagagaaagagacaaggaaaaacacacgagctctaggcgtgagagggaaggaacagggggaactagaagagggggagcaggaggaggagaaggaggtggaggaagagagaaacagagccagatgcaaaggctcagagagagatactgaaagatggacacacaggacaaatgtgcatctgagaggaggaaaaaacagaaacagacaacaga

SEQ ID NO: 37154 - DNA, 751 bp, Artificial sequence
  DNA replication origin
cagcctcatcagttcactgctgacctggagcacgctgagagcaaatggtcagatgccagcaggccagtccgaggagaggagcctcaggcctgctgggcagcccgtctcctgcaccggcagcttaatagttctccctgaagctgggtgtccctatctttatccccccaggagtgggaggagcggcgcaggcagaacattgagaagatgaatgaggagatggagaagatcgccgagtatgagcgcaaccagcgggtcagtggtgcgggtgtccccgaggcagggccgagctgcctgggctgcggggagcccgcgccaaccccctgctctgctgcctgcaggaaggggttcttgaacccaacccagtgcggaacttcctggacgacccccggcgacgcagcgggcccctggaggagtctgagcgggaccgccgggaggagagccgccggcacggccgcaactgggggggccccgacttcgagcgggtgcgctgtggccttgagcacgagcggcaggtgggtgttggcagtgaggacacctcggggctctcagggctttgatggggactgcatagcaggaaccagacagatcagggccatggggcctctccttttttgtgccacagcacaggactttttttttttgagacggattctcgctctgtcacccattctggagtgcagtggcaccatctcggctcactgcagcctttgcctcctgggctcaagcaattctgcctcagcctcccgagtag

SEQ ID NO: 37155 - DNA, 776 bp, Artificial sequence
  DNA replication origin
ccagtagctgggactaaggtgcccaccaccatgcccagctaattttttgtacttttagtagagatggggtttcaccatgttagccaggatggtctctatctcctgacctcgtgatctgcccgcctcagcctcccaaagtgctgagattacaggcgtgagccaccgctcctggctttttttttttttttttttttttttttttgagacagagtcttgccctgttgcctaggctggagtgcagtggcgcgatctcggctcactgcaagctctgcctcctgggttcatgccagtctcctgcctcagcctcccgaaaagctgggactacaggcacccgctaccacgcccagctaattttttgtatttttagtagagacagggtttcaccatattagccaggatggtctccatctcctgacctcatgatccgcctaccttggcctcccaaagtgctgggattacaggcgtgagccaccgcgcccggcgggagaagagtttggaggcagagcccctgccttgatgaggtttcttctggtgggagctgagtaaatgaaaatatagtgagatgtgaggtcctaccaagtgttgtggagaaaaatccagcagctgaggggacagagggatgctacttaggagatctgagagggcctctgtgaggaggtgccacctgagcctagttgattgtgatctctgccttgtcatcgcttccctgtgtgatcctgagcaagtggatgtgcctcggggcttaggggcggggtagggtgcgggacatcaccctg

SEQ ID NO: 37156 - DNA, 674 bp, Artificial sequence
  DNA replication origin
ctggttcctcctcatcaccttcttccacctcgatctcctcctcttcctcatcctcacttatgtcctcccattcttcatcctcttccccctcattctcttccccctcgtcttcaggaggccggtgggcaggagctgggatctcgggtggctttggggacacaggcaagtcagggcaaggcacaggtcctgagcccccaccccaggcccgtgccctgaaccacagcccagcctcacctgcatgggtgtctccttgggggaagtctcgggggaagtaggctgtggagtctcaggggctggggatgctgccccttcttttgtctcccagcggtcatcatggtcactagagggaacagagggaggggtgatgcctgggtggagagtagacaggaggaaggggcttcctgcctccaccctccctagggaggagctgcccagagcatctggcatggtggagggctgagggaatggcggatgtgtgtccccatgtgtcaaggacagaacgaaagtggggcaggtagcaggagaggagatgggtgacggcagaaaggggacagatgagggtaaaaccaagagccagatcccaagcccctcaaaccacggacctgcgagatagacagggccaagacaaagacagggacagacagatgtacccacaccttcacagcaagccaaag

SEQ ID NO: 37157 - DNA, 1691 bp, Artificial sequence
  DNA replication origin
ttgagagtgtatgaagctggctgcctgtgtgtgtgtgtgtgtgtgtgtgtgtgtgtgtgtgtgtgtgtgcgcgcgcgcgcgcgcgcgcgcgcgcgctagaggggtgtggctggtgggggacccttggggctgggccctgggacccagtgtgccccacagccctgtcagctgagggggtagcgcagcccatgctcttctgtactgtcatgcccgtctctggaatgtccactcccagagcctgccccagcccttcgagccccctccccaataaagaattcacatcctccaatgacattcccccaggtgtgtccttgaacccccttcaactccccctgggccttctctcttggggtggggagatgtcaggcgggaaagggggcttgactggggctccccttccctaggaggtggccagtcagcccctgccttcccggagagtgggcccagcctccgaggaacccaggaagctgaagaggaagggtctgaggcaactccaggtgggggagtgcatggggcatgggatggaggccgctgcttcctctttctctggggctgaggggcagagggcttggggggagtggggtgaatgtgtgtaggtagcagttggaccatagaggtgaggtgaaaagggtgagctcggatagggatggggggctggagccgggtggcaggggtggggcaaaggggcaactttatgggccaagccaataggaatttggtatggaggttgaggaggtggggttaaggaaaggattagaattttggagtcgagctcaggggttttggaaagcactggtttaagagtaatggggtgtggatcggatgccttggctcatgcctgtaatcccagctaattgggaggcgggaggatcgcttgaacctgggaggcggaggctgcagtgagccgagatcgctccactgtactcccacctgggcgacagagcaagactccgtctcaaaaaaggtggttggcgttggtgtactagggcaggagctataggcagactacgaaatttgaactggctcgaaaaggccaaagagatgggcaagggcagaaaactggatttaactgtggctgggattagagttccgaggtgcaacctagtggggcaaattagaatagacatgcgtacccgatcagcattttgggaccgacgaagtgcgagcaagaggccaagcccctctccacctacactccgtaggagtaagatttcgaatctcagatggcctccccttcccccagagtgggattaggattttgggggcagagccaaggaaggactggttagaatagcaggcgttggcgaaggaaaggggagggcgggtcctctaggactggcttggtggaggttgatgaaggccgtgagatggggcgggggtgggagaggacagtttgcagccttgggtggcgcgggggcccagaccctctgtcttgggccacttgttggtcgggagccagatctcgccacacccgcgtttcctcgattgtaaacggttatgttgggagtgtttgctgctgcgtgggtccgctgagaggattagtctgggccccgtaaaccgcttagcgccgagcctgctgtggcaagggctcgaactggatgagagacgtggctagacgggggaggggtgctgggccgggggggaggtgggaagactgctcccctccgctgactcagccccttctctcctca

SEQ ID NO: 37158 - DNA, 1167 bp, Artificial sequence
  DNA replication origin
ccgcgtttcctcgattgtaaacggttatgttgggagtgtttgctgctgcgtgggtccgctgagaggattagtctgggccccgtaaaccgcttagcgccgagcctgctgtggcaagggctcgaactggatgagagacgtggctagacgggggaggggtgctgggccgggggggaggtgggaagactgctcccctccgctgactcagccccttctctcctcagaggcaggccccgaaggccaggagacggcggagatcaccgacttccagagggtgcgtttctgcaaggtggtggcggcccctccgctgccgggggccgctcgctgaccgcgcccgccggaccgcggcctccgcgctctgcactaacctcccaccgcctcgctcctctgtcctctgcttctgccacactccagccaggagagggttaaatctaaggggggaggagccagggtctgcgagccgggcggggccagggcagtagtcgggtgcaggccccaccaacgggggacgtcacggcactgggacggctgggacgcttccgcgttagtctcccatggaggccctgggcggctcgagccagtcttcaggccgaatctcccgcctccaggattgcatccgaggcctggcagccggtgacacttccgaagggcttgaattactcgggcgccagccctgtcgtattaaacgcagtgcttccgctcacccttgaactgtgtttctggagggggcaggctgggtcgctgtgcttggcgggcttttctgtggcggaagaggcggaaggaaggggtcttcctccacccttctgatccgtcttccctcccccctcccgcaggcctccccgaattcctgaagacgctgctgggaggggactgaagcttccccgccttgatggggagggggcgtgaggaggggtttatctggatttccaggctgtgttctttctaccccagagcctagtctggaccccttggctctagggagagggaaaagctgaccgttggggaggagctgggagaaggggcgcgattgcggtgaggggcggagctggaacctcggggcctgaggtgctgaggatacctgaaagcgggctgagagtgtgctggaggaggcgggtcccgcgggggcggagctaggctgcctgggcggggccggaatcctgacaggcggag

SEQ ID NO: 37159 - DNA, 821 bp, Artificial sequence
  DNA replication origin
tgtgcttggcgggcttttctgtggcggaagaggcggaaggaaggggtcttcctccacccttctgatccgtcttccctcccccctcccgcaggcctccccgaattcctgaagacgctgctgggaggggactgaagcttccccgccttgatggggagggggcgtgaggaggggtttatctggatttccaggctgtgttctttctaccccagagcctagtctggaccccttggctctagggagagggaaaagctgaccgttggggaggagctgggagaaggggcgcgattgcggtgaggggcggagctggaacctcggggcctgaggtgctgaggatacctgaaagcgggctgagagtgtgctggaggaggcgggtcccgcgggggcggagctaggctgcctgggcggggccggaatcctgacaggcggagttagagcggggggcggggtcagcgcgcgcgggtggggctctggccatgggcatggggcggggccgtcagcgggggcgtggtcggggtgtcgcgcgggaacccgcgcgggaggagagcggggattccggaactagagtgtgggagccagaggccgtagcgggcagggctcgagcactggagtagagcagtccgacaggtagagaagtgagactggctgcggcacagggcgggttagggctccaggcagggcttgagcgggacgagggggcgggctccgaggcgggctagatgcctgggctggatgaagtccgagtctgggaagagaaccgtgttgtggcgggaggaggcggtgattggggtggtggggctaagcgcgggggcggggctggagcg

SEQ ID NO: 37160 - DNA, 1746 bp, Artificial sequence
  DNA replication origin
ggaggcgggcggtttagagagcggggcggtctgcggggtgggggcggggcctggtgggggcggggcctgtgcggtctgcggcgcggagccgagtgggctgcggggatgcgggggaccagctgcgtgggcggcggcgccgagagccccggaggcgcggggctgagcgagggcccgcgggggcgctggctgcgcttggctccggtatgcgcctacttcctctgcgtctcgctagctgccgtgctgctcgccgtgtactacggtctcatctgggtacccacgcggtctcccgcggcacccgccggcccacagcccagcgcgccgtcccctccgtgtgctgcccgcccgggcgtgccgcctgtcccggcgcccgccgctgcctccctctcctgcctcctgggagtccccggcgggccgcgaccccagctccagctgccgctgagccgccgccgccgctacagcgaccctgaccgccgtccgagccgccagacacccagagagacgccagaggccgcggaggggcgaagacccgggtaactctcccttccaccccaacccggatcgccagccctcgagagctctgtgctccacgccgaggatgcaccgtctctggattggtccggccttcttcctaatgacatcgctcagcgtctctggagccgtcatcccgcggaatgggggcccagggggtgtcagctcggggccttgcctcttgcagctactctgtggtcaggccgggtcctccaccatcaggaagatcccatcctgagctctgtctcctgcccctcctgctgtgggatgctgagcacagagcccacagcccatctgcctcttcacctccctgaatccgtgtccatctgcaataaacgacagcctcggctgcctcgtgctgtgtctgtcctgttgtctgcagagatgcctcccctcccaagtttgtgtgggaaagaccttcctggggtgtggcctttgtctgttttgtcccgggtgggctgttccccttccttaaggagctcttcttttcttggagtagggagaagcagcttagcagcagcagggcctttgaaggtcagacagtgggaagggcttcccagttttttgtgtgcttggagcaaaggacaaatgtctctggggagaagcagagtgtctgccctcgtgttacagcacaggagacaagaggaggggtggggtgatataggacaatagctggggttctgggaattgctgttggtgtaattatcatgtcagggacagaggctgaatcacccagggatctcagttggctgccgagagggaacgatgctggcccacttcctggggtcagagagatgagagtggatggcggcggcggtggtgttgcttctcagcctgtctggaaatctcagagccaatgaccaaagcgctgtgctgccttggaagactggtgcagcctctggcctggggcgctgctaggaaaccaaggccgggaaactgaggtctagcttctgggcaaggagtccgaggtggggaggccatgttccatcctggaagactgaggcctggctctggacagggcctgggatctgacatgcaggaagctggttcctgtccagcctccccgcttgagctggaggccttcccaggagagtgaggctgagcatcttctcccacgctgtggctcctggagatctgtggaggtggttaggaaggtcagctgctctgctcacctcccctttaccccaccaccactccccagagggtggttgtgaaggg

SEQ ID NO: 37161 - DNA, 1243 bp, Artificial sequence
  DNA replication origin
ggggttcaggacggtcacgtggcacagataaagaggagaaggctttggctccaggacttagaggcatcccggtctgcagagtagatgcgtgaataagatcccagggctgcagggagtgggggtgggtgccggaaagggcacacagcctgactcagccaagcccatcatccacttcccttccctaccacttccccttcggaacttgttgacccagcagattctccaagctacagatttggcaattgtctgccccttcagcccacttccatactgggcagagcaggtcaacaccagatgggggctgccttggaaagactacctggatcccactccttggcctccgactcctactctttggcctcccagcttttgggacactatctccttcccaaatcagggtgggtagaaaatacccactgcctgcaactcccgaagccaggaaagctacaggatgactgggaatagagatagaatgtaggggttggggaggcagaggaggaagtcagggaggtattcctggaggaggtaacccctgaaggaaggcagaatagaggcagggatggtctgggaaaaacagactggacagccaggaaatcagggaaggggcaaggcagagagccaaatgggagaggatggagggcatgggccaggcagggcgtggggcgggaaggaggtagcatccaggatgggccccaggctcaggcctgggtgactgggtgcaccgcggggttgtctctggagtcgggagggaaggggaggaagaggttccggggagactgctgaggtcagtctggctgtggcaagggggtggggaggcccagtgtggaagagagatgctgaagatattggatgaagctgcaggagtgagcgcaccaaatgaggtggacacacagctgaggaacgccaacgtcgaagaggaaaaaactctgcaaaggacgcggagaaaggtccagcaaagaggcagagggaaactatccaggtcaggggcagccatggaagagaccggagcaggtgggagaaggccaggaggccaggaggctggtgttgtcttcttgaggagggagctgccgggagcccacccccaggagctgaaggcggctggggctcaggtccttccccgtgacctcgatgcctggggaatctgcactaatgagcacaagttacagagaggatcttgtcccaggtaccaacgtctactctcaagcaggcacagacaccactcacagccacttctgcaagctca

SEQ ID NO: 37162 - DNA, 1334 bp, Artificial sequence
  DNA replication origin
tactaaaaatacaaaaatcagccaggtgtagtggtgtgcgcctgtaatcccagctactcgagaggctgaggcaggagaatggtttgaacttgggaggcggagattgcaatgaggtgagataacgccactgcactctagcctgggagacagtgagactatgtctcaaaagaaaaaaaaaagttcctgggccccagaccagctctctctttgggttaaaaccccggcgtcccggagctgaggcgcacgtggctatgcttggggaggagagggcggggccggggaggaggcgcttgcaagtctgtaccgcaatgcctctactggcctctagagggcgcaatcactcgaggctccgccccaagcgaggcggggcggaagcgtgctgtgcacaggcgcaagatgggtcttgggcagcccagagcttccgattggctcttctgtggtggcggggcggggtcagaacgagatggctgtgtgcgcaggcgcaagactagcgctcttgggaccggaagttaaggcgttcgcggcgtgtggtaagtgaggggggcgggacgggtgtaccgggttgtggcggcgatggctgtcggagttgggccgcttgggggtagtttggggtgcgagtccaggggcgagggaagtctcgagatgaggagaaatgtaggaggcagccgaagggccggcaaacgcggacagagatggcacctgagcgtccctgggagaacctgggcgacaggccagagaccgaaagaaatggaggcacgaaaagaagcttcgagaaactgagggactgaaagacgagggtgttgggagaggagggaagctgaaaactagagagcgtgggcgagagtgccgatgggttccagcgagagtcttagagcccacgaggccgagaggcgtggtcgcccatgaacttggggagtggagggaaaagtcggaaactgatcgtggacactagaaacagaaaaaatggaatttagatggagaaacgagacactgaatcacgggggagaccgagagatacggaaggatggagacagttgaaataggaagaaccccacaaaagctggagataatggagaacgatgctgagaaatggaaaagcgagggagtggagcccgaacccctggatttgagtggctcatgtaacactcggctactcacttagcctctctattgctcagtaaaatagggggtgatcatagtgcctgacagtcgtgagaaaagtgtgtgtgtgtatgtacataggtgtgggataggaatagatcatgcagataggataggtctgtgtgttaatgtgagtaagtaagcatgagctattactaaagcttctgatattg

SEQ ID NO: 37163 - DNA, 1625 bp, Artificial sequence
  DNA replication origin
tgggcatccctcagggacacctgctctcctgcttccaggtctcagccccagtgccccctcctatgggaagccctcccagactacccacaaactgggttagatgccccgctgggttgtcccagccccctggactccccattccagccctctctgggttgtcactgtcacatcagtggtctgtctccctgcactgggctgtgaaccccgggagggcagggccagggtagttttggcactgatgggcccccagcactacactacagggccagggttagggtgaggactcaagggacatatactggatctccagatgcctcccaaggagcctggactttctccaggtggcacaggttttcatcagtgcttcagaaaccccaggctcctctcagccccgggcctgggcacatgctgtcctgagccgaaagcatggatgatggagacatggccctccccaggcaggcccagtctgtggggggctcagtggtcctcccagggtggggctgagggtgggacacgaggaggagccacagccacagaaggccttggccctgagcagggtgacagacagagggcccccaccaccagcctcacctgcacccaggcgttgaagacgttgaagagcgtgaaggggtcaccctggtcgctctccagcggccgccgtgctgccgcgcactctgggctgctctgggcgctgcgggtgaagggcgactggacgctaagtgcggctgcgatggtgagcacaggctccaccaggctgaacatggagcccaggatcagcatcttccctgcagcggcggacacggggttgaggctcctgggtgccaggacaggcgcagccctcacccctcggggccccagcctgccctcccgcctgccctcctgctcccaccccctccatcttgcccactaagggtcttgtgacccagatggagattcaaacccacgcgctgtgctttctggtcacgtggccatgggcaagggcctcagtttccccatttgtagattggagatggccagtccctgcctccttggacacacaggagatactgtctaagcgctgactactcctgtcaccaagttccccactttgctatttacaacccactcccccagcgctctgatgcttccctggcttggtctttgctctaggagctcattttgacccatcacggtggacgtctctcctccgcgctagagtgtcacctgtaagtgagtccctctagctctgccctggcacaggcaggcactgactcctgtgcttatcacaggatgaatcttctcctgcagcctttgtttaggtcaaggtggaagtggaagaggaagaggggacagaaggcgaagacatggagaaagatggggcaggggctgggagaggtagggaaaggggaggaaggacagaggggaggccacagagaggaaaagtggcaggaaccgtctcccagggtggccgagtctcacctggagacaggtgaaccctgtctccatctgtgagcgctccacagcgggcatctagacatcccctggttctgggcgcccgagctgacgctggacttctgggggctcccttgcccacctgtccagtaactagtggtctgtgtcatgtgtctgacccgcccccaccgttg

SEQ ID NO: 37164 - DNA, 1645 bp, Artificial sequence
  DNA replication origin
tgggagcaggagggcaggcgggagggcaggctggggccccgaggggtgagggctgcgcctgtcctggcacccaggagcctcaaccccgtgtccgccgctgcagggaagatgctgatcctgggctccatgttcagcctggtggagcctgtgctcaccatcgcagccgcacttagcgtccagtcgcccttcacccgcagcgcccagagcagcccagagtgcgcggcagcacggcggccgctggagagcgaccagggtgaccccttcacgctcttcaacgtcttcaacgcctgggtgcaggtgaggctggtggtgggggccctctgtctgtcaccctgctcagggccaaggccttctgtggctgtggctcctcctcgtgtcccaccctcagccccaccctgggaggaccactgagccccccacagactgggcctgcctggggagggccatgtctccatcatccatgctttcggctcaggacagcatgtgcccaggcccggggctgagaggagcctggggtttctgaagcactgatgaaaacctgtgccacctggagaaagtccaggctccttgggaggcatctggagatccagtatatgtcccttgagtcctcaccctaaccctggccctgtagtgtagtgctgggggcccatcagtgccaaaactaccctggccctgccctcccggggttcacagcccagtgcagggagacagaccactgatgtgacagtgacaacccagagagggctggaatggggagtccagggggctgggacaacccagcggggcatctaacccagtttgtgggtagtctgggagggcttcccataggagggggcactggggctgagacctggaagcaggagagcaggtgtccctgagggatgcccattttggggctctgggtgctcggtcagcccctccctccccgcactggccaggccctgacaccctggcgtctgctcctccacccaggtgaaatctgaacggagcagaaactctcgcaagtggtgccgccgccggggcatagaggagcatcgactgtacgaaatggccaaccttcggcgccagttcaaggtgaggctcgggaggaggggtaaggccggccccactcaggcagacgtgtgtaagcacactccagaacactgcttccccttcccagacagtggtcagaccagaatcccaccctgcacccacctcccccaccacccggtgaccaggtgttggggcagctgggcagagcaaagggagcagaaatccaggagggcttcctggaggggtggaccgagtcagtggacatgcagcatcctcgggaagagctcgccctccggactggggatgctgagctggctgcatgggcatggtgttggaggcagcctacggttgtggttggccggcacatctggagccagacacctcagccacagatcccagctctgccatttctgacagcgtggccccgggtgtgttactgcttgtctctgggcctcagcttcccctcgataaaaagagaggataaaaatagcacttgccagccgggcgtggtggctcacgcctataatcctagcactttgggagggcgaggtgggtggatcacgaggtcaggagatcgtgaccatcctggacaacatggtaaaactccgtctct

SEQ ID NO: 37165 - DNA, 1622 bp, Artificial sequence
  DNA replication origin
gcctgcagctgcgccaggtcatgccgaagcttgaacttcacatcctggggggagcacggggaggcagagtcttaggggacctgaggggctcctaccatgatccgcagacccccaggctctgcagatacctgggaccaagcaccgtccatggaaacccggctcctgaaatgaggacagggccatgtcccctgggacccccccaggagaggccaaggcccaccttggtaaacccccacaccccacagcccatggcgcccacctggatgtccacgccatcactggcccctgggggggctgggccagccctgtcctcgtcactggagccgccgtcctgctcctcctgcagccgcagcaccttgcgcctgcgccccgcgccctcctcgtgctggcgtttcagctggtgcagggcccggcgctcccggcgctgctgcaaccgactgtagctgtcccctacctgcgcggcctgggccccagccagcagcccgtggtcctccaacagctcctaggggcaggtgggtaggggtgagggcctcagggcagactcagtgggctctggactcatggaaatggggaccctcccagtggcagggctgctagtgcccaaagggggctgaaaacagcccctcgcatggtgctgggcatggatcgctgctccagagagagagctgtcctcgctggtcagtggagggaacaccggggccaggggcaagaggaggcaggtgcgggcgtccagtgccttttcccacagctggctccaggctctgctgactgccccacctgccccttgggtctggggggccctgctttcccacacagccctggtgggcgtcctgcactagtgcttctgagtgtagccctggggcatctaggcacatgctgggaatgccaagtcctgggcctcatcccagaacgaccaagtggagagaggagggggctcggcggggttggccatctggacccaacagaccctccagctgcctgtgacccataaaatctgagacccctgccctccccgtgcccacatcttgtcaacattcctcaagtgacccaatttggttggaccttctgtttcctgctgagccctgaccgatggaggacacaggagattgtgcgtgcatgtgtgtctgtatgtgtgcatgtgggtgcaaagggctcacactttccattagattctcaaagcatctggggaccaatgaagcctgaacactgctctagcagccagagagaactcgggacccatgctcagagcaatcggggcatctgtggtccccaacaccgggaccccagaaatggtaccggaggtgtcggctgggtgactgccccctctgggcctcagcttgcccatctccaaccaaacagaatggattacaccaggaacccttttattctattctcaatccatggatacaaccatggaaaaggacctaacagcaggtctgtctgcactcagatggagaacagtatctatgaaacaagctgcagaactgtgtgggcgcaggagaaacccaaatctttttttttttttttttttgagtggagtttcgctcttgttgcccaggctggagtgcaatggctcaatctcggctcaccacaacctccacctcctgggttcaaacgactct

SEQ ID NO: 37166 - DNA, 1654 bp, Artificial sequence
  DNA replication origin
cccgtgtgcatggaagggtgtctcgctgcaggcatggctgcgtgctgggagtcacattcagatttggctgaccttcttgtctgagccaggccaccaaagccatgccgtaagcatactctttctatcgatgtgtactttgaccgggtgggacaggcgggcttctgatgggcctgggtgggccagggtgggcctgagcggtcctcctcaacctttcagacgacaaggacaagatgagcagcaaacaccagctcctcagcttcgtgtccctgctggagaccaacaagccgtacctggtgaactgcgtccgcatccctgccctccaggtgggcctctgccccaccccgcccccatgcccagatatgagagctgcgttgcccagggtggtgggtgggggcaccgcgtgggcttggaggggccacctggcacctgggctggccgcaggcgtcagccttgggccgttgctgtggctgctttttctctcattcatggacttgctcaacagttaacctgccaagtgcctgctgggtgccaggcgctgtgccaggtgccaagggcgcagcagggaaccaggcatgaagcccagcccctgccctctcgggctctagtggcaggggacagtgacagcagtagcacagtgatgccctgagcgacgtgtgggagggtggacacagggtgtggtacaagataaggccacctggtgtccccaggcagagacccaaagaggagagcgtgtggatctcggggcagagtgttccaggcagtggggtggcctgcacagaggctccgaggcagacatgtgcctggcgtgcagtcagcaagggagagcgtgtggagatgaggccagagaggcgagggagacaggaccctggggacttctcagagctgggacagggtcccagccaggagggctggcagctgccaggagggagaggagggtgctgccccggtggaggctgaggccgaactcagatcatggatgcccttgcatgggcaccggcagcagagccatgggccccatggcagccactgccctgcccctagtgctcctcgagcgtctttgtgatcctaggcctggcctcggagtcctcacgcagccctgtgggtctccctttatagaggggactgaagctcaggcaggggcggggatacgtcacctaagtcacacaccgagcaggtggccaagccagagctcctgggtcacactgccccctcctgcctcctggctcactaccagcactccccggcttgggtcccagggaacgtggaggggagagaggaacctgcaggctcctagagcctcagggttttgttgacactgcgattgccaccaacaccacaaaagccagctcagctcagtcacttctgtgtgtgtccacacctccctcgagcccgtctggtgggccaggcactgttagtgttcagtgttctggggccgggggtgcagctgtggtcaatgtcaaccaaactccccaccctcatggggctcagataggatggtagaggcagacggcaaaccaaaagggtgatgccaggtgctcatgtgagcatgggaaagcaggcagcacgcaggccgagggacagaggattggcgaccagccgggccgcaggaagcggaacagacctgctacctgaggcgctctctccctgcactgga

SEQ ID NO: 37167 - DNA, 1080 bp, Artificial sequence
  DNA replication origin
gtgatgggtggacagcaggaaggacttcaaacaatcaccctcccttgatggcaggtgggggaaggaatatgggggaggggcagggccaggccaagactttgaggtcggctgagaggggaggcagttgcttagtgtatcccctgcctggtgctgggaaggggtcccagcggctggtacactgggaagttggggaggggacagctctcctcttcccctcctcccccttttcccagaatctggaaatgcctctcattaacttaatcatctctaattaaaccaattggatgtgcctggggagaagggaaattgggtgggaggttaattgtaactaaaaatatctcccccacttcctgagaggaggaagcagccactggacctgcgtgtatggtaggttggcatctcagagcaggaggggcccctggttcaggggcatcctgggtcgtggggtgaggacccaggggataggcaggcggggctcgggggctgcagttggtgtgtgtctgacccctgtgtgtcctctgggcctgtggacttggaatgtggtggtcgagggcagtggttgagggatgtcggtgtggctggaggcaccgcccgtgtcctgttgctgaatgtggtgtgtgtgtctgtcgctgagtggcggtgtccgtcacacgtgccttggtataggttgtgtgtctctgtgtaggttcctgactgtgacgatgagacttttcatgcgcgtccgtgtgaagagaccaccaaacaggctttgtgtgagcaataaagctgtttatttcacctgggggcaggagggctgagtccaaaaagagagtcagtgaagggagataagggcggggctgttttacaggatttgggtaggtaaaggaaaaaggggggttgttctctggtgggcaggagtggggggtcacaaggtactcagtgggggagcttttgagccaggatgagccaggagaaggaatttcacaagacagtgacatcagttaaggcaggaacaggctattttcacttcttttgtggtggaatgtcatcagttaaggccgggtagggcatattcacttgttttgtgattcttcagttact

SEQ ID NO: 37168 - DNA, 714 bp, Artificial sequence
  DNA replication origin
cctcatggggcacaaagtctagtgaaggggacagacccatccccagatggtgatgccccagaacgggcagggctgggatggtgaagccaaggaactggaggagctcacagggggcgggtgttggacctgggatggggggaggtgtttagagagggcttcctggaggagggggcatctgacccagactagaggattcaaggagggctgcctggaggagaggactttggaggtgagaccagcagaatgggaggagtgaagcaggagaggagcatctgcagagggaatagcacgtgccaaggccaggagagcttggaaatctcgtggctgtgagacagccccagccccctacacacaaggaggaagttctctttggactgggttgaggcaggcggccggacaggtggctaatgaattcagggccagcagaaaagccctggggatgagagtggaggcctgcacagggcttatgcatggaggcgggtgctggaggccgagcctgggagagagatgggcaggcgtatccaggccaggtagggcagtgggcgactcagctctttcatggccaagtgtgggtagggatggtctggggtgagtgtcaggggacctttggggtcagtagtgatggaggggtcttctcatcccactgcctggctgcccagtgggctcttttctctgctcctttctgtctccttttctgtctctccactcctgatc

SEQ ID NO: 37169 - DNA, 1155 bp, Artificial sequence
  DNA replication origin
accccagagatagctgatgactccctcctatggggaaactacgttttattgtttgaactgttacactggattgtcactggggttgccaacttccccacaagaccagaatcttctcaagatccagaccctacctgaggcatgtcaggatggagtgagggctcaatttttttttttttttttttttagatggagtctcactttattgcccaggttgatcttggctcactgtaacctccgcctcctgggttcaagtgattctcctgcctcagcctccagagtagctgggactatgggtacatgccaccacacctggctaatttttgtatttttagtagagacagggttttaccatgttggccaggctggtctcgaacttctgacctcaggtgatccacctgcctcagcctcctaaagtgctgggattacaggcgtgagctaccgtgcccagccaagggctcagtttatgtttggagatgtatcatagatgaatgggtgtatgtaggtatggatggatggatggatagtgggtggtgggtgggtggatatatggataatgggatgtgtgggtggatggatgggtgagttgatgggtaggtgggtggaagcctgggtagggaggtgggtgaatgcacagataaatgggtagatgtgtgggtggttggtcagtgtggaggtagatggatgagtgggttggcgagtggagagatgaatggagtgagtgggtgaatgtgtggtcagatgggtaatgagtgggtaggtgggtggactaggtttggatggatggattgcgggtgaatgagtaattgagtaacggatggataaagatatggatgggtgagtgagtgggtagatggatggatacatggaggaggaggatggatggatggatggatggatggacggacggacagatggatgaatatcttcccatcaagcctcagagaacccacagtacagggacccaggctgacccactactctggaagtgcccactcttggagtcctgaggtctaatggaggtttgagaattgcacaatccccagcccttagaccctcacacctctcctgcatcagcctctatagataatgccattctccttccaagttcaaactcatccccactgatcctggaagacaaaaaaaaaggagggtaag

SEQ ID NO: 37170 - DNA, 1187 bp, Artificial sequence
  DNA replication origin
tgtcattgccaggtgtgttcacagtaggattgcctgagtgtggctctcatgcgacttctcaaggctttgcccctgtactctgtatggagctgtggcaagtcgggatccacacggctgtgctgtgtgtgttttccgtctggtgtcctaagtggataaaactgtagtgaggctgcgtctgagatggtgccaccttactgagttgctttgctgggtttgattctttttttttttttttgagatggagtcttgctctgtcgcccaggctggagtgcagtggtgcgatcctggctgactgcaagctccacctcccgggttcatgccattctcctgcctcagcctcctgagtagctgggactacaggcacccgccaccacacccagctaattttttttttttttgtatttttagtagagacggggtttcaccgtgttagccagaatggtcttgatctcctgacctcatgatccacccacctcagcctcccaaagtgctgggattacaggtgagagccaccgcacccggcctgggtttgattctttgtggccgcatctgagcctgtgagtctatttccaagtctgcgtagatgagtctggggccatgtggctgtgagtggtgtgtgcgtgtgatctcggctgcagcccgactgtgatgtggccagggtcacgtgtgtgcaagagggcaccgtggtcagtccgggcccaagtgtggttatatctgagtttgccgggcagtacctggggctgtttggctctatgtccatctgtgtggctggagcgggtgtgtgtatgcagtggacacatactcaattgagaacggcgtgcggaacccggctgtgtgttctatgctgctgtcgtatggctgggctggggggcgtgtgtgagtacccggtggacgctactgtctggctgtgagcagaaatggctgttgctgagttggtgtggctgtatgtggacctgtgtgggtgtagctgaatctgtgggtggcatctgcagccgctggtgtgcgtgtgtctgtgcactgttgcccagccgcatccgagtctgcgtagctgttgtgtagtgggtgtgtggctgtgtgcatatgcgtgccctgtgatcaggctgactgtggcttcgtctgaggctgtgtagtgcacatgcgccctcatgcggtgtccaggcacagctgtggctgcaggacgatgcctg

SEQ ID NO: 37171 - DNA, 947 bp, Artificial sequence
  DNA replication origin
tctgcagccgctggtgtgcgtgtgtctgtgcactgttgcccagccgcatccgagtctgcgtagctgttgtgtagtgggtgtgtggctgtgtgcatatgcgtgccctgtgatcaggctgactgtggcttcgtctgaggctgtgtagtgcacatgcgccctcatgcggtgtccaggcacagctgtggctgcaggacgatgcctggtgcccgtcccgggcccacctggtctgggaggctggggcaggaggctgggtagtcctcgaagtcctccctgcagccgccgtcccgatcctcgatgaccaggtcgatgggcatctttcccttgaggcaggtgatgtagcggtgacagaagttgtcgcacaggtcgtggacctgggggggcaccggggtactggggggggccacccacgggggcagggcgggggtgctcagggacgggggcggcattctgcttcaactccggtggggagagagctggaaggtggggggcagaggcgacgagagggggtgggatgacaggggcaagtgagggtgtggggaggtgagacgcgctcaccttctccagctccagcaggtggaaccgcagcacctggatggcctggatcatctgaaaacgtgggcgggaggtggggggagacagagggaattgggggagggagcagggaggaagaaggaagaggaagagaaggaggaagaggagacacagagaaacagaaagagtgagacaaaatgacagggacagggagatgcagcaaagagagacaaagacaccaggtgcaagggggaaagagagaacagagatgcagcccagaattaaggaaagagcagatgttagattgagagaagcaagagacgaaaaaggacccatcacaagcggggagagctaaggtgagccatgctgactggcattcccatcctctgcctgttggcccccagctccaggcccca

SEQ ID NO: 37172 - DNA, 852 bp, Artificial sequence
  DNA replication origin
ctccaagacagacattactaccagccacacttcacagacgggacaccaaggcacggagatgcagagtgacttgccctgggtcacagagctggtgagtggcagagctgggatttgaactcgggccatgggtcccgttctcagactctaggctgtaccacacggcacgtgggcaacaatcatgacggtttggggacatggaccaggtggccttctctctgcaccccccccaccaaccccagggatggggcgtcagggaaggagacccattggaggagggggtgtgggggagggctcgggtctcaccagattgtccagttctgggttggaggagaagaggggcctctcagagcgaacctgggagggaagagagaggccggcagggggatgtcccgccttccacccacccctcctcgctggctctctgactcggtgtgtggtgggtgggaggtgcccacctgcttggcaaaggcagcgatgtcctcgttgaaggaatcagaggagcagacgtcacctccagggggtgtccccagcccagctccggccccgtcacggggagagcatgtagccagttcacatttctcaaagaccagggccaagagggggaagagcgggtgtctggggaggcaggaaaggagagaggttgagggagaggctgggaggtggatggaggggctgccaagatgcagaacagctggggaggggacaagagacccagagagggaaggagacagagactcgtacacagagagagacagaagcagacccagggagcaaagaagcagaaagacagagagagagagacaggagcctgagacccggccccactcacccatagatctcatccttctccct

SEQ ID NO: 37173 - DNA, 1040 bp, Artificial sequence
  DNA replication origin
gaagcagacccagggagcaaagaagcagaaagacagagagagagagacaggagcctgagacccggccccactcacccatagatctcatccttctccctcttcaggccgtcgctgtccaagcctgggggcaggggctggggaggccggtgcgggccatagggccctggtactgcgggcactgtctctgggaagctagccagggctgcggggccatccacgatgcctgggtagtgcggcagctcatcatactgggggaaggtgagaagagaagggcggagccccagggaggggtcagcaccccgagactcggctgaggagcttctctatcctggaacccaggagatgcccttctgtgtcccagaaacctgcctgtggtccccaggtgtctgagcccccaagcttgaagccctccaggtcccctggagctgcctcggtggggagtgaggaccccgtccaggcagagattcctgacatgtgggcaggaggacccagagggagagacggcagggtctggctgggagggaaaagagatggagaaagtggcgtgagaagacagtgacagagacagagagagagacagacagagagggagatccatggacacctcctgtaggaaccgcgcattgttgtacacaaagtacacatacgaagcctccctgtcttctatttcatttcacagttggcagataagcgcatcagagtaagtctcaacaacatgtcacactccactcgccacgtgaatctaccacacatgtagacacagccatacacaccaacccacgtgcacactcatgtgtcagtcacacccaaatccccccccccacacacacatgcacacacacatgcacacagcccaacaccaggcacaagaatgaatgcatgattgagacatttggcacatggatgaatgaatgaatgaggcatttagcacagggcctggctcatgctgtgagcacttgttgccggagagggtcactccgcaccaccatacagacacgattgcgcacccaagagaaacaccattatggggtaggacgacc

SEQ ID NO: 37174 - DNA, 914 bp, Artificial sequence
  DNA replication origin
caccattatggggtaggacgaccgcgtcctgtcgtcacagaaccatgcacctgggaagccaggggcaccttcctctcatcaggtcaaatcccttcctcagtgatgaagacacggaggctcaaagaggcagcaggactcgcacgggaagaggctagaacgttcctgcctcggaccctcgcctggctgggcaccctggttctgtgtgtcccactctttccctctccctcttctcctaacttctcctgtgccctgaagttgaatccaactgctccccgctgctcaaggcactctcaccaaaagcggtcctcacagcctacccggaacccccaaaacgggcgcgcgcctcctcccctgtcttctatccccgttcccatccccagggagacaggctccgtggggccagcagcctggtgagaccacctctcccacccctgtcccactcctagccctggagaggcaggggcggcttggaacaaaagtagagcgaagggaaggacggaggagagcagaaaaaaggggggacggtgaggtgcgggcggctgagatggaggaggaagcccaggaacagaggagagagactgcgggtgggggagggcagagagagggggatagagaggcagaaagaggggggagaccagggacagagagagggggacagagaggcagaaaggaggaggagagtggggcagacagagggggacagaggggcagggagaaggagaagctaaacgatggggaggaggcgaggccgagggccaggaagagacacttgggggcagagagggggcacacagggactgggagacccaggggcggagggaggggcagagagagagcgaggtggtgtagaggacggatgggctaatgggggccagcgccggagagtgggggatgcagggacagggggtgcggaa

SEQ ID NO: 37175 - DNA, 776 bp, Artificial sequence
  DNA replication origin
gcggggtccccgccccgagacctaccctccgggccatgggctgaggccggcggcagctcctgggtccctccagagcctggccgcgggggagggcgcagcccggggccgcagcccctgacggcccgcggtgttgacgccagggggtgggcaggaggccaggcgcgcgcccccccacccccgccgccgtcagcggcaggcgccgggccgggtggggactccgcgcatggaccccggcccccgcccccagcgggggtcacggccaggagcgcatcgccgccggggcgggggcagcaggcgcaggcggggcgcccgaggccccctcctctgggccccccccgtcccttccccggctctggagggaatcgaaccgtcccgagacggacacaccggggaccgcagggggcggggggcggcccggggcgacggagggtccggcggcggctcaggggtgctggcagccgcgctccccgttcccggtctctcccttgtcttgtggaaattaaacagaaccaccaaggagcgggataggggatgagccagagtgagcctgcagagctacagcacgagggattggggttagggcagcagcagcacttccggtgggagtcggggaggggcaggctgtggggggaggagaggaagagaccgcggccctggtgcccccaggcccctcctctcctacccagggctggggttcctgctccgggtttctcagtctccctctttcccagtctctctctccttgtctctctctgtctccgcttctcccgtccttt

SEQ ID NO: 37176 - DNA, 875 bp, Artificial sequence
  DNA replication origin
gagacacagagacagagtcagaactggaaagagactcagtaagagagagacagagacagaaggagagaaggagagagggtgaggaaaaggaggatgaggaggaggacggaccggagacaggacccagaggcacagcgagaaactggcagaggaaagcagattccaacaaaaaagacggagagggcgaggagagatagaaagggaaggaaaagagggagagaggggtctcggtgggagccgcagcctgtgccccgccccccgcccgggtcaggccgggtccttcccgccaccgctgagccgtggctaatggtatgattgcttggtggggcgggaggggaagggggcggcaggcatttgtcagggccggtgacgaatgagccacaggagtctgggctcgggtgatggatggcgtggccagcgggcggaggggcgggcgcaggggtgggcgcccccaccaagataaatgtttccttctcctggagctgggccaggcagcgggaggacgggaagggggcgatgtatttatgaagggcccgggtggaggagaggggagagagccagggagacagaagcccagggaggatacggtgggggggacagggaggcggagagagggagaggaaggagggagaagagacagaggcccctggagagagagaccgagaaagatggagagaaagagagataagaaagatgaggcagagaagacatccagacaaagagacacagagatacaagaaaaaaaaaaaaagccaggagacagacagacagacacagcccaggtgacagacagacagacatagcccaggcggagatggagacagagacggcctgtcttttagggtcccttcttcccccaccctcctgagcagaga

SEQ ID NO: 37177 - DNA, 2370 bp, Artificial sequence
  DNA replication origin
tgatcccaggaggcactggagggagatgggaaagaaaaccattaaaggtggtgttgaaggctgggcgcggtggctcacgcctgtaatcccagcactttgggaggccaaggtgggcggatcacctgaggtcaggagttcaagaccagcctggccaacatggtgaaaccccatctctactaaaaatacaaaaattagccgggcacggtggcaggtggctataatcccagctactcgggaggctgaggcaggaggatcacttgaacccaggaggcagagtctgcagtgagccgagatcacaccactgcactccagcctgggtgacagaccgagactccatctcaaataaataaataaataaataataaaggcagtgttgaatgagcaggtcaccctgtggacaatgaggtctccatcctgctggggacctctcagggaactctggagttccccacctgaagactttgggttatgtatccactaactcctgtctgatggtggcccaggacctctttaggggtgctgacttctagcgcctcctaccctggtctggaaagcattcagggaagggtcgcaggtgccagcgtgagagatgctgttgggtcctaggtggtatgagtgggtcagagacagcctctgctatgattacttcccagaacgggggtctcactacctccctcttccagtaaggcaatgggtggccaccagcacagcactgactgtgcccaggttgccctctctcctggtctgatgcccccagctccctcctcggcctctcccagggaatcgggaagggttggtacctggcatctcctccacgttctgccgtccccctgaggattgaaatcagacactagggaggacttccaggcacacatggccaaaggagagagggatgaggctccaggcttcagtgcctcccaaggtacctcctcactctctccttctcgccacctttgcctcccgttccctgcctgctccctgcaattctctccctggggaagtgcggggaagggaatgtcatgggtggtggattgaaaggggtaggtggggtcagtagagggggaacacagacggtggaggaggtggagaagggacacaaaaagaggaggggaagttggagagggagcagagagccaagaacaaaacacaggggccggagaggcagcagagacagagatacagacaggatgcagagaagatgcagacggaggaagcccagagactcagaacacagcaccagggaggagagcgaggtggggagcggggcggggcgggcgtcccagggcgccagggcaagaccctcaccccattcccagcacacaaagccagtgaggccaacgccgagggtactctcagagaccagagatttaaaaggcacggctgggccgacagagcccatggcagacagagggacatggagagacagggagagagacacacagagacagagggagagacagagagagatggagagacagagagagatggagagacagagagagagggagggacagagagagaaatggagagacagagagagacagagacagagagaaatggagagacagagagatggtgagacagacagaaatggagagacagaccccaagagggagagacagagagagatggagagagagggagagacagagagagagggagagagagggagagacagaaagagagagacagagagaaatggagagacagagagggagagatagagatgaagagacagagaaggagagacacagagagaaatggagagacagagagcaagagggagagacagatggagagagaggtagagacagagagatggagagacagagaaagaaatggagagacagagagggagagacagagatgaagagacagagagagaaggagagacagagagagatagagagacagagatggagagacagagagagatggagagacagagagatggagagacagagagagagggagagacagagatggagagacagagagagagggagcaacagagagatgaagagacacagagagggagagacagagggagagacagagtggagagacagagagagagatggagaggcagagagggagagacagagagagatgagagacagagagggagagacagacgggcagagacagagagatacagttatagagagacacagagacagagtcagaactggaaagagactcagtaagagagagacagagacagaaggagagaaggagagagggtgaggaaaaggaggatgaggaggaggacggaccggagacaggacccagaggcacagcgagaaactggcagaggaaagcagattccaacaaaaaagacggagagggcgaggagagatagaaagggaa

SEQ ID NO: 37178 - DNA, 943 bp, Artificial sequence
  DNA replication origin
ggagtctgctgccctctcaaaagttgtctgtcacccccttttcccaagacatgcaccctcccgcgtcccccctcccccaaacacactatatacacacacaagcccctccctccaaggcgtggctgggctctcagaggtagtggagggcgagtgggggagctggaatgtctgaagttgcaggttcaaaatgtgcttcctccggctaagccctgggactgaaaccccaaacttctcccctcgtctccgagcctggagaatgagtgtcctcccaagaacccgagtggagggattggaaggaacggtgtgcggcctccttgcgcgcacacccacccgctcctccccgccggggctgagcggagctccctgagggctggggggaagggctgggagctgagacggcctctgacagcctccttcgagggtcccccagggagggtgggttctgaggctctgggacatggggtgaagtggggggggggtcactaggggaagggagactttgggggcaaagccaggctgggtgaccaaggagagagaccttaaactccccaggatggttactgggggtggttccctggggaggggactggggtggaaatttccccagggatatagacggtcaccaacaggatgggctggagttggggtcaccgcaggggaggaaccggggaggctcccgagaggaagagggaaggctgagctactggggacacagaacagggcaatcaaagccaggggagggggcggagaagggaggccgagtcccaggagaggaggccgagtctggggggaaaaggagaccagggtccaagagcaggtgcagccgagtccctagccccgggcgggcggtggggacgagtctctgcgcgaggccctagaagccccggatgtggcagtacgcctccaggctggcgaagaggatgtacaggagccagaggcccag

SEQ ID NO: 37179 - DNA, 1143 bp, Artificial sequence
  DNA replication origin
gggttttgtttttttttttttttttttttttggtgtggggacagagtctcgctctgtcacccaggctggagtgcagtgatcttgtgatctcggctcactgcaacctctgcctcccaggttcaagcgattcttctgtctcagcctcctgagcagctgagactacaggcgtgcgccaccacatccagctaatttttacgtttttagtagagacggggtttcaccatattggccaggctggtctcgaactcctgacctcgtgatccgcccacctctgcctcccaaagtgctgggattacaggcgtgagccaccacgcctggccaaacctcagagttttaactaagatgagggggcaggtggggtgtggtggctcacgccagcactttgggaggcaaaggcggggggccaaggcaggggtaggattgcttgggcccaggagtttgagaccagcctgggcaacatggtgaaaccccgtatctacaaaatatacaaaaattagctggacgtggtggcgcatgcctgtgatcccagctgctcgggaggctgaggtgggaggatcacctgagctggggaaaatgaggctgcagtgagccatgatcgcaccactgtactccagcctgggcaacagagcaagaccctgtctcaaaacaaaacaaacaaaaaatacagctaggcgcggtggctcatacctgtaatcccagcactttgggagaccgaggcgagtggatcacctcagatcaggagttcgagaccagcctggccaacatggtgaaaccccgtctctactaaaaacacaaaatcttagcagggcgtggtgggcgcctgtaatcccagctactcagaggctccggcaagagaatcgcttgaacctgggaggcggaagttgcagtgagctgagatcacgccactgcactccagcctgggtgacagagcaaaactccgtctcggaggaaaaaaaaagaaatcacgcagtgagtcccatagaagagaatgaatcccacagaaagcaggcggcaggtcccatagaaagccggcagcggttccagtggcgagcaggcctaaaggtggtgatggactttgcctcttgggtgggggtcaggggtcttgagcccacactgcccgcagaaagcaggcgaccgggaaag

SEQ ID NO: 37180 - DNA, 991 bp, Artificial sequence
  DNA replication origin
gtctcagcctcccgagtagctgggattacaggtgcatgccaccaggcctggctaatttttgtatttttagtagagacggggtttcatcatattggtcaggctggtctcgaactcctgacctcagatgatccacccgtgttggcctcccaaagtgctgagattacaggcatgagccaccgtgcccgacctctaagttcctgtctttctgtgtctctgtctctctgttctgtctctgtttctctctccagttctgttattctgtcttcagctctccctgtgtctatctctgtgtctctgtctctgtctctcatgctctccctgccaccccatctctgggtgtctctcctccatctccagcccagctgcttcaaagcgcctctaattagtgcctgcccatcagaggaaggaagagtttccctaaacactaattagcctcctgttctctgtcttctgaagccacagctgggagcttgtgggggtgggggacagagggtgtcccagcctggggaagccatgtgggggaggacagggccgtaaggttgcagcagcaggagggaagcaggttggactataagaaggaccggaaaaagcagaaagaaaactctccattcccccatctcttggtgtgagagaggggtctgggatggtgcctctcgcagcccccaacccaagttctcaacaaccctcagacagagaccaagccagacagagagagagaaggaaaggtgtggagtgtgcctgaaatataagctgagtcagagagcgaggtgctggggacagacagctgcagatgaacagagacgcagagacccagagagagacagcccagggagtgagagatgcagagatgcagagggagagacggagagacagcgagagcagtgagaagctgagtgctgcccgaggcggaagcgcagaggctgggaggaggagggagggggagcgcggtggggactccgcttgagtaggaggcgcgtgggcggcacggagg

SEQ ID NO: 37181 - DNA, 1317 bp, Artificial sequence
  DNA replication origin
ctgctggccaccgtcaccatcctggacgacgaccacgcaggcatcttctccttccaggaccgcctgctgcacgtgagcgagtgcatgggcaccgtggacgtgcgcgtcgtgcgcagctcgggcgcgcgcggcaccgtgcgccttccctaccgcacggtggacggcacggcgcgcggcggcggcgtgcactacgaggacgcgtgcggagagctggagtttggcgacgacgagaccatgtgagcacgcccgaggcggcccggagaggggcggggcttcggaatgggcgaggcctgatgtggctcaggggcggggcctgggtgagccatgcccacatagtgggcgggtcttggttgggcctcgggaggggaggggcctgcgtggccgtgcccgcaacgtgggcggggcctgtgacccatgcccacgacgtgggcggggcttcactgaacagctgggccctcaggaggagaggggcctgagtgaatcgttctccaaagtgggcttggcctcgggaggggcggggcctaggtgtgctgtgtctaccacgtgggcggggcctggtggggttgtgactgtgaaatgaagaggcgaggcctagaagggtggccggacaggtgagaagagggccccaaggaggaaggggggacgaggtgaggagagatgggacggggcctggggagagcggtgtggggccttaattggtagctcgtggagtgtgtgctgaagagtacccagggagatgtggggagaggcttgtggagatgagacgctgtcggtggctgtggagagggggcgggtccagggcgataggtggggtctgggtttggacatacgacatcaggaaatgggaaaatggatgtgggctgcggaagaaggcggggcctaacaagatgggtggggcctgggcgcgcggagctagggaaggggtggggcttctgggtatgaggaagaacctggggaaatagcggggcacctaacgcgaatctgggcgaggatttgggaaaagatggtgctggaatctgggggcctgggaaggcagggcagggcctggggagacactggggagcctgagggctgggatttaggaaaatggggtctggggaggtgggctggctggatacactcagacacacacatgtagacagacgtttacagattggacacaaagccatttatacgcaccacacacacatagacacacacggcagggccaggcgtggtggtcaacacctgtaatcccagcgctttgggaggacgaagcaggaggatcatttgaggccaggagtttgagagcaacctgggcaacatagcaagactcct

SEQ ID NO: 37182 - DNA, 1671 bp, Artificial sequence
  DNA replication origin
atcaggcctcgcccattccgaagccccgcccctctccgggccgcctcgggcgtgctcacatggtctcgtcgtcgccaaactccagctctccgcacgcgtcctcgtagtgcacgccgccgccgcgcgccgtgccgtccaccgtgcggtagggaaggcgcacggtgccgcgcgcgcccgagctgcgcacgacgcgcacgtccacggtgcccatgcactcgctcacgtgcagcaggcggtcctggaaggagaagatgcctgcgtggtcgtcgtccaggatggtgacggtggccagcagcggcgccaccagccgccccttgggccgcccgccgccgtccggctcgaacatgccctgcgcgtcgcccacgcgcaggttcagcagccgcacgaagaaatgctcgtcctcctcgaagatgtcgtcgtcgatgatgccgatgcgcagctccttctgcgtctcgcctggtttgaacaccagcgtgccctcgctgcggcggggtggggagggggaagagcggggtgagggtcggtcatcggctgtgtgttgtacggggggagtctggacgtgcttcccagaggagacgtaggtgccatagaagaactcccaagtatgagggtcgacaggcattaaacaagtaatactgagggtgaatcggggtgggcgtcctggaggaagggctgcagagcgggaacaagacagagtgggcccctccccgcgtggaactcgtgaagagcagaaggtgggaattaaacaggtaatgataaggttgagatcagggcaggcttcctggaggaggcattagcaggtgggcatactccaggcagaaggaacagcacatgcaaagtccaagagttgagagggagcctggggtgttctacatccctgcttctcaaaccttaatatgcatatgaatcccctggtggagcttgtgaaaatgcagattctggtttagaagctcccgggtttctagaatcgcatttctaacgagctccaggggatgtcctggtcacattttaagtggcagggatataggacccagaaaggactctgtcattcctctgataaaaacccttcccagatgcccccaagaggaagtccatacaccttaacttggcatcactcattcattcaacaaacactcctaagggcacccgttgtgtgccttgtgccgagtggtgctggggacacagcagtaaccaggccctgtcctcacagggttcacagccccatgggagagccatatcaccatgacaattgcacatttaatgatttaattacggttcattcattcaacagataactgaccgttgtgtgccaggcattgttttaagtgttgggggaacggcaccaataagaagctttgagattctgttttagtgcagaagaatgaacaataaacaaacacaggatgtcaggtggtgatggtgctatggagagaaacaggagggtagggagtgaggagagggagctgttggcatggtcaagaaagccttttggaggaggtaacatttgagcagagacctgaaggaggggagggagtgagccatagggaggatgcctggaaaagagttttttgttgtgttttgttttgtttttttgagacagagtctcgctgtcatccagactggagtgcagtgtctccatcttggctcactgcaacctcccctcccgggttc

SEQ ID NO: 37183 - DNA, 2780 bp, Artificial sequence
  DNA replication origin
cgatggcgatgttcttttttttctttttctttcttttttttttttaagatggagtctcattctgtcacccaggctggagtgcagtggcgtgatctcggctcactgcaacctccccctcctgggctcaagcaattctcctgcctcagcctcccgagtaactgggactacagatgcacaccaccatgcctggctaattttgtatttttggtagagatggggtttcaccatgttggccaggctggtctcgaactcctggcctcaggtgatccacccactttggcctcccaaagtgctgggattacaggcgtgagccaccacgcttggccaggcaatgttaatttcacatcttgagtcttttccatgtgtcagaaactgagaatgctgtgcactaggaatgcaggtgctcattcagtcttggaaatgtccccattgtatagaccaagagatgagacagccatccctgtggtaaagccaggctcccaactcagagctgccctggctgtgcatgggaactggttttatgaggcagaagagccagatgtgtgtctctgttagagacacagcctgtccatgagggccaggcaaatgctaaggaggcactggtaggggtcatgggtggggcactgagggcgtttgggtgaacagagagcaggccctggatgatgggcgaggtttggagaagtggaggcacccccaggtgatgggggagaaatggagcaggcagaaaaaagatggagggagagagaggccagaagacacacaggctctgtcccttgacagcagctgggaccacagggtggggattgtctgttgcttggtagtggatgaggatgtccgggttcctggcacctgggcagctgggcatggttctcagcatctaaaaggtggatagatggatgaagagactaggagagaaagagaacacatacacacatgtgcgcacacacacacacagatggacacacatgcacacacatgcacacagatggacacacacgtacacatacacacacagacgtacacacatgcgcgcacacacagaaggacacacccatgcacacacacacatgcacacacacagaaggacacacacacagatggacacacgcacatacacatacacacatgcacacacaagcacgcacacacaggacacacacacgcacatacacatatacacatgcacatacgctcacacatgcgcacacacgcgcacgcacgtgcacacacacagagatggggagcaagagagagagggagggagagagagaaaagtagctctggagaaacacagatactgagaaagagaaagaaactcacaagggagggaaatagatatctaccaatagatacaaaagaaggagatggagccaaggagaccgaggcaacaagaaaagagagggagccagggagagagacagaggaggaggaaaggctaagaaaaccgctgagacagaggcaaggagggaaagagacagcagcacacgcagagagcgatggagagaggcagagacgaacagggacagagagagagagaacgagatggagagagagaaatgtgggggagatggggagaggccacagacaaaaagggaggacagagttaaaaagagatgggaggaaggggagggagagagatggggagaggcagaggtgaacagagatgagagggaaatagagaataagtgaggaacagagagacagagatggagaggaacgggagcaaggagagagagagaaaagggggtggggagagatagggagaggcagagatgagcagagacagagacagagggggcgaacagacagaacaagatggaaaggggtgggagaaaggagagagagagatggggagagagaggtgaacagagacaagagggaaatagaaactaagagaaggacaagggaaaggagagagagaaacggtgacgggagaggggaaaaaattagctctggagaaacacaggtattgagagagaaaaagaaagaaactcacaagggagggagatggagatctaccaggatataacaggacatggagacacgtccagacatggggagaggcaagagccaaacagagacaaaaagggagggacagagatagaaagagatggggggaaggagagagagaaatggggggagagagatggggagaggcagagatgaacagagacaagagggaggttgagagaaactaagagagggacggaaaggagagagaaatgaggaggagagaagtgggggagaggcagagatgaacagagacagaacaagatggagagggaaagagagaaatggggggaaacggagaactcgggggagagagatggggaaaggcagacatgaagagagacagaaagaggtggggagagacggggagaggggaggaaagagagacagggagaggcagagatgaacagagattgagatggagagagatggggaaagaagagggagagagagaaatggggggaacagaacttgggggagaggggagagagacatggggggaggcagagatgaacagtcagaaagaggtggggagagacggggagtggggaggagagagagatggggagaggcagagatgaacaaagagacagggctcacgcctgtaatcccagcactttgggagctcgaggtgggaggatcacaaggtcaggatttcaagaccaggctggccaacatggtgaacccccgtctctactaaaaaaaatacaaaacttagctggccatggtggcgcatgcctgtaatcccagctactcgggaggctgaggca

SEQ ID NO: 37184 - DNA, 807 bp, Artificial sequence
  DNA replication origin
gaggagcccagggccatgagcgtgaggttggacaccgtctcattccagatgcgaacggtgcccacgctggtctcaccgttggccttggtgatggtgatctccttctcttttgacgtgatgacctcgatggccgccatgaaacggtcggcgatgatggacactcccagaaacatgtagaccatggccacaaagtacaccactgcccgtgccgccttgtcacccagcgacgggtcgtcgggctcccacacgggcagcagcacccccggctggcagcggtaggacccctggcagccccctgtgctggtgtcgctgtcattggccgggggaggcggcagggagggggttggggtggctgccccggagcatgggggagccgccaggaggagtgtgacccccaccaaggccaggggagccatggggggtggtggggtcctatgggggaggaggaggaggtctgggtgagggaagcaaacctctttctgtcatacaaaggtcaaagctcactggggaaggagggttgggggagaagctgaggaccaatgcaggcaggatggggactgagggcgacagagacacagagagtgacagacagagacccacagagagagagagagactgaaagataaggacagaggaacccccatgcactgctggtgggaatgcaaattggtctatgcactttgggcaactacagccgaacaccacgtatcatgcaattcagcagttttgttcctcggtatgtgcctgagaaataggtccttatgtccactaaaaggacctacaagaatgttcatagcaggccgggtg

SEQ ID NO: 37185 - DNA, 1108 bp, Artificial sequence
  DNA replication origin
aggcaggatggggactgagggcgacagagacacagagagtgacagacagagacccacagagagagagagagactgaaagataaggacagaggaacccccatgcactgctggtgggaatgcaaattggtctatgcactttgggcaactacagccgaacaccacgtatcatgcaattcagcagttttgttcctcggtatgtgcctgagaaataggtccttatgtccactaaaaggacctacaagaatgttcatagcaggccgggtgcggtggctacgcctgtaatccctgaactttgggaggctgaggtgggtggatcaggagtttgagaccagcctggccaacatggtgaaaccccgtctctactaaaaatacaaaaattagctgggcagggtggcgggagcctgtaaccccagctactcgggaggctgaggcaggagaatcacttgaacctgggaggcggaggttgcagtgagctgagatggcgctactgtactccagcctgggtgacagagtgagacttcatctcaaataaaataagaatgttcatagcagctttatttataatagcgccaatcttcaaacaacccagaggcctatcagcagtaaaatggagaaatacgtttggaggatttgcacagtggaatattatagagcactgaaaagggagtgaactatttgctgctgcacccagcacatggatgaatctcacagatgtcacaatggctgaatgaagccaagcacaaaagcactcaaactgcaaaattcactgagaggcagggagcaggaggctctgagtttgttaggagattcaaatggtctccaactcggccctttgaaagctcttgctcaggatttgggctgtggcgggtgttgggccgtgtttgtctgtttcaagtggggctggggaggggttgctggagggtctcattcatgtccctccccaaggtggtagcaggcatcagtctctccagcttccctgtgtctgacctgaggttttccccaggctctataagtggtgcagttccttaggggctgtgacatctaagaccctgtgctgggctttctgtcccatttgtgggtgtgggggttctactgtttcattatttct

SEQ ID NO: 37186 - DNA, 886 bp, Artificial sequence
  DNA replication origin
aggagctcagagtcagggccactcttggagaggcgacctgggagccagagttggtgctggatgatgtgggcaagttccgtaacctctctgcgccttggtcctctcacctgtggaatggaggggtgctccccagagggggagggtgtcattttggatggggtgtttggggaagctgacatcagagtggaaacctgaaagggcagagagagcaaggctagcggatatgaggggaagagtgggcggggcacggtggcacgcacctgtgatcccagcactttgggaggccaaggcaggtggagcacctgaacccaggagttcaaaaacagcctgggcaacatagagactcccggctctacaataaattagctgggcatggtggcgcacgcctgtacttcccgctacttgggaggctgaggagggagggtcgcttgagccctggaggtcgaggctgcagtgagatgtgatggcaccactgcacttcagcctgggtggcagagtgagatcccgtctcaaaaatacataaatagagaagcgtgttcgaggaagggggaacagcaggtgccagggctccaaggcagaagcttgtctggtgaggctgaggagcagaggggaggagagggtggctgaggcagactgggcaagggggagagggtgggaaaagaggccagagagggagtcggggccaggttgggcaggacctcacgggccctggagaggacgctggtgctgtgagtgagatgggagctggcgggggttctgaacagtagggggatgaggcaagctgatttgtgggctttgtttttggttttgttttgtttttgaggcagagtctggttttgtcgcccagactggagtgcaatgacatgatctcggctcactgcaacct

SEQ ID NO: 37187 - DNA, 1438 bp, Artificial sequence
  DNA replication origin
tttctgactgtgcctgtgttggggggctggcccttgcaggaccgagctggggactcagacttctaaacatgcacatttactgccccagcatgagcgcaggcgctcccatcacctcaaaatggtccagtgtggggatcacaccacagagcttgggtgctcgaggctgtgatacactgataatacgtaaactgaggcccagaggaggaacagggctcttaacctagtgctctttaaagccatctgaagccccctccgtgggcactgtcacacagggctgggacctcacctgcagccagggagacatcatacacacacacacacacacacacacacacacacacacacaccagggctacaggcacagcctcgtaccttttcgccatcactcactctcttgcccaccttctccagggcccccttctctcaaggaaggcagacagtgtgttggccagggccctctcagcaccccccactgagacagtgtgaggctggcacaccaggaaagggatggaagtgagactgcaggaaggactggcccggtctaactcagtacctagtgcttgcccagagcaggaaaggcgctcagtaattatcaacaagaatgaatgaatcaagagctggacaaacagcaagaggtatggaagtgagacggcaggaaggactggtccagttacacgaggaagactggggaggttagattgaagggaggtctggtctcatctctactacagaggctaccggttaaactgcaagaaggaccggcctcagaacgccagaaacaaggcagggggaggtgggctcggtcctcaggggagagctggggtgggtgccggctgggaggagtggagagagcaggggagctctgctgaagtggggagaggagtttagaggactccaggcctgggggagcccactctgcgggtgggggggtctaattcctccaggtcccccctgccaggggcggagacaaaggtgtgtgggaggagggtgcactggctcccagggagagccagagaagaggaaagagagagagaaacagagactgagatatccagagacagagatggagacgagggggagatggggagggagggagagagagagagagagagagagacatgcggacatgggaagagacagagacacagagaaagcagagacagagagagacacaggaaagctgagacaagggagagaggcagagacacagagacacagagaaacagagatggcgcaagaggaaaggagagagaaacccaggacttagagacagagccccagagagactccgaacagaccccggcacagagacacagagagagggagacaggagtgagagactgagagacagggactcccagaggcggccagactctgctagacagagacccctgagacatgtggagagacagaaagatgagacccagacacaggaagg

SEQ ID NO: 37188 - DNA, 778 bp, Artificial sequence
  DNA replication origin
tggcactcccaccccacagaaggtacgcgtgctgggccaggcagccccccacctccataaaccagcccagggaagccagctccaggcttcccgaaccgcccccactccgcacctggggtaaccccgtccttttcccacgcccccacctccccaccaatggggtctcttacctgcggctacagcctggagcaggtccccccagcgctgggctggcagtggtgggcgactccgcccgaaagagagagagagattgagagagagaaaagcctgagactgagagggagagccggggaggaggggagggagaggggatagagggaggagaagaggagaggggagggacacgggggagggggaggcggcgagggagcgagggagggggaggagccggagagagggggaggaggcggaggcgggcagagggaaggcggtgcgggaggcggggggaggcccggggaggggcctgggggagcagggagcccgagcctcctccccagcctccgggttcagcaccagaggcaggggacagcaccggagggcgctcctgtgtgtttcagaagcagcccccgccccccaacacacacacacacacacgcacacacacacacgcacgcagtctcccagccatacaagggccaacagctacaaatagttacagacttacagaactagggggagggcaagaatgtttagctggagtcagatccaaattcacatactgtgcctgcacagcctcacaaaggaggccagaaacaaccacaaagacacccattaataa

SEQ ID NO: 37189 - DNA, 1168 bp, Artificial sequence
  DNA replication origin
ggtggggattatccaggaggaatcaagcagcagggtcccagggctacagggaggggcggctgcccctggggaggcagaggggcggggctgggcccagcaatggccgtccgtcctgtccatccacccgcccgccagcgtcctctggctggacgtccacaacttccccggcacgtcccggcgcctctcagctctgggctgtcagagtggttatgtccgtgtcgcccacgtggaccagcggagtcgaggtgagggccgcggtgaggcggggtaaggggtggggttgagggctagagggcggggccagggtggggctgagggctggagctgggtggggtaggggaggaggataagtgggttgagggatgagggtggggcttgccgggtggggctagggtggggccgagggctattgctgggtgaggtaggggaagtgggggaagggatgagggtggggattgggggcggggctagggtggggttgagggcttcagaggggcggggctagggtggggatgaacggtgggggcggaaagtcgatggtttcagggctgcgggcgggaccggggtggggttggggctctgaatcctcgctctccacgcagaggttctgcagatgtggtcggtcctgcaggacggtcccatctcccgagtgattgtgttcagcctctcggccgccaagggtgagctctgggtttgaggggatggggagagagcgggtgggagggaagaggcaactctgcattcttgggtccttctacccagatttgcacccctctcccaaagtgtgcagaccccagtccctctctcctggatcccccactccaggccttgagctacagtgcacctcttccctcccctcccctcttgtgaatttaacttccaggactggcacatggggcctaacccatatcttttctgttagggtccatagttgttctcctcactttggtgtaaccttagccccgtaccctggggctgagcatccacctctccctctgtactctaacctgcacgtctcacatcggtatttcctcaccccgctctgtggccccttcactgtgtctcttgttgcattctagctcccggctatgctcctggactcaccgctgtcccaccactcagagtctagccttttcccccaatatgttgatcattcctgctcctttac

SEQ ID NO: 37190 - DNA, 1465 bp, Artificial sequence
  DNA replication origin
tgtgggttccattctagagttccagattccattccagaacacagatggtctagaacagggattggcaaactttttttggtagagatccagatagtaaatattaggctttgagggccagtctgtcacaactactcactttgccattgtagccagaaagcagccattgacactataaatgaatggatgtggctatgttccaataaaactttatttacaaaaacagatggtgggttggatttggtctgcaggtcataacttggccaacctctggtctaacaggtgagagtccccaaaactgaagattctaattgcactaatgttctccttgctaggatttggatattctatcattccgtgaatctgaaatctatgatggcaaattctagaagttcttgtatttttaaggagacagaaaacagcacttctagaataccagggtttcagaatgaagaggtcctagctttctaaggttctgcagttcattctagagttccacattcgattcctgaatccacagagtgaaggtaggagtagatgcgggctctaagagcgggaggttctagcaagccatgttcccgcaattctgagattgggaggtacattccttgattttgagattctatgagggctcgtttctacagttatgtatttcaaggagatacagtactcaggagcttgagccctgagattctaaccctgggtctagtgtctggatcccagaatgttaaggttctcaacaggcaggggtttttgcaagaggagagttctggttctcagaccatgtggattccactaccttgggttctagatttctctgctttcagggtccaggtcggggatcaacttgagactgtgtttctcttgagtgggaacgacccggccattcatctctacaaggaggtgaggtggggcggcgtgctgggcagagccctgtgggattcactgtgggctggcgctgggtgggtatatgtgtgaagctgacggctgacttaagcgggggtggggtgggtcttggtttccccagaacgaggggctgcatcagtttgaggaacagcccgtggaaaacctcttcccagagctgacgaacctgaccagtaggtaggagaggccccgaaagaggccactggggaccggggcactgacatcagagaaatcgggcggtgagaccttagagaaattggtcaccggggaggagctcagaaaaatcagtccacggcatgacttcagagaaattgatcagcaggggtgaccccagaaaaaacaagaggtggactcagccctcgggtggtgagaattgacctcagaggaattgggcggtggggattatccaggaggaatcaagcagcagggtcccagggctacagggaggggcggctgcccctggggaggcagaggggcggggctgggcccagcaatggccgtccgtcctgtccatccacccgcccgccagcgtcctctggctgga

SEQ ID NO: 37191 - DNA, 926 bp, Artificial sequence
  DNA replication origin
gtccagaaatggaaaggagaagagagcgcgggcgcagtggggcaaagtcgcctgggaggcccgagcaggcgacctggccgccatcttgggagagggcaacgccggcagcttccgtacgtcatcagcccgcgcaacggccgggcacccggcggttcaggtcgcttagagagtcgtaggttgggtagtgcgggttggggcgggggctgcggagagggtgcttaactgaggggcatgatgggggaggcggccgtggccgcggggccttgtccgttgcgcgaggacagcttcacgcgcttctcgtcgcagagcaatgtgtacgggctggcaggcggcgccggcgggcgcggggagctgctggccgccacccttaaaggcaaggtgctcggcttccgctaccaagacctccgacagaaaatccggccagtggccaaggagctgcagttcaactacattcccggtgggtggcgctatggtgctggggggcgggggcctggaacgtggtgttgagaaggcttctgaggctctgtctgagccgggtcaccgtgctggaagaatgggatcaggtggttttaagggggtcactgggatcagcgggcaggcatagttggggcccggatgagcctagggtttcaggattcttcagacttacaggtcaggatccctagtacccagggaacagagatcaggtgatggtggtcaggactcagaccagagggcatgatcattgcggtagccagagctcaccatgttggggagattggaagcatgagtctgcctgacactgaacttagaactctcccctcccagtggatgcggagattgtctccatcgacactttcaacaagtcaccccccaagcggggtctggttgtggggatcacgttcatcaaggtacctagagccccctccacctcccttcgccctcct

SEQ ID NO: 37192 - DNA, 1212 bp, Artificial sequence
  DNA replication origin
gggggactcaaggaaccctggtcttcagaggcagacagatgtggctctgaacaccagctctgtccctgaggggccaaggccgagcctcctgacctccccaacctcagtgccaccatctataaaatggggagaacactccctgcgcctcttggcgctacttgtaaggtttctggggtgactggagaaagaacttcacagtgggctgggggccagatgaaatgggtgaatgtcatggagagcgtgtctgagaagggcagctttcctaggagacccatccccgtgaaggggcctggccccccatgctggccactcaccgactcggtgtagctgtccacattctgctcctcgtgggcctctagcaatttctgcaagcaaatggcagagaggggtcaggggcctatgctgacctgaggtctggcctggattagatgaaaggacacgctatctgtatgccaggcctggggctggggcttcctgaggactctcagagggtcaatccgtgtgggttaaactggggatgggtacgggcgtgttgcgatcctgctgccctattcatcagaaacggcttgctctcagggcaaccttaccaacatagaacatcacacagaatgtgtgtgtgtgtgggtatggggggtgtgtgtgttgggtgtggtgtgtggtggaggtgtgtgtgtgtgtggtgtgtgtgttggggtgtggtgtgtaggggcacgtgtggtgtttggtgtgtgttgagttgcgtgtgtggtgtgttcggtgtgtgtgtggggtgtgtgtggtgtgtgtagtgtgtgtgcaatgtgtgtgtgtggggtgtgtcatgtgtggtgtgtgtgcagtgtgttttgtgtgtgggggggtgtgtcgtgtggtgtgtgtactgtgcaatgtgttttgtgtgaggggtgtgtcgtgtgtgtgtagtgtgtgtgcgatatgtgtggtgtgtgatgtgtttgctgtgtgtggtgtgtgtgtagtgtgtgtggggtgtgtggggtggtgtgtgtgtagcgtgtggtgtgatgtgtgtggtgtggtgtgatgtgtgtggtgtggtgtgtgtagtgtatgtttggtgtgtgtggtgtggtgtgatgtgtgtggtgtggtgtgtgtagtgtatgtttggtgtgtgtggtgtggtgtggtgtgtgtagtgtgtgtgtgtgtgtccacctagccatcctgagctccagcactccccgagtt

SEQ ID NO: 37193 - DNA, 1077 bp, Artificial sequence
  DNA replication origin
ggttcatgtcccgaggtgaggccctgttaacccaggaccccaagggcagggagccagggaccagcttggagaggtcagcggccagtgcgtgagcgaccaagatcagggtgtgatggtggctgggtgggggtggaggctgtagccaggtgttcgtgggccttctgagagcctgagacagtgggaaggaggcagcctggctgtcaggaccaacgggaggctggcatggcggtgggcagagcggcggcaggcggtgggaacatgagaggcggcgcccgcccctctctcccagggggccagctgcctgcctttttctcggccatcacccagggctccgtgcacgctggggggaccccatgtgacactccctccctcccactgtggatgaggaccatcgggccatggggtggggtgcccacggccaccctgggcctcttggcacttcttcccattccctccctctgggttctttagccagcctcactctgggcccctccaggaagctctgcgaggggtgtgggaggggcacagccagggagagagacggtgctggcacggcatggagtcgtaggtggagaacattcagccaggctgaagacagggtggggggatgacatggcaagggatgtcgggggagaggcagagggtgagccgggggaggggtggttccagaacaaggtgccggggcttaggaggaggcacaggccctgagagggggcagggtggaagccgccatccccacctgtccccacctgttcgtagatgtcaatggccttctgatactgctccagcagcgcagcgtaaccagccaccttcagcagacacttgttggctgagctgtgtggggaggagtagtgaggggaagtggtggcggtccctgcggggctggggcaggcaggaagggggctacctgttggactcctcgcctttgtagtagtctgcagactgctcgtagtgggcaatggcctggggagacacgggggatgggttccaggggagggcagggaagggagaggaggcctccgtgaagcttccacaccctccgccctgcctgcctgggacacagccagaccccattct

SEQ ID NO: 37194 - DNA, 1372 bp, Artificial sequence
  DNA replication origin
aaaaagcctgaggaggcctgggttgaggctggagactcctgggtgggggaatgcgtggtggtggcttggccaaggagatggagggataacagggagagacagggggactgagagaaccaaaacgggggatcaaattcctgctgtgtgatcctcgagtaatagggatgacagagacatgctgagaagagggatgggaaaaggcctgggagacagaactaacacatatgacgtggcataaaactcacgttagctcctaaaagctgacacgaccatcctgtgataaattgtagtggcttagaagtgccaagagcccaagtagctctgccacttacttcatgactttgggtaaattgtttagtctccctgctaaaggagatcacaaatcaaacctacctcccatttgctatgagtgttagaattgagcctggcgtggagttacatctctgagagtgttagctgttgttaatgtgacttccagaaggaaacaggttcggagcgtgcagagagctgatgggggttcaaggtggacgcccgagcggagaggtctgggaggggtcaggagagggagagactgagaaacatgagtgtgctaagaggagctgaaagggaacagaaaagggatccacgaagacttagtagggttgagaggagcatgaggctctgggcagaggaaggagaagggagtttggcagggggcggtggtgtgggaggtggtgggatctgtgctgatgggacgacccgaaagggtcaaggggaggttgtggaaactgagaggagacctgggaaaggactagtgggcttgtagagagaacagtgtgtggtggccactcagaagcagagcctggggacggtggtgggactgggaacatctgcagaaggctggagaagggggtttgggaggagggcctggggatgggaagagactgtggtaggagcctggcagaggctggtaagacacgaaggagagggatctttacaagagaggaaggaacaggaaaagggctctaggccacgccccttgtttgaggttggataatgtttagcaaaataacttgaagaacatgatggcgaattgcctggtgtggagaaacatccggggctgatggactggattgattaggtgaaaaatgttttattttagaggctgcgaggagagagagggtgtgtgtgtgtttctttttcttcacaaggggagaagttcaagtgctgtgtttgggggtggggccacgagctgggtttttggtgatagttttcctgggtggctctgggtgtctggtccctttggcccagggattagtgggctgttggactgtgtgcttggagggagcagctaagtcagccccaaggcatttgctacctgattgggaaggca

SEQ ID NO: 37195 - DNA, 765 bp, Artificial sequence
  DNA replication origin
gccctgggcggtgagggtgaaggctgaagggggctgacaccaggcagaggggctcagggctagatgatcctaggagcggtgagccgcgtctgaagtgtggggggtgcatggggtgagtacggccctggttagcagtgactagtttaaggacagctgaacggaggaacccgggatgatggagtcaagactgtggaggtctcagcactttgggaggccgaggtgggcagattatctgaggcggggagttcgagaccagcctggacaacatggtgaaaccccgtctctactaaaaatacaaaagttatctgggcctggtggcgggtacctgtaatcccagctactcgggaggctggggcaggagaatcacttgaacccggaggtagaggttgcagtgagccgagatcgagccactgcactacagcctgggggacagagcgagactctgtctcaaaaaaaaaaaaaaaaaaaaagaaagaaagaaagaaaaaagcctgaggaggcctgggttgaggctggagactcctgggtgggggaatgcgtggtggtggcttggccaaggagatggagggataacagggagagacagggggactgagagaaccaaaacgggggatcaaattcctgctgtgtgatcctcgagtaatagggatgacagagacatgctgagaagagggatgggaaaaggcctgggagacagaactaacacatatgacgtggcataaaactcacgttagctcctaaaagctgacacgaccatcctgtgat

SEQ ID NO: 37196 - DNA, 1319 bp, Artificial sequence
  DNA replication origin
caacaccgtggggcggggcctcggcggggggtactgccattgccttccacagggtcacgtgggaggtgaggtacagagcgctggggagagagtggagcgccgttcgccggtatgtgcgcatgcgttgaggtctcttgacgccgattggggggtcacgagtcacgggcggcgtgcggcggctggtgggggcgtgtccggcggagcgggcgcggcgttacgaggccgctggttggccagcgctagtcacgtggttcctggccgcaagcgacgcgcgccggtgcgacgtcaacgcagccgggcgagttttaccgatctgtgttccgcggcccggccgcggctgagtcttcccagggtcagggtcaggcgctttgctgagtccctttgtggccgccatggacaattccgggaaggaagcggaggcgatggcgctgttggccgaggcggagcgcaaagtgaagaactcgcagtccttcttctctggcctctttgggtgagaaccgggctgaggggtcggccgggacctaggctgagaggacgaaggagtcacgctcggaggtggcgggttagggcacgcagagctcgggccgaggggacggagaggaacctgcaataaggtgacatggcctgaggcggcagaggggacgcaggctgagggccaagagcctgggccggggcaacacggtttgaggagagacggtctgacatggcggaagggatttgggctgaggacacacggaccgaggcgacactatcttgaggcgaggaaggggacccaggccgaagacaggccagcgggcgggggagaacctggaccgagggagtacgtcctgaagccttggaggggaccggcctggggggacggagggagtccgggagagaagccaggtccagaggcttttcggagctctaggggagtctgtttgaaggctctcaggcggcagtgatggggcctggggctgaggacgcctgcccgagggactgaccttttcaacccctggagcagtggatttgcgtgggccctgggcggtgagggtgaaggctgaagggggctgacaccaggcagaggggctcagggctagatgatcctaggagcggtgagccgcgtctgaagtgtggggggtgcatggggtgagtacggccctggttagcagtgactagtttaaggacagctgaacggaggaacccgggatgatggagtcaagactgtggaggtctcagcactttgggaggccgaggtgggcagattatctgaggcggggagttcgagaccagcctggacaacatggtgaaaccccgtctctactaaaaatacaaaagtt

SEQ ID NO: 37197 - DNA, 1407 bp, Artificial sequence
  DNA replication origin
gaggatgctctgcccttccctgccgcgctcctcagggtccccgcggaggccccgagcgaccccaggtcggccagcggggaagatgacccctgcgcccccaagaaggtcaaggtcgactgcgactccttcctgtgccagaaccccggggagcccggcctccaggaggcccagaaggcaggcgggctccctgcggatgcctcgccgctcttccgccagctcttcctcaagtcgcaggaacctcttgtgagccacgagcagatgcaggtgttccagatgatcaccaagtcccagcggatcttctcccatgcccaggtggcagcagtctcctcccagctccctgcgcccgagggcaaaccagccgccctgaggccgctgcaggggccgtggccgcagcagcccccaccactggctcctgctgtggactctctccacgccggccctggaaaccccgaggcagagggctccccagcccgcaggagaaaaaccacacccggggttcccagagaggcctcccccggcagcacgagacgagacgcaaaggggggactgaaagtggccgcggttccaacgccccttgcagcaccgtctctggacccttccaggaatccagacatctcttctctggccaagcagctgcgatcctctaaagggaccttggacctggaggacatcttcccctccacaggccaacggcagacccagttaggtggggaggagccaccaggagcctcgctgccagggaagcaggccccagccgagaatggcgcggcttcaaggatcacaaaaggtgaaaagggcccagcctgctcccggggtggaggctaccggctcttgggcaaccccagggccccgcgattctccggcttccggaaagagaaggcgaagatggatatgtgctgtgcggcttctccgagccaggtagccatggcctccttctcatcggccgggcccccggcagatccctccaagtccaagctgacaatattcagcagaatccaggtaccagctctctctcacgtggcctgaccagagtggagtgagtttcctttgcatttgttagttgtccaggcattttatttcatttcagagagtccccagatgcaattttacagaggaaggaattaaggttccgaaagattgtggttttccccactaaaaaaaaaaagaccagaatgaggccaggtgaggtggcttatgcctgtaatcccagccctttgggatgggaggctgaagtggggagactgcttgagctcaggagttcgagatcagcctaggcaacatggcgaaacccagtctctaccaaaattttaaaaaagtagctgggcgtggtggcacacgcctgtggtcccagctactcgagaggctgaggtgggggagaatcgcttgaacctggaagatggaggtttc

SEQ ID NO: 37198 - DNA, 1372 bp, Artificial sequence
  DNA replication origin
acttgaggaagagctggcggaagagcggcgaggcatccgcagggagcccgcctgccttctgggcctcctggaggccgggctccccggggttctggcacaggaaggagtcgcagtcgaccttgaccttcttgggggcgcaggggtcatcttccccgctggccgacctggggtcgctcggggcctccgcggggaccctgaggagcgcggcagggaagggcagagcatcctccaggccaccgccggggccgggcggggactcctccgaggggcttccgctgctgggtcccgggccagactcggagccctcccgcgagggcacggccgagggcttgtggacaacaaacacgttgttgcctttgcttttgggacagcccggcaggttccggagccactggaagctgtggctcgatggctgggaactggcagggaccgtctggcctcggaagagaggcaggcaggcaggcacggagccgccttcgggccagcactccgcggtggaccgggcctggagcagcgcggtatctggctccggctctggcgggtcgggggcgccgttctcggcggccctggaattaggggctgtgaacacgtcagtggccggctctttctgtgggaggcaaggctcctcgggaagctcggtgtccagcgctgctggggccgcgtgggggccggctggggtgcaggacgaggaccccgatgaggcggggcagggacaggcagtgttcctcccttcgctgtctgaagcccccgccggggctgggccaggagaaggggtcttctggtggacgatgctactcacgatgcggcgcaggaggtcccggtggggcaggagggagccgggggacctggcctctgggggcaccagggaccgcaggctgctggggggcggctggccggccgactcgtgggcgtggggggagtccccgcaggcctcttcctccgggggggcttccttcaggatgcacaggccgtgatggacctcgtagtgccggcgcagagagcggtagtcgcagtagctcttgctgcagccctgctcgatgcacacgaagggctttgtcttctggtgggtgagcatgtgcccggtcctggagccagacacaagcaggggcgtcaccggggcacctgggaccgggctttctgctgtaggaccctggtggcccccaaaagtctgtggtacagttgcaccacaattcagaaattgtactcagcccccacgaggaaagaccacccagcaaaccctgcttcggtcaaagccatctggcaggggagttcctctcccctcacctttaagcaaaccccttacagaaaagtaaaaaaaaaaaaaaaaaccagcggggcacagtggctcatgcctgtaatcccagcactttgg

SEQ ID NO: 37199 - DNA, 1033 bp, Artificial sequence
  DNA replication origin
ttgccctgaaagcaggtggtgggaaggaagaagcagtcaggacttgggtcccaaagaaacaagaacagagatgtgaaaatggagaagagcaacaatttttggaagaaggcagaaagcagtatcaacagcggagatttgagtgaggaggaaaggtttttttggtaagaagaaataattgttccttctttccttatttttcccccgtgggaagagacctagagaattttaccgggagaaacttaattagggcagaattggtgataaaataaggatatttgctggaaagttgggggtaggtgaggaggactggaaacataaatattagacgagagagaaactggaaggaattagttggtttgttctaagcgaagatattccaaaaaggggcactctaggtgtgaagaaaaaaattttgctggaaagtgatcctgaacggatgaaaaaaaactgggttaattttttttctttttttgcgctaagggaagttacttaaaggagggggaggggcatgtcaaggaaaggaggagagatttggagttttgctggaagatcctaaaaagggataaatctgggtgccccaaagtgggactatggaggaggaagggggattctgagcagaaggggcctggaagaggctagcgaatgcaaggcccagatgcagaaggtggggaggtcgggtagggcccgcggcgcgagctggggggctgcgagggggcagttgaggcccggggggacggagtgggaaagaaaagggggtgcagcgggccaggggatcctgaggagggtcttctccaagggggaagggcctgtggggtgcagcggggcccggagctgttgggttgcagaagatgcgtgcgtgacgcagggtgaggggcgcccgccgcgcctgctgcgcccctcgaaaggcagatggggccccctaaaaaaagaaatcaagaaacgaatgagattgtaaaaagggggaggggttgaaaaaagaggaaataatagtaatgggggataaggaggaaagggaggggcaggggcagcagca

SEQ ID NO: 37200 - DNA, 1712 bp, Artificial sequence
  DNA replication origin
gcggggcccggagctgttgggttgcagaagatgcgtgcgtgacgcagggtgaggggcgcccgccgcgcctgctgcgcccctcgaaaggcagatggggccccctaaaaaaagaaatcaagaaacgaatgagattgtaaaaagggggaggggttgaaaaaagaggaaataatagtaatgggggataaggaggaaagggaggggcaggggcagcagcaaccgggttttacccgcccccgggggctcgcgcgccgggcctcgcgcctggcgcctcgcggggctcccagcggcctcccgccttccccgcgccgcccggggcgcacgcgcagcccggcccacccccggatctcctcgctcacgcgcggcgcaggcgcgcgtacgtgaccgcgggccgcctcacgcctcccagagcggcctcgcgcgtgcctcctggccgcgcgctctcggctgcttctccgaggggcggggcttgccgcgggcgggaaaggaggcggttggtcgccattttgggagggggcggttgagggcggagagtgagaagagtgagccggggaggagcggcggggggaggggccagtcccccaagacccgcatcccgaggccgagagtcccgggagcctccactccagccattgttcctggtgggcggtgttagaacgcggtggcggccgctggatggctgcccccagtccccggaggggcctctgagcagcgtcctggtgctgggaggccgtatcgtctgtttccgaggaccctgtcgcgagcgcgggagtctctcagggtctcttctgcgtcattgggtgggggagatgtggggcgagctgctcctccctttttttaaaatttttttcagagacagggtctctccctgttccccaggctgcgatcacggctgccgcaccctccccttcctgggctcaggcgatcctcctgcctcagtctcttgagtagcagcgaccacaggcgggcgccgccacaccttgctaatttttacattttttttagagataaggtctcgccatgttgcccaggctagcctggttcccctgggctcaagcgatcctcctgcctcagtctcccaaagcattgggattataggtgagagccaccgcgcccagcctattcctcccttctttggggaaaggctgagccatctggggcccctgctccgtgctgagctgtgttgggaagggcggtaggccctggtgccgactggccaaggaccatcttttttttctttttttttttttttgagacagggtcttgttctgccgcccaggctggagttcagtggtgcgatctcggctcactgcaatctccgcctcccgggttaaagcgattctcctgtctcagcctcccgagtagctgggattacaggcacgtgccaccacgcccggctaatttgttgtattttcagtagagacggggtttcaccatgttggccaggctggtcttaaattcctgacctcgggtgatcaggtgatccgcctgcttctgcctcccaaagtgctgggattacagacctgagccaccgtgcccgacctggccaaggggtttgaactgtcctgcaactgaggcagataattcattccttagaaacggagtgctgaagatctgtggagaatgagagcagattagtggttgcccggggtggaaaggggcatcgcggatcttatctgggtaatggaaatattctaaaactgagctatgggcca

SEQ ID NO: 37201 - DNA, 1201 bp, Artificial sequence
  DNA replication origin
tcagatttctctacttgtctgataatttaaaaacaaaacgaaacaaaacattggtctgttcgactcagcatccaaagtccttgggttgcatgtggttgatttgtggctacagtctctcttatctctcggttccctcaagggaggaattctttttaaaaaatgaatggaagaggcaggagcatttgaggatagtgatgggcatgatttggcagaaggagagagagatgatgaatgatataggagacaggaagagaaagaggagaagaggaggaaatgaagaggagggaggagaaagaggggggagggcaggaggaagaggaggaggagaggaagaggagggaaggaggaggggaggaggagggggaaggaagaggaggaggagggggaaaggaagaggaggaggacaaggggaggatgaagaggaggggaggaggaggacaggcagaggaagaggaggaggaggggaggaggaaaaggaggaggaagaggaggaggggggaggaggaggagaggaggagaaacttcaatggaagaggaaagagggagagaaggagggaggtggaagggaagaaggaaggaaggaaggcagggagggagggagagaaggaaggaaggaagggcgggaggcagggaaggaaggaaggaaggaaggaaagaaggaaggaaggaaggagggagggagaccccaatccttgagagagggaatcacagggacagatgacaagggggttcccttctgatggcttctatgtgcacagggaagtgtgggacctagtcatgggctggagggcaggggggaaatgtaagcacaccagagacacatagagagtgccctgcgcctgtctgaggcctgtgatttctctgattcaggtaaaacccgttgggctggctgggtggtttccttctgctgggctcggctggcacagagaagaggatggctggagtttggccaggtgagtcctttagaggccgagaggagtgaggagtgtgagaatgcttgaaggacgtgattcaaaagacaaatcacagaaagcaatgctgaacaaagtgaatagatggagacaacaggaaaaggttggcagagaagaggaacctgcggccagggtgtacccctctccttctgaagagcatcttttcccttagcttctcaggggcttccattttattttgttttgttttgtttatgagagataaggtcaca

SEQ ID NO: 37202 - DNA, 835 bp, Artificial sequence
  DNA replication origin
cgcgtcccctgaggcggaggacggtcgtccggcgggaggacgcgtccagggggagcgccgcaggtccgaaaagatagcgggagtcgaggatgaaggaaatggaggggatggaggggagttccccccggaggtgggaccgcgccggagcccagagttggagcctgacagggtggaaggcggcggggacttcggggtgacaggccgggaccccaggcgtggctcgatcactcaccctagctggtctccgtcgagccacggcggcgccggggaggcgggtcgggcctgcctcggagcctgtccccggccgctctggccgcgctgatgggattcccagaagccccaggacgccgcggtggtgtcgggtccgtttccgccccaccaggccgtaaacgccctgctggcgggacacggattcacgcgttgcccttagcgagcgcttggtgagcgcccactgtgtgcgctgcgcagtgctgggggcccagtggggacacagagcccccggacctgccctcccgatgcttgcagcccagggagatttatactttgttttagtcccttctgcctccccagtgccctagaaaagctcgtgcacacagtaggtgaatgcgggttgaataaatgagtaatcgagacagattgtgattttgttgttgttgtgttatattttgttttgttttgagacggagtttcgctctttcgcccaggctggagtgcagtggcacgatctaggctcaccgcaacctccgtcccctgggttcaagctattctcggcctcccaaagtgcccggcctctgtttttttaagccttaacatgtgttctagtatcttggcggta

SEQ ID NO: 37203 - DNA, 1452 bp, Artificial sequence
  DNA replication origin
agcgggcggtgatctcccggccggaggcggagagcctgcatctccccgcctcgctcggcccctgcgccccctccccaaatccctcccgtgggtgtcgcggacagtggggggccctggaaagctggggagggatggatggggaaggaggccaccggggctccccccttcgcaccgcccctaaacaatgaaaggagttgacttgacccccagcccccggcaatagagggaggtgaccccctcccccacccccagctgaggctcatcccggagggggccgttacgggggtggggggggtgagcgcctcctgtcacttcccgaggttcggggcggccccccatctcctacccctcggcctgggaacgggaggcaccaggcccggccggggcaccgcgctcgggtggtgacctttagacaaaggcagccctttccccggggtgagcccggacgagctgggcctgcggcctccccgggcccctgcggagggcagccaggccgcgggcacccggagggagggatggaggaggagggaggagggatggagccatctggttttcccatccctggctgcccctcgtctgcttccccgactcctgtcacgggcggccgcggggagacgagggaccaggggctgcttgggccttggtgcgcggccagccgggaggaccgggcaaggagccgcgggagagctaggctcgggctcgggcgccggcggtgattgggaggcactgcggcttcttcctctccgcgcccctttgttttgctttgtggttctgagcagctgaacttcccgggaggtggggtcagaggccgcggtgtcagctctcccggggaggcccaggtgacaggtcctagctctctggtgtccccatcctggtgggctgcagtctgtgcccaggcccatgtcctgaccatcgtccccttttgtcaccccccccccacacacacacctacctacccaccccatagtataatacagatctaggggtgcctttctcttacacctctttacggagggcacttgaaagggaaactagaaacatccaaggcatcaaggcctgagattcatgataagctctctgtgcttttaacctctcccagcacctggggtgggtgtggggggtattgtcaactctgacctgccctgggtcatgagaaaatgggaagacaactcaggaagcacccccttcccatgcactggtaggacttttgggacatgttgacctcccttgccttccctcatagctccccgctcaagatggaaatattaataacaatatcaaactagggagctttattccgctgctgctaagtacattacacgctggccacagtccaaggaggaaatagagacgggacagacattcccgttttccagacaggttcatggaggctcagagaggttaagaagcttgcccagggtcacacagccctgggtcacacagagccccaat

SEQ ID NO: 37204 - DNA, 1523 bp, Artificial sequence
  DNA replication origin
gcaggaagtaatgaagggatgagtggctggaaggatgggtctgtgtgggtatttggcagaagggaaggaggggtgtttggatggaagcttggaaggatagagggatgggtaggtagatggatggaaggatggagggatgggtaggtagacgggtagaaggatggagggatgggtgggtagatgggtagaaggatggaggggatgggtaggtagatggatggaaggatggagggatgggcaagtagatggaaggatggagggatgggtagctagatggatggagggatgaataggtggatggatggaaggatgggagggatgggtaggtagatgagtggaaggatggagggatgggtaggtagatggatggagagatgggtaagtagatgggtggaaggatggagggatgggtgggtagatggatggaaggatggaggggtgggtgggtagatgggtagaaagatggagggattggtaggtagatgtatggaaggatggagggatgggtgggtagatggatggaaggatggagggatgggtggatggatggagggatcggtaggtagatggatggaaggatggaggatgggtaggtagatggatggaaggatggagcatgggtaggtagatggatggaaggatggaggatgggtaggtagatggatggaaggatggaggatgggtaagtagatgggtggaaggatggagggatgggtgggtagatggatggaaggatggagggatgggtaagtagatggatagatgaaggatgggtaggtagatggatggaaggatggaggatgggtaggtagatggatggaaggatggaggatgggtaggtagatggatggaaggatggaggatgggtaagtagatgggtggaaggatggagggatgggtaggtaggtggatggaaagatggagggaggaggagactgatggctagagggaggaaagaggaagctttggagggagggttggctagttaaatgtttctgagggctggttggatgtttggagaaatgtttggaaagataaagaagtggatggatggatggatggatggaggcagggaagggagggatgttttggagggttggaggaatatttggaggggtgtttgaggggagggaaggctagatggatgggagggtggatgggtaaataaatacagagaacacctgcttcccctggtgtcagatgggactaacgatcccttccctatgggggtggaacaagctaacattgctgaagtgctcagacagtgcctggcacctagtgagcactcgacaaatgttagccatcctcatcctcatcattcagaccatagggctcagccttgccccggtggcttctctgactcagagcgcccctcctcatgagcccctctcccttgcttctgcctcagtttccccaccaccctccccttccttgggaacacattgcagacatcttcaagggtcacccagagccttgagccacaaagcccttcttgtctacactggctccctcactccttcacc

SEQ ID NO: 37205 - DNA, 1659 bp, Artificial sequence
  DNA replication origin
gtcccacacccttcctcccatcacactgtattcactagaagctaatcagtcagtctggccagcactcagagggaggggaattgagctccacctcttgaaaggagaggtttcaaataatttatagagcagaggcatgagcaatgggatgatggcagcctgggccatggtgcaggcagtgggggaggcatgtggcactggatttgggatctatctgggaggtggcatcaactagacttgctggtggactcgatgttgagggggagagagtgtccaccatggctcctggattttggcttgagcaactgagtggattctggtgccattttctgaagttgggaatttggggaagattccagaagtccaggtggtgctggtggatgtacaagttggggttctggagagatgtccagatggaacaagaaattagggaagcccgagccatggacatacattcactgggcacatatgtggatgccagggcctgttctgggcactaaggatggtgctaagcatctgagaatgccctgcccttccagagatggcaccgcatggcttgtcaggtgcccggatggtaggtgtgccaggcactcaggctgcgttgggaaaggagtacttagtgagaagggacaggagctgttggaccacgagtgaccactcctgaaggctgtgctactggagagactggggggcagtggcagggcgcagcttgggcagaggcgtgaaggcaggattccggaattcgaggcagtcacagcaggatcgcttcgcaggccaggctcggggactcagtgctggggatgccttgggttttaggcaggcacccaagcccctgcctttggggcctcttttcggaggcgagagtttcccatacccccagccctctcccatcccaacccttgtctttttgtcctgagtgaccctaaattggtttctgctccagagcatgggcctgccctgctgacttttgaccttggatggggcgggtcttgttgcagcttgacagtgatgacctcctggataatcccggggaggcccaaagtgccttctatgaaggtcctggggtaagtgccgtggctcccgatcattgcctgagctgttggggctgccagcgggaggagggccctgaagccaagaggggaggcttgggctcatctcgtgagggctgttgacaggaggagggcgggggtgggccacccagggtggctggaccaccctggcagtgcaggagggagcagagctggggaaccctgtggggggccaacatggacaaggctgactgtgccttgcagaccccttggggaagaggtgagggtccccgaggccttggggccctggggtggctcatgcagagtggttctggggagctgaagcggatgtgggttgtggggttcacaggggcactcctggagagcagagggctgggggaggcctggggtcctgcccaactcagccatggcagggtgtgacctaggggaggggcctcctcacctgcagacttcagtcttcacctgggcagtgaatatgggtgctgagaaaagcccagagtggccaatgcagaggatgtttattgagcacctactgtgtgcctgactatgccggtcccatgactaagtgccagttgtccacaccacggtggccacctccttcctccttctccct

SEQ ID NO: 37206 - DNA, 1701 bp, Artificial sequence
  DNA replication origin
tggatgaccaggccagccccctgtggcgagacaccggccgacgccagcgtcacgggctccgaggggccagccgccgaggccaggtagccgctgacgggcacctgcttggccaggagctgggaggtgggcgtgttgagcgccatgacgggctggcccaccacctggatgggcgccaggcccagtgtggccgccgtggcacccccagggctgccattgggcaggccttggaggcccgggatgggctgcagtgtcacattgcccaggcccacaggctgcaggaagggctgcacactcagggccttgttgaccacgtcctggggcggcaccagggcctggtgggtcagcacggtaggcgggccctgcagccccagcaggtcggtgctgcctgggaagagggcttggggccccgcagccacggccgctgcccctccagcgcccgtcgggcctgccccgccatccgcaggctgcagggtgggcagctggaagggacccaggtccagctcagcctcggcctccagcgtctgctccgtgatgttggcctcttggaggctctgctggaggatgtcacagggctggtcagcgcccccactgcccccgccgccgccccctgtcgcaggagagcccaggatgtcatcttccaggaagtctaggtccacactgggggccggctggttgggctctgggttcaggtggttgccggaagcttcttgcacatggagctgcaggccgggaaaggtgggaaggaaagagctgaggttagcaaggggctacgcttaggccacagctgccgcaaagaatgctgaggtgacagggcagccacgttcaagaaagaacattccctcctggcatggtggttcacgcttgtaatctcagcactttgggaggctgaggtaggaggatggatggcttgagccaaagagtttgagaccagcctgggcaacgcagtgagaaaaaaattttaaaaaagaaaaattagtcaggggtggcagcatgtgcctgtggtcttagctacttgggaggctgaggtgagaggatcactggagcccaggagtttgaggctgcagagtggagctacgagcacttcactacactccagcctcggtgacagggcaagactttgagaagaaaaaaaaaaaaagaagaaaaaaagaaaaaaaaaagaaaaaagaacattccacctgcaagtggctggacccgggatcaaatcccagctctgccaaggcttagctgtgtaacctagggcgtgcttgatctgacctcagtttcttcatctgtacccatcagtaaaatgtaataaaaaaaactactgttcaaggccacagtgactcacgcctgtaatcttagcactttgggagcctgaggtgagaggatctcttaagcccaggagttccaggctacggtgagctatgattgtgtcactgtactccagcctaagtgacaagagtaagacccagcggggcaccctcaggaaagccgctggtggtggccccaggcctcagcttgtcaccactggtcccggcgcccaacgtgatcctgcatcgcacgcccatgcccatccagcccaagcccgcgggggtgctgtcccccaatctctaccagctgacgcccaaaaaacaaaaataaagtctaggcacggtggctcacacctgtaatcccagcactttgggaggcagaggcaggtggatcacttgagcctaggag

SEQ ID NO: 37207 - DNA, 1358 bp, Artificial sequence
  DNA replication origin
tcgcgaaccccatcctcacaaaccagaacctggcgggcccactgagcctgggccccgtgttggccccccactccggggcccacagcgcgcacatcctctccgccgctcccatccaggtgggccagcctgcgctcttccagatgcccgtgtcgctggcggcgggcagcctgcccacgcagagccagccagcgcccgccgggccggccgccaccactgtcctccagggggtcaccctgccccccagcgccgtggccatgctcaacacccccgacggcctggtgcagccggccacccctgccgctgccaccggggaggccgcgcctgtcctcacggtgcagcctgccccccaggcgccccccgcggtcagcacacccctgcccctgggcctccagcagccgcaggcgcagcagcccccgcaggcccccaccccacaggccgccgccccgcctcaggccaccaccccccagcccagccctggcctggcgtctagcccggagaagatcgtcctggggcagccgccctctgccacccccacggccatcctcactcaggactccctgcagatgttcctgccccaggtaagcagggcggggcaagggagcaggtaccggaggaggcgggtttgggaggaagaggggtcctggggcgaggcgccaagatccaaaagtggatgccactgtggcagctggggggggaaggtctcagtcatggcacaggtggcccctaagaggaggcccgaagggtgagggccctggctgaactggcaggaagatggattggcaggttggctgactgatagacaaggggcaggacaactgttaggcagtgagagggactggcagacagacagacaaagagagggaccagtgaacagacagaagggtaggcactggctgggctgctgacagatggagaggagagggaccggcagggagagggactacccgacggacagagaagggcaggcactggctggcctgctgacagacaaggagaggaatctcagagagaaagtggacgagacagggacagagggacaggcaggtggggcaggagagaggcagggcaacgtggagctggcagaggggccaatgggagctcagaatggagcaggctgcctgggtttcggcctctgtgcctggcaccctgcctgccaggctgcccactaccccattctctggaaccctgggagcgtcaataggggcaggggtctcgggtggggaggtcgagggcctgtgggggcggctttctgatcctgtgcgggctgcccgttgcaggagaggagccagcagcccctctccgcagagggcccccacctctccgtgcctgcctcggtcatagtcagcgccccgcctccc

SEQ ID NO: 37208 - DNA, 903 bp, Artificial sequence
  DNA replication origin
gaagggggtggtcaccatctggaaggtccgaggaggcggtggggggggtgctgccggctcagggaccaggtggagggttggagggggagtgggggacttgtggggcccctggctgggtgggaactggagctggaagtcggatggcgtaggggctggcaacctggaggacgtctcagaggaggaggccacagcagaggaggtggaggatggagggaggtggggggctgggggcagcggtccctcaggcggctgggactgggggcggagaggcggctgcggcgggcctggggcagtaggggccgggttgctggcaggcgggggaacgcctagctggttttggatgacaaagatgccaggcagagttgggggggcctggggtggggggcaagggtgcaagggtggctctgagggagggcgggacacactctgtggccgggagggtgggcgggaagggggccgggtggggtgtggggagggcaggtgggggctgtcccccagaggggcctggtgaggtagtgacggggacgaagaggggcctgggcccttcagcggagccgctgccgggatctgggcaggggagggagggagaggggaggggcgggggtcagaaccaaccatagctcctgttgccccaagacactggggtccccagccatccccgccagaagcccccttcctagcccacacccatcctgagagaggagcccaccacggctgcccttccctccctcgcctctcattccccacagcaccccctccacctgccctcgacctctgtcccccaccgcagctcctccacatttctctggcctccgatctcaaccccacttctgccccattccccccacccctcgcagttccccagacaaaggcgagccctgcagggttggggtggcagcagca

SEQ ID NO: 37209 - DNA, 958 bp, Artificial sequence
  DNA replication origin
aagcagaggagggaggcctgggggtgggtggggtgggggagacagggcctgcggtcactgcatgaaggccccctcctcaaacgggagccccatcctgtaccccaccgctctcctcctggccctccggcccttcaaatctggggccagccctgccacctctggccttcctgtgtcccttgagttctggctgatgccctgtgctgagtcccacagccctgccccagcccattctccctgctcagccccgcccacccatcttcaggccccgtctccctgggcacataggcgacctctctcctacctgtggcggccatgggtgccggggcgggggcgtggctgggggcagtgggggtcccagatggggcctgcccactgaccagcacagacgcagcggggctggtgaggggccccaggctggtggaggtctgcggggcggcaggggcccccccagccttgttctggaggatgattccggacggcacctgaggaggggacaggtggatgaggggtggggaacataggctaggtgtaggggtgtccagacgcagcagggctggggaggatcacagagccgtaaggcggaggggctcccatcagactgagagggtgggatgggatggggctgatggggcgggcagtccctgcctcccgttacctggtgaaatctctcgagaagagccttcggctggggcagcgctgggaagggggtggtcaccatctggaaggtccgaggaggcggtggggggggtgctgccggctcagggaccaggtggagggttggagggggagtgggggacttgtggggcccctggctgggtgggaactggagctggaagtcggatggcgtaggggctggcaacctggaggacgtctcagaggaggaggccacagcagaggaggtggaggatggagggaggtggggggctgggggcagcggtccctcaggcggctgggactg

SEQ ID NO: 37210 - DNA, 1242 bp, Artificial sequence
  DNA replication origin
aggccccatctgggacccccactgcccccagccacgcccccgccccggcacccatggccgccacaggtaggagagaggtcgcctatgtgcccagggagacggggcctgaagatgggtgggcggggctgagcagggagaatgggctggggcagggctgtgggactcagcacagggcatcagccagaactcaagggacacaggaaggccagaggtggcagggctggccccagatttgaagggccggagggccaggaggagagcggtggggtacaggatggggctcccgtttgaggagggggccttcatgcagtgaccgcaggccctgtctcccccaccccacccacccccaggcctccctcctctgcttccagccgagaacaaggcttttgccagcaacctcccgaccctgaatgtggccaaggccgcttcctccgggccagggaagccctccgggctgcaggtaaggggcccttagagcaggggtcaggacaggaccaggagtcttcgggaactgggaactggggctggcaggggcagggagacactggaagacgcggacaggatgaagctgggaccatcaggcagctgagacaccacgaacagccgtgcagggacaggaagggcagaatgacacccagacaggcagccagagatgagggagaaacacggagacggtgggacggagacggcaccaagactactggcaacagtgtaagggactatgactggggaaagagcaggtgatatggacacaggacgggaaggacagggctgagatgacaagatgtgagctcaggacaggaaaggcgggtttagatgagacagaccggagacggagcagatcagggaccgagaatgaaagggtgagagggtggggacagctgaggccgaggccacttgtagatgtaagacgtgggggagacagaagacaaggagaggagcaggtgggaggaccaggacccaagaggccgggagaagctcagagatggagatgccagaatgaaggccagacgctgaggacaagaggggaagccaggaagggaggcgggggggcgaaacgacaggagccacactgggagagagactgtgcgaggcaggggcactgggtgctgggcggtgatgtgggaagcaggcatccggcagaggagggaggtcacacagaggcagccctgggcgaggggacggagggaacccaggcagaggacacccagggctccagcctgcctgtcaccctctccgtcc

SEQ ID NO: 37211 - DNA, 882 bp, Artificial sequence
  DNA replication origin
gtccactccccagcccagcccaggtcttcccctggggttcattgtgatgggcaggggatcctgtagctggggccaggcccccacctgggtgagacactggtcccctgtcccgtctttatcctaggctagaggggaagctggtcgggggagggaaggcttctggaggcaaaggcctctcactcgcctttcttctcccagtatgagagcaaactgagtggcctgaagaagccccccacgcttcagcccagcaaggaagcctggtgagtccacaccccatccttgcatgcctgccctgtaccttccagagacctgggggagcatggggccaccctccagaagcagagttgggcaggcccaagtgccaagcccagctccacctcttggtagcgatgtagttccctcatagaccctcagtttccccctctggaaaatggggtgaccagagagtggtggagggagggtgggctgtggctccgccaggctggggctcaggagggcggcagtttggtccatcctggttgttgctgtgccctccatgtctcccacacggctgggccgcgtcggtgctgagccccactgggtgggtgaagtgatgggtgggggaagtgagtgggtggacatggctgttgggaggatgatggggggggtgtttggggatggatggatgggagtctgggcggatggatgggtaaatgctggatgcctgcctgccctctctcctgccctccttccaccaccagggttttttgttttgttttagggggggttctttgagccagaatcttactctgtcacctaggctagagtgcaatggcacaatattggctcactgcaacctccgcctcccccgttcatgtgattctcctgccccagcctcccaag

SEQ ID NO: 37212 - DNA, 1308 bp, Artificial sequence
  DNA replication origin
gggggaaggggcgcgagcgacggggacgatgcgtgcaaggtccaaactgtccttgtgatgggagctcccgcctccctcccaacctccctcccggggctaggaggggcgggaggctccaccttgcccagagcgggtgagggaaaggggcagtgtcccagcgaggaggagcccagaggcgaggaaggcgactctgaccctacccgggactcctccaggagcaggagccgatatttattgagcatggcctgggtgcgtttcagcagctgcgtggagaccgtctcaaactcctcgtccactgcgaggaagggaagagaggcaagggcggagatgttgggggcggccgcggatgcgcaggaaggagggcggggcagggtcagcatagcgcaccgtggacctgcggctccacactggcgacgccccgccccacgggctggggtcccctgggacatatagggccgtgtcctggggaggcctcacctttgtggtagtcactgggggaggggagggcgccctggtagacatggtagggcaggaggcgatgcagggcgtcctcaaaggaggggaaggccgtcttgtagtcggggtgcaggacggagccctggtgtttgtgcaaatgctccaggaaactgcgggtggaaaggggagagaccacacacggcggagggtgggggggacgggtgagggccaggggaagtccctgaaccctcagccccaggccgcaactgaacacaacagcgggaaggggaatacttgggcagtggtgttcccatgtactgaacgtgcttgttccatctcactgagtccctggggccgaccaaagcagtgctatcgctatccccattttacagaaagggaaggtgaggtcgaggaagtgaagtcactcctctccaaagcacgtaagggaggaagagcagagcgggaagtgaggccagagcctggaagctgctattctgcctcctgccacctggggccagtgtggctccaccgtgcctcctccaaagtgcagccttcgggaagaagggagggaggctggatcctgtcttctcacgggccgcttttgtagcccatgttacaatgggttttgtctgttggcagtgtgactgtctcccccaccaggcaggcccaactccaccctcggctaaaaaccagcagcctctctgcactgtgggggcagggactttgtgtcacttactcctgtgttcccaacatggggctcaggcctgggcactgagtggggacttaattcacactcctaggccaagcagaggctcacgcctgcaatcccagcgctttgcggggccgaggcag

SEQ ID NO: 37213 - DNA, 1408 bp, Artificial sequence
  DNA replication origin
ggcgctctgcaggtgctcggtgagcgtgtcatcctgcgggctgtcgctggagaagctggcctggtccacgtcgggcgactcggacttgcgccgcttggcagggggcagcccgggcgcctcccagtcggggtccccggtgccttgggcggcgctggctgcgggctctggcggggggcccttcagcatacgctggtacagctcgtcctccacggccgccagctcgcggatgagcccgctggtggcctcgtccactttggcgggcagcggcgccgggctgcctccccgtgccctgcctgcgggcgtcccctccggcgcgccagggccccccacgttctcgcggtaggtcttgcgcagtggcaggcgcgggcagtgcggggcggtgcccaggggcttgcgctcgggggcggcaggcggcgggtggtccaccgtgccgttcatctggcccgtgggcggcggtggtggtggcggccgtggcgggggctcggccaccttgagggtagcggggggtggcgggggctggtgcacggggtccagggccgtgttgtgcacgaccttgctgagcccggcttcctgcttgatcttgagcttgagcccgatgcggctccgggcctcgtaggtcttgatgggcgggcggttgcgggagggcatggggccgtcctcgtcggcgtccaaggaggaggcggcagaggaggaggaggaagaggaggacagggaggaggacgcccgggcccaggtgaccgaaggggagccgcctgccccgccgtgccggatcacaagcttggtgggcaggtgtggagggggctgggtggaggccccgggagctgaagacgacagggggccgtggccgggaagccgatgaccctcggaagaggctgcgatggggaggccgagcgagcgggaggaagacacgtactcgtctgcagaatcggggcaaagaaaacccgcggggttaggatgaggaccccccgaccgagctgggaggagctgtgtgcagtgagcacctactacctgccaggcaccagactgcaccctggaccctccaatcctcaggataggcttggtgagaccctcttcagcaaggcccaaattcccccaactctaaaaccactgtgcctggcacagcgccacgagccacgtggggctcattcagacataagtaaattaagagaatacaaaacaaggctcaggcctgtaatcccagcactttgggaggccaagggagggggatcgcttgagcccaggagtttgagacctgcctggccacagtagtgagacccctgtctctacaaacaaacaaacaaaaaaacaataaataaaatatgaagttctattggacagcactgctctaattatatacataactttttaaaaatggggctaaggaggtatctaatttcaaaatctggtc

SEQ ID NO: 37214 - DNA, 1445 bp, Artificial sequence
  DNA replication origin
aaccctgtctccctgggggcaatggctcagtattcactaattctcagagtgtatgcagagattatagaaccttaccggaaataagaagaactggcttgatctggcttagctgtttaccacccgccttccccactaacaagtcagcttaccggcttagcagggactcttgtctgccttgttcatgttgaaccccctgagcctagaacggggcctggtactcagcaggtgctcaacagatgcatgcggaagaaggcctcacaatcccagatccaaacactcccccaccctcacaaacccaaaagcaatgggccaagggggcatgagtacagttttaaaaaaaggatcggtttttaatttacaagagttctaaatgtacagaattctcctttaaaaaaatcgttatacacaataaatacagtacaaaaaaatttatcttacagtactagttttgtctccgagatttcaaaatctggcgcgggcggctggaggcaggaagaacagagggaagactagctggggagaggttcgggggagaggaagaccccagtttcttgttttgctcagatttcaaagtcgaggggtgggcgttcgaaatctctcactcacttgtgcacacacacacacacacaggtcacggagctggacgtgcggatgtcacacgggtgcctgcgggcacagcacgctgggaggctggctcccccaccccctctccggttttgtttgacagcctgttgggggcggcggggagaggctgagactgtctggaaggaccctgccagctcccagcaccctccaccatctgagaagccacacagacaagacaggcacccggagcgttggcatcaacccggtggccccatccctggcaaacacatgcgcgtgtcccccggacagaggggcagagtgtgccaggaaatgggaagaaacaggaactgacacagcactttgcccctcctttggcaggggagacgttttacatcacagccccctccctaaatccacgcccaccccccagcaacccagctgaagcaggcggcagggaaggaggcctttgtgactcaaataacttaggcaagaaaaaccgtcaggggatccccggctcgagtccccaggaggctgagggcggacacccgactgtcccggcgtcttcgggaggaggggacggggaaggggaggcggcccggtgttatctggtcaacgtcctggcgccgaggccaccgttgtgactggagggtgggtaggcctcgggcctgtgcaggggcggcggggatgcgggggtgccggccgaggcagcgtgggggtacgagggcgcgggcgtccggccgggggcctgctgcaggttcaggatgctgtcgatggcgctctgcaggtgctcggtgagcgtgtcatcctgcgggctgtcgctggagaagctggcctggtccacgtcgggcgactcggacttg

SEQ ID NO: 37215 - DNA, 1147 bp, Artificial sequence
  DNA replication origin
tcaggaagacagcaataaattacccaagatcacttagctggaaaatgctcaagctgggactcaaacacaggcagcctgacctcagaggttgcaatcctattataggtctaaagatctgagttagggaggttagccatgaccaacccaggagcaatgagcacctccagcacccagactgtgttctctatcttcccttactagccttttattcaccgtaggatctgtagtgatgtcccctctttcattcccgatatcagccacaggtgtgggtatttgctttttttaaaaaagaaaaacaaaaacgattgctccccgttgatgcttatgattttactgatcttttcaaagaatcaacttttggtgagatgggagtctctaaataccattccccactaaaagaacctgggactccttagagaaatggtggattccagggcgggggcagggaagaacaagtgagcctgggtcagaaggtgaggaagtgctcaaaggccgatagggcatgttacagggacagaggacccagcttgcaggggtgcccagtggccaaacatggggcaatttgagcatcaaaataactgcaaatcaaatatgctaaaatccataaaatcatgagacttaaaaggggtggccagggagtaggggagataaaagcaaaaggagttcgtaaaggagtggcaagaatggaaaagagaggcaggatctgggatgtgggcagagggagagggctctgggcggtgtcccaggcagggagggccctgagagagagctggggagaatgctatcagcggtggccgatggagctggtgaggcaggagaggggctcttgagtggctggagggaccaagttagctgatatggatgagggcgtggagggagaccctgcagagaggatctcttctagcccaggggatagggaggggtgttgggggaggatggaggagactgggggagtgtgagaggctgcgaaagactggaggaagagtgggaggaagagtgggaggagtgggaagagtgggggacatggttacagactggggggactggtgaagactgggggacacctggggagaccgttacagactggggacagggtggcagggagcaggggtcaggcatgaggaaccagggcaggcttgggcggggg

SEQ ID NO: 37216 - DNA, 764 bp, Artificial sequence
  DNA replication origin
ctcgcggctggcacacctgttgaggaaggtgtttccgaaagggttgagtttgcggaagggcttgtccgggtccacgacgagggcgttgccgggcacggtgccctcagtgtccccgtgcatgacggccacaaagcagtcggtggtgggctcaggccccacgcgggagccgggcacctcctgctccagcaggtactggatgaagctggtcttgcccgtgctgtactggccggccaccagcaccatgggcttgccgtcgaagtctgcgtcctccagggccggcgagtggaaggccccaaagcggtagtgctcctccagcggcagcagcttcgtgcggtacagctccttgagggccgaggtcaccgtgcggatggcctcgggctgctggccccgtgccccgccccgcttcagccagctgaacatggtggctgcacaccgctcacggggttcacggagagacgtgcagatggagagctgcctgtgggagggggagagggcatgagcataggcggcccagccaaggaggaagaaaggggtctgagtgtagactgtctgggtgacaggatgggtggaggaggaggaggagcacagatatttgtggtcacaaatatgtggtcacagagcatggatggcaggtggcaggaggaagaatggaattgggccaggcgcgatggctcacacctgtaatcctagtattttgggaggctgaggtaggaggattgcttgaggtcagtagttgaagaccagcctgggtaaaatagtgagac

SEQ ID NO: 37217 - DNA, 1134 bp, Artificial sequence
  DNA replication origin
aacatgagctgtggctggttataactctgagatggtcctggttgccctttttctgtccggtgtctttcttcgcccataaaggatgctttgccatgcggtcccgagtccctcttcatgttttcttcgtgttttccctccttctgtccttccctgttgacccctgaccctccctctgcccccaggttcatgtgtgcccagctccctaatcaggtcctggagagcatcagcatcatcgacaccccgggtatcctgtcgggtgccaagcagagagtgagccgcggtgagtggggccagaccctggggtctgagggaggaggggctggggcctggactcctgggtctgagggaggagggactgggcccggactcctgggtctgagggaggaggggctggggtctggactcctgggtctgagggaggaggggctggggtctggactcctggatctgagggaggaggggctgggcccagactcctgggtctgagggaggaggggctgggggcctggactcctgggtctgagggaggagggactggggtctggactcctgggtctgagggaggaggagctggggcctggactcctgggtctgagggagaggggctgggcctggactcctgggtctgaggtaggagggcctggggtctggactcctgggtctagaggaggaggggcggtgtctccgctgggacttgggcctgtgtcctctggccctggctggcggggcagccgcagggagctagtggaagctgtgactgctccatgctggctcgcattgatgggtgggggaggtgtgtgggtgaccacgtggtgggagcgggcaggagccgcacgtctgggcaggcaggaaggatgggaagggagagatgaagagggacagggattccgaggcagtgagacagcgacgcagggagacacaaggcctggagatgaggcagagcctgggcaggggaggcagagcccgggcaggggaggctgggccctgcgagctcctggctctgcgtctgggccacagatggggccgagaaggggatgggaagggaatctgggtgggggccaaggccaggcctggaatttataaacagctgtgcaaggagagtggcggggggtggattccagccggggcctccgg

SEQ ID NO: 37218 - DNA, 994 bp, Artificial sequence
  DNA replication origin
ggcagtgagacagcgacgcagggagacacaaggcctggagatgaggcagagcctgggcaggggaggcagagcccgggcaggggaggctgggccctgcgagctcctggctctgcgtctgggccacagatggggccgagaaggggatgggaagggaatctgggtgggggccaaggccaggcctggaatttataaacagctgtgcaaggagagtggcggggggtggattccagccggggcctccgggcgtgctgagccctcaccacccctgcccagcccagctcagcatctgtggtcccccagccccacagatctgtgtcccccaccccccatggccttggaggcccagaactggggcaaaggaggctgctatgtggggcagagaggatgggaggccctggcgagaaggctgggcctggggtggggtggggacgctgggggtgaccatgtctctggctgccgtccagaggccccacgggagaaaggcaggaggcagctgcagaaacgattgggaggacacgctgccagctgagggggaggaattcctggggctcccaccccagggcctggacctgggacagcgggagggagaggctctctcagccagggcaggggtgccggcaggggggttcaaaggccatgggtggtgggggagtggggaacggggtctccctccctggccttgaggatagaggaagaggaggagagagtgtccagctgttggtgtgtatatgtgtgtgtgtgtgtgtgtgtgtgactttgtgtatatcttgggaaagtgtgtcattatgagtgtactcctgggtgtggtggttccacgcatttgtgtatagcagtggacgtgcctcattgtggccatggctctgaggttgtatgactttgaattgtgtacatgcctctgtgtgtgtgtgtgtgtgtgcgcatgtgcctataattgtggctggaagactttgttttgtttgtttttgagacagagtctcactctgtcgcccaggct

SEQ ID NO: 37219 - DNA, 1028 bp, Artificial sequence
  DNA replication origin
gagtgtactcctgggtgtggtggttccacgcatttgtgtatagcagtggacgtgcctcattgtggccatggctctgaggttgtatgactttgaattgtgtacatgcctctgtgtgtgtgtgtgtgtgtgcgcatgtgcctataattgtggctggaagactttgttttgtttgtttttgagacagagtctcactctgtcgcccaggctggagtggagtggcgcgatctcggctcactgcaacctttgcctcccgagttcaagtggctctgctgcctcagcctcctgagtagccaggactacaggcgcccgccgcacccatgtccggctaatttttgtatttttttttagtagagacgggatttcaccatgttggccaggctggtctcgaactcctgacctcaggtgatcctcctgccttggcctcccaaagtgctgggattacaggtgtgagccaccatgcccggcctgctggatgactttgtgtgactctgaagggctgtgtagggctatgagagactttgtgggatagtgtgcaactgattctgtccctatatactgttatattgtgacgtgtgtgtgtgagagagacagacataaagggcaacttttgtctatgtgtctatgtggatttagtgtgtatcattgtaggtgtgagtctgacattgtgtgcctgtgtgtgagatggtctaggcatatatgtgtatctgggctgtgggctgtgtgtgactttgtgtggctgcatggggcggtcagggctgcggggattttgtgggactgtgtgtgactacctgtgattgtatctccggatacagttgtgtgcttctgtgtggtgttgtgtatgtgagaatgtgtgtgtgtgcaggagtgcatcttttgtgtaactgtgtgtgattacgtctgtgtgtgtgcctttggatttgggagggcatgggaggttatgtgtgtgcgactgtgtctgtgtgggtgtgcatgcatgtgtgcctctgtacctgtgtgttcgtgcaggtctctgtgtctatgccgtgtgt

SEQ ID NO: 37220 - DNA, 1280 bp, Artificial sequence
  DNA replication origin
gcctcagcctcctgagtagctggggttacaggcgtgtgccaccacacccagctaattttttgtatttttagtggagacggggtttcaccatattggtcaggctggtctcgaactcccgacctcaggtgatccgcccgccttggcctcccaaagtgctgggattacaggcgtaagccaccacacccagccaatcagggctctttgaattccttcactgatttatccccagtgcccggaacagaattggtgctctgtaaatatttattgaatgaatgacattgaacaaacagttgcattgaacaaaatctcctctatgcctggcctggtgttgggtggtgcaggagacacaacagtgaccacgatggttccagtcctgtcctgctggggctcccagtcctaaataatgaaggcagttccagggctcagtcctcactggggctcctggagaggagacagatccatccccaggcaccgatgacccagtgtggtcagagctggggcggggtagctggggcaggcagagagggcttctttggaggagagggcatctgaggggaaatgtcagtgttgaacccagtgtagacagtgtgctaactcaattagaggctgaggatgtggctgagatcagaggtggtgtgggctgtgtccgggaatctgtgctttgtccctagggcactggggagccatgaaaaagttcggagcagggaaaggagataattagactcaagctaccttttggagggtggattcaaggcaggagagtctaggagcctggagaccaggcaaaaggcttggaggttcctggatcaggacaggccttggggagggagaggagaaaggagagcgcgggtttcagagcgattttggatgtcagatggaactttctcagggggaggctgccagggtggaggcggggcaggaagctgggcaggcagggaggccaagaaggttctagggggtggaggagcctgaggtgttggtttaaggagcagcgagagtgggtgagtcagagcccccacccccaccccaggaatcctccttcggagggagcggcccactgtggaccaggctgccactcctggaaccttcggaattcaccttgcgctcctctgcccaggcggctctgcagtgtctctctctctctttttctgtctctatgtcagtctcctttctacctctctctcagtctctttcttctccatttttactttttcttttattctaactccctttccttttctttctcgctctgcctcctcctgtctctccatctctccccc

SEQ ID NO: 37221 - DNA, 1418 bp, Artificial sequence
  DNA replication origin
ctctatgtcagtctcctttctacctctctctcagtctctttcttctccatttttactttttcttttattctaactccctttccttttctttctcgctctgcctcctcctgtctctccatctctcccccgctccgccgccgccctctctctgtcttcctcctggtcttgcttagactcccccaggttcgttcccgcgggtcccttggcgggagctggagcacaaggcccagggacagaggggtgggtccgggccagacacctggtgcccccgccgggctgggggcggctccggaaacccagacaaaccccggagtcagggacccagccccggcccagcccgccctctcaccttatctcttcctggcaccttcccctgcttcctctctggaaaagccatcagcgccctcccgcctaccctcctttggtccctacggagccgcccttcggccctgccccctggctccattggcccgctctcacaggccccgcccccagcccggccacacccctgccctgattggtccttcagaccattaggcactccctccccctcttcctgcaggttcatccatggctccccagtgccgttcaggacacaggagcatgggatttagggtccgctgtgaccaaggctcactgcccctcctttgccccgtgtcgcacccccacccctgctcctcacatatgagtccgccacacttggtcgtcaccaacaatagccatactgttaacctcccctcatgctctcctccaaagataccaggccttcctggactctctgggaggaggcattcaccctcctcccagtgcctcagtttcccatctgtacgatggagggtgtggacgaatcctctggctctaagtcctttggctgaagtgatagctgttagaaggggagattttatgatgctgtgatacgtaaggccaagatcttgggagggtctgattctatagacgccaagatgccctgaaccttcagaccacattctctgcagtggcccagtgacattcattcagcagttgccgatcgcatgtggtactcctctaggctctggggatacagcagggaacacagataaattccttttctcatagaattactttttagtggggaagcaaacattaaacaaatcaatggttatgaagaaaaatgaagcggaggaaagaggggctggcgagggactattttagagcgctctgaaggagaggaaggggtaagaggaaggggtgagccgagtggcgatcgggtggaagagcagtccatgcagtgagaacagcatgtgcaaaggccctggggcagccatgcacttgatgtgtttgaactgagagcctaacggggctggagacagggtggtggtggaaggtggaagagatgaagatttagaaccagtcagggaccaccaacgttctcagcagtc

SEQ ID NO: 37222 - DNA, 1353 bp, Artificial sequence
  DNA replication origin
ggagactaaaataaagccccggggcctttctacgtaggggctccacttaaatatggaatggtggtaggcagagaggcggtggcccagcaatccttaagtccagattaccagctgtggggaggcttccagggggccaggagcaggctgggcagttccagccacagacacgtgggtggaggacggaaatatctccaagggggcacagtatcagaggagcaggatggaaggggcttttctgcctgctacgggatcctttttaaagaaatgggtgtgaagccgggcacggtggctcatgcctgtaatcccatcactttgggaggccaaggcgagcagatcacctgagatgcggagttcgagaccagcctggccaacatggtgaaaccccgtctctactcaaatacaaaaattagctgggcgtggtggcgcgtgcctgcagtcccagctactcaggaggctgaggcacgagaatcacttcaacccaggaggtggaggttgcagtgagctgagatctcaccactgcactccagcctgggcgacagagcaagattctatcaaaaaagaaagaaaggacaggacaggaaagggaaggggtgtggacagaactgggggcaaaaacaaaaaagaaggaaggaaggaaagaaagaaatgggtatgggcagaattgggggcaaaaacaaaaaagaaggaaggaaggaaagaaaagaaggaaggaaggaaggaaataaatgggtgtgggcagaattgggggctttccccgagcaagggaaggggctgcggaggggcccatctgaggaagcagtaggtgtgtctcccctctgagccccccatggtcccgagacctgaggatgtgatggagccggttgagggtgttgcctggctgggcaggaggaagcggagcagaagggggtctgtttatctgctagtcatttcagccacagggctgctcagccaggggaggggctgggggccctgccaggaattagtgtgtgtttgcgtgactgtgtaggtgccctctcctgggaacgtcaccttccatgagggcagatgtatttgtctattttgttctctatggtaatgcccagtgcctagaacagggctgggcacatagtaggtgctcaataaatatttgaatgaatgacggatggatggatgcctgcgtgtgccagtgtgtgtgtgatgtgcctaagtgaacgtgaggctggaggtgtgaagggcggacagagaagccttgtccctcccgtggtcccctctaaatgcttccaccggggtgtctggcggtagtgaggagggagacccccggtccttacagctgggcagggagggcaggcagggcgtgtgtgagccggagcaggg

SEQ ID NO: 37223 - DNA, 1276 bp, Artificial sequence
  DNA replication origin
gtgcgctgcccagctctggccaagagtccccggtgcgtgagcgcgcgcacactcctggcagcccgtgtgggcaaggtcaccacttccccaaccagaaaccagcgtgttcctggtgttacgcgtcgggagttatgtacccaggttgtgcaagggcacgttgccgggcagggcgggagctgggagagcacttcgtgcccgaatacacacacacacacacacacacacacacacacacacacaccccgcgcgcgccccagggcttggttcccaggcccccgccgcgggaggtgggaggaagggatgtcccggggggagggccccagagtcacttttcctcggaaaatatgccgttctggcccccagcccaggcctgagtcaccaggcctcgctgcattgagtcacggactccaccccgcccctgagagcacggaagggggcctccccccaccccaaatcctgcccaggtctctctttccctgggggagggcgggcgatccctgtcccaagccagcctcactgccacatgggaagaagccttggctttattcgctctgtggggacactgttccgttcagaggcccctcccagccatggggtgggggacagtggtgggcgtgggaatcccagcgagcatcctggagggtgcgtcgtctccatgtattttgctcttccccatcttttccatggggtcccctgccagggtcaagcactaatatgtggtgaaggcagcaaacagcgtcggcgtccctttaggggtggggagagggctgtagcaccaagaaccccctcccccgcccacgacatccctgaaaaggagactaaaataaagccccggggcctttctacgtaggggctccacttaaatatggaatggtggtaggcagagaggcggtggcccagcaatccttaagtccagattaccagctgtggggaggcttccagggggccaggagcaggctgggcagttccagccacagacacgtgggtggaggacggaaatatctccaagggggcacagtatcagaggagcaggatggaaggggcttttctgcctgctacgggatcctttttaaagaaatgggtgtgaagccgggcacggtggctcatgcctgtaatcccatcactttgggaggccaaggcgagcagatcacctgagatgcggagttcgagaccagcctggccaacatggtgaaaccccgtctctactcaaatacaaaaattagctgggcgtggtggcgcgtgcctgcagtcccagctactcaggaggctgaggcac

SEQ ID NO: 37224 - DNA, 735 bp, Artificial sequence
  DNA replication origin
agagcttgggcaccttgggccccatccttaggggcctctacctccaggtaggagcctggggacctccaagtctcctggggtgacttgggattcaggtctgatggctcccatggaggtgaatagggtgggtggtctttggcagtgggtagggctgaggccttgacttgttctctttcccattcttagggctgacaaagaagagaaccaaagtccagaagaagtcactgcttctcaagaaaccccttcgggttgacctcatcctcgagaacacatccaaagtccctgcccccaaagagtgagtgtcccagcatccctgggcccttctttcccaccagactctggtcctaaagggtttccggggctgggggctggtaggtgagggtcatttgaagggtagggcaggctcaggtttgggcttcggagtgcagattagagggagggagtctgggtgccctggtgctgggccgaggcaggtgaggaggggcctggacccagctgggggcttcggggttggagaggaggggctgagtgggaggcgtgttcaggaggcacatcaggtgggtcttggggcatgagcgggtgagagggtggacagctggccttcccctgagatggggatgtggaggagtgggatttcgggtgatgctgaggttggttttgacgtggtggtgtgaggtgcctggggtatgtccaggacggggctgttgcttcgttgagtctggggctcagagggga

SEQ ID NO: 37225 - DNA, 1552 bp, Artificial sequence
  DNA replication origin
aatgccccttgagctcttcccacacccaaccactggcaaggcctggagcatctgccccatggctgtgtcctgggtcacccgcagccccaacgcacggccttaccctgcctcggccttttctccacagcggccagcacgcctgcacaccaagccgtcccaggcacccgccgtggaggtggcgcctgccggagcttcctacaatccatcctttgaagaccaccaggtacactgccccgtccaggcctccctcctcagtgggctctgcctcttggtcaggccttcactagcttcctccctgtgctgggaactccaatgacccagacagccctgggcctgtccgcaacggggctcacggtccagtgcaagagacctgttcccagacagtgatgggcagagtggttggggctgggagcccagacggggcacctggcccagcctggggggtcaggaagggctcccgggaggaggggtcgcctgagccgaggcagaggctgagggaggggtttgcagtgggaggaggggagtgggttttccaggtggtgggaacagcactgcaaaggcacagagttgagagagaccgtggcgccttccaggaagcctgtggggcagagatgaaaaaggctgtggtgacacggtggcacactggcagccaagtgacagttatatatgggcgaggctagctcagcgatgggaaagtctagctggagccactgtgcatttagcgggcatctgttgagcacagatgctgtggacaaaggggacaaaaacccctcccttggccgggtgcggtgcctcacacctgtaatcccagcactttgggaggctgaggcgggcagatcattggaggtcaggagttggagaccagcctgaccaacatggtgaaaccctgtctctactaaatacagaaaattagcagggcatggcagcacgcatctgtggtcccaactgcttgggaggctgaggtgggaggattgcttgagcccaggaggtccaggctgcagtgagctatgatcgcaccacggcactgcagcctgtgtaacagagcgagactcaaaaaacaagcacaaccctccctcaaggaacagcccttctcatggggtcacgtgactggagagatgctgagatgtttgcggtagatgcaggaccgcttgtccgaatcgttttcagcattcataagaaggagatagctagccaggaacagaggcagcttcctcatctggtagagaaaagtgtctgcggaaaaaagcaacagtgtgctcatggttgaaagcgtgagggtgccgctcactgccatctgttcctggaccagatgtgggagggggcgtggagatcagacattcacttttagatttgtacagaactacttcgtagagataaaattcacttaaccatacggtcagcctagttagagtatgtgattcagtggcttttagtgaccattgtgtaaccatccccgcagtcaattttagaacattttcactgtccgtaaaggaaacctcacacatgtcagccatcacccccgcaattccctgtctcgtgtggtcttgggctg

SEQ ID NO: 37226 - DNA, 1139 bp, Artificial sequence
  DNA replication origin
acaccattgcactccagtctgggcaacaagacagaaactctatctcaaaaaaaaaatgtgaagcgtgcaggtcagactgccttcacagacgtgcagagcaggtgtgagggcgagggtttgaggtgccctctggctctgtgcagggtgggtgtgctggtagacggggtgtggggaggaaagcctgggccggggcgggatccacgggcactggatgagggacagatgggaggtaagagggtctagtctcagtgtcccaggaggggttcagggacccatcctcactcccgcccctcagaccctgctctcagcggcccacgaggtggagttgcagcggcagaaggaggcggagaagctggagcggcagctggccctgcccgccacggagcaggccgccacccaggtgagccccgcacctgcccactccctcccctccccgggcctcctacccacccctgacactgcaccccgcctccccaggagtccacattccaggagctgtgcgaggggctgctggaggagtcggatggtgagggggagccaggccagggcgaggggccggaggctggggatgccgaggtctgtcccacgcccgcccgcctggccaccacagagaagaagacggagcagcagcggcggcgggagaaggctgtgcacaggctggtgagcgcctgggccagcggggcctgcctctgatgcctcgcccccttccttccttcctcccaccatgggctgccctgggtgctgcgggcagcctgcacaccccaagccccgcatgtggcctgtggtttgggctgtttgggatcctcacagctgagactcatttcccagcctcttccaggcagggctcgggctggggtgggacagggtccctggcgcttctgtttgaggggcggggtggggggaggtttctgcaccgcagaccaggggagatggatgacaaaaggggcttcagcaaacagctgctgggaaggcactggaggggccgctgatgtgacggggttaggaagggcctccggggacaggcaggtttgtgcagggaaggctccctgtgtagagagaaggtctccctgtgtgggcagcaccggcctgagccctgaccctcccccgtctccacagcgggtacagcaggccgcgttgcg

SEQ ID NO: 37227 - DNA, 2757 bp, Artificial sequence
  DNA replication origin
gggcagcctgcacaccccaagccccgcatgtggcctgtggtttgggctgtttgggatcctcacagctgagactcatttcccagcctcttccaggcagggctcgggctggggtgggacagggtccctggcgcttctgtttgaggggcggggtggggggaggtttctgcaccgcagaccaggggagatggatgacaaaaggggcttcagcaaacagctgctgggaaggcactggaggggccgctgatgtgacggggttaggaagggcctccggggacaggcaggtttgtgcagggaaggctccctgtgtagagagaaggtctccctgtgtgggcagcaccggcctgagccctgaccctcccccgtctccacagcgggtacagcaggccgcgttgcgggccgcccggctccggcaccaggagctgttccggctgcgcgggatcaaggcccaggtggccctgaggctggcggagctggcgcggcggcagaggcggcggcaggcgcggcgggaggctgaggctgacaagccccgaaggctggggcggctcaagtgagaaccaggccgggggttctgggagaggctggggagggggccgggtcccaggtcctgacaccttcctgcctttgttcaggaactgcccaccccccccatcgggagaccacctcttcccccacaaaaccccacattctcagaggccccttcttctccaggagggggctttggactgggtgtcctgggccccgcgggggtgatatttctgaacacccgccctgttctgcaggtaccaggcacctgacatcgacgtgcagctgagctcggagctgacagactcgctcaggaccctgaaggtgctcactgtgtcctgccgtggagccccgtgcccagtgatgacaccatccttgctccccgtgccccccaggggctatgggcgacaccatggctgcccctgggctgggccagtggggccaatgcccaggggctgagggcacgggatgctgggatgagatcccagggtgaggggccaggctaaggtttgagtccgggaccctaagaaggcctttccttccagctggtccctgttgcagtcccggtcacctttaggactagagggaccttcctgaagctcagaaccaaccctgtccctcccctgctcggaacctgctgtggctccccagtgcccctgaggaagcccagctcctctgtcagccacacgcctgggccgacccggccgtggggctccagccagttgtgctcatgagcggactgtgccttctccctctgatccagcctttgccctcgctgtccccttttctgtgtcgtcaccagcccacttcccgtgactcctctaagcccagcttagagatggccataggttggtggctgtcatcccaacactgagccccagcagctgagggccaggctgagtccctggtgcccacaggctgccctggggggagactgcatggggctgagccctgccaggaccccgaggagaggtccaggcccttgggcttctgccaggccctgctgaggcctccctctctgtcctgtagcccgagggcaacatccttcgagaccggttcaagagcttccagaggaggaatatgatcgagcctcgagagagagccaagtaaggggcggccggggctgctgtggggcgagggcatctgggattggccccgggcactgattgctccattgtccctgctccaggttcaaacgcaagtacaaggtgaagctggtggagaagcgggcgttccgtgagatccagtgagtccacccggcttcggcgcaaggaagggagcccttctcccaccccgtggtgcccaccgagtcccagggccccttccagagtgtggctagtggctgagccacacccccttggccatgcccagaagaggccctgaaaccagagcggggttgggagggtccccaaagggaaactgaaaggcagggggtgtcaggtcggcagggggtatggggcaccctctcacccaccctcagctcctttcctctgtccccaggttgtagctgccatcagatgccggagactcgcccttcaataaaaaatctcttctagctgatcagtgggctccacgtgtggcttgtgtgcctcctgcgggcggctgctcccgggtgcagactctgcgtgtccccccgtggcgcacaagcatgtaggtgccagaactcaccgccagagcctggtgagggcctagggtgtgtctgaaggggtcatcagccgactggatcgtggtctgtccaatagctgtgaagctggcagcccttccaagcctgggcagatcctaaaaagacagcaggcagagggcgcagggcttatggcctggccggagttgggaggtgaagcagagggcacagggcttatggcctggccggaggtgggaggtgaagcagagggcgcggggcttatggcctgtctggaggtgggaggtgaagcagaggtgaggaggaggttcccccactggattccgacttggagaatagcccagttccttctgctgcgggtgacgtagcagctcttgccacactgatagaaggagtggtggcagctgacctctgccgatagaacacctgctatcgggtttaagcaggtggattcactcactgaactcacagcggcctaaccaatgagggctgtacttattcccattttaaaggtgaggaaatagggctgggcacagtggttcactcctgtaatcccatcactttgggaggctgaggcgggcagatcacttgagccc

SEQ ID NO: 37228 - DNA, 2031 bp, Artificial sequence
  DNA replication origin
agacaaggtctcagtctgtactccaggctggagtacagtgatacgatctcagctcactgcaacatccacctcctaggttcaagtgattctcctgctttagcctcccaagtagctgggactacaggcacctgccagcatgcccggctaatttttgtattattattatttttttagtgaagatggggtttcaccatgttggccaggctggtctcaaactcttaacttcaagtgatccacctgttttggcctcccaaagtgttgggattacaggcatgagccaccgtgcctggcccattttaatttttattaataacttcattgtgttttacaacattatcagtctgccactgatggaaatgaaaaataaaacaagacaaaactggtccaaaacaataggtaatttgaaaagcagtgaaatagacaacattaaaatcaagaaatactaatgaaacaaaatgcaaataggaaaggtgtctgcagaactttaattgccaagagaatataagaatacattcaaataaatgaaggaaaaggggtaaacaaatacacattatgaagatatctaaggttcaattaacatgtgagggtttaacttctcaatcatcagggaaatggatattacaaccacaacaaaaccacaagtcattggatcgacaaacattaaaaagtctcacaatcctaagtgttggggaagatgctgaccatcagaagccctgggaaaagccctttagaaagctctcgagcagcatccactaatgccagatatcccagtgagcagcgactccaatcccagcagagaaacgctcaggctcaattcaaatgacaggcaggcacattcacagcagagccacctgtgatagctgcacagtgaagacagcaaatgtccacctgcagcagggtgggtaaagggtgatgcattcactgcagaaagtcaccagcagtgtagatcagccactccaggccctctgggatctgaagaactttgcaggcacaggccccctataaatccagtaataacctggggcctgagtgattttcattcacagagccaccctcctcttggggctgagaccctgagtgttttttgcccatagagtcatccccttcttggtactgagaggtcatggtggagactgaggatccctccaaggggtctaggggtaggagcagctctgtgaagtgagggaataactgggtgtctggcaagaagtcggaggcatcggggctctgaggccataagggggctggggctgggagtgatcctgggcctgggattggagctgggactgagcctgagcctgggcctgagcctgggcctaaaatcggggctaggcctggaagtgagccagggcttcgcatccggccaggacttaagatgggacctgggccttggagtctgcctgggcctgggatctgggctgggctgggaatcgggcctataattgggcctgggcctgagattgggcctgggattgggcctgggatcaggcctgggttcgggcctgagattgggcctgggatcgggcctgggttcgggcctgagattgggcctgggattgggcctgggatcgggcctgggtttgggcctgagattgggcctgagattgggcctgggatcgggcctgggatcgggactgagattgggcctgggatcgggcctgagattgggcctgggatcgggcctgggtttgggcctgggatcgggcctgggtttgggcctgagaatgggcctgagattgggcctgggatcggggctgggcctgaaattgggcctgggattgggccacggaatgggcctgggatctggactgggcctgaaattgggcctgggattggggctgggatcgggcttgggatctgagctgggcctggaattgggcctggaattgagccagggagtgggcctgggatctgggctgggcctgggattggggcagggatcgggccagggcctggactcagggcagctgggatgcccttctgggctctgcacccagggccaccccaggcctggtggaggctgcagatcgt

SEQ ID NO: 37229 - DNA, 861 bp, Artificial sequence
  DNA replication origin
gcagatcgtgggttccgccgctggaaggattcccgaggggccccgctgaggtgcggaggcagaggctgcagggactaggggcgcagcgcgggctcctcggcctctctgcccagggacgcgctggggctgctgctggagccgccgctcccgagctagtttggcgcggcgattcttgaaccacacctggggggcagaggggacagggagaaggtgtgaaggaggggctcgcgcggcccagtgagccttttggggtcggggccagcctgaagcctctccctgtgctcaacagccccccatcccccaccccaccaaaagagggccccggctccaaggcctggagaatggagggaagagggagggaaaagtagggggaggagggtggggtgggatgggaggagcggggtctgccgcccaggtgcccggggggccagggagggttcgaggggagggaccgcgggttctcacgggtgcctgaggtccgggcaccgggagaccccgtgggggacagcctgggccgatcatgtgggcgagtttgggctagcatagagttggaacaggactcaggatgcagccctggtctacactggcgggaccccttgcgtggcagggcgggaggtggtcgggcgggccaggccccggtgagtgacagcggtggggaggctccttggggtgactggggcgggcagggtgggggtgggggtcagacctgcagctgttgctccctgaggctgagcatctccgccagattcagtcgctggtcgtagttcgggtactggtccttctgaaagtaaaattctagcactttctgctggctttcagtgtagaccgtgcgctcctgccgctgtctccttggagggtcca

SEQ ID NO: 37230 - DNA, 1340 bp, Artificial sequence
  DNA replication origin
ctagggagcaatttttggaatggatagtaggggccagagtggccttgaggtaccaaagaggaggttgcaaggtcatccaggaaggagggatagtggctggacaaggcaggcagcccaggagccaggaggagtgggtagactcaccggcattggtcactcggggccccagccctgggaaggaacaaggatgactcctgggggctggctggcggtgcctctcctgagatggggaccccaaccacaggtcacgatgttgactcccccaaccaaacccgcatggaatgccacctcacctgggctagggcccatgagggtgaaaccaaggctgtgttgtccactgaggttctccagctcctagcacagctcagcaggcagtacctgatcagtgatgaaggattaatccatcattcaactcctccagggggcgggactgcagggcagggtgggaaagggagggtcccggcagggtgggccagggtgggcacagcagagaagtgatttaagagccaagcccttgtcagtacacacttgtgtttgggaacagatcaggactcaggatgcaagaccctggtcatctccaaggtgagcggggacagaggtgtgaggggtctgggctgatcctgtggctgaggctgcagagtgcaaatctgggcagccagagaagggctgggcctgtgcgggcggcttcctgtcctgcagacgggggagaacttagtggtgtctgggaaatgaaaaatcatgcagctgggtgtagcgtctcacgcctgtgatcccagctctttgggaagccaaggtgggaggatcacttgagcccgggactctgaaaccagccgagccaacatagtggagacccgtctttagcaaaaatacaaaaattacccaggggtcgtggtgcacacctgtggtcccagctactcgggagactaaggcggggggttccttgagcccaggaagtggaggctgacttgagccgtgatcacatcactgcactccagcctgggtgacagagcgagatcccctccaagaaaaagaaagaaggaaagaaattaaaccatgcagttgagtggagcagaggactgggcaggtggcggctcccctgcaagtgtcagggtccctataacccttggatgggaggggacggggcagctggggagggttgagcaggcctgaggcagccccgtctgctccgaggtgaggcgcctacgctgcctgccttcccaggagctgttatcgcgcctatttcctagatgtggaccctgaggcccagagaggtgcaaggtctggtctggataccaggctgctatccgcggtgccgccccagcccacactgcctgggctcc

SEQ ID NO: 37231 - DNA, 1166 bp, Artificial sequence
  DNA replication origin
taggcgccatagctctggcctgatagggaggtgggggactgggccagggaaggtcccacggaggggccagagagggggctaagagccgggccccctagctggggcaccatgggagaaaggtaggggtctaggccgctgaaataggagctcggagacccataggcggagggggaagagcagaaagcggaggccggggcgtaggtcatggcatagggggcggaggtcagagacggccctgaggccaccagcccagcccgctgcgcctcaggcaaaggggactctgaggctgggctccagatggacacagtggccactgccgtggttggggagcctgaggggccgggcagagggggactgtaggaatctgagatgcccagagggtctggacacacatctgtggagggtcttggggacgtgcccgccttcctcttggcaggccgggccttggcctggccccctgggggctgctgctgctgtttctgctgctgtcgctgctgcctgcatttagccctccggttcttgaaccaaacctgggggataagagcggagatgggggtgggtaagtggggaagaggcccaggagagccgcagggtgcccggggatgaggacacttattggtgagaggtgctgggttcacatctgtctactttgcatccagctgtggggcgtctattcacccatccatccatctatccatccaatcatacctgcatgtgtgcatgaacacatgcatacatcatacccatgtgcattcatcccatccgtctaatgcaaacatgcacacgtacaattatacatgcatacaccatacgcacatacatcatgcctgcatttacccatcgatatgatcatacatacatcatacacatattcatccacccatctaatacaaacatgcacacgtacagttatacatatatacaccatacgcacatatatcatgcatacatttacccatctatatgatcatacgtacatcatacacattttcatccatccatctaatacaaacatgcacacatacaattatacatacatacaccatacacacatacatcatgcctgcatttacccatctatatgatcatacatacatcatacacatattcatccacccatctaatacaaacatgcacacatacaattatacatacatacaccatac

SEQ ID NO: 37232 - DNA, 1309 bp, Artificial sequence
  DNA replication origin
gagcaggaaacttcaagaatgactagtaggggccagagtggcctcaaaggaccaaagaggaggctgtggggtcatccaggagagagggatggtgactggacaaggcgggcagcccgggagccgggaggagtgggtagactcgctggcattgatcatgtggggccccagccctgggaaggaataaggatgactcctgggggctggctggcggtgcctctcctgagatggggaccccaaccacaggtcatgatgttgactcccccgatcccatgtggaataccacctcgcctgggctagggcccatgagggtgaaaccaaggctgtgttgtccactgaggttccccagctcctagcacagctcagcaggcagtacctgatcagtgatgagggattaatccaccattcaactcctccagggggcgggactgcagggcagggtgggaaacggagggtcctggcagggtgggccagggtgggcacagcagagaagtgatttaagagccaagcccttgtcagtacacacttgtgtttgggaacagatcaggactcaggatgcaagaccctggtcatctccaaggtgagcagggacagaggtgtgaggggcctgggctgatcctgtggctgaggctgcagagtgcaaatctgggcagccagagaagggctgggcctgtgcgggcggcttcctgtcctgcagacgggggagaacttagtggtgtctgggaaatgaaaaatcatgcagctgggcgcagagtctcacgcctgtgatcccagctctttgggaagccaaggtgggaggatcacttgagcccgggactctgaaaccagccgagccaacatagtggagacccgtctttagcaaaaatacaaaaattacccaggggtcgtggtgcacacctgtggtcccagctactcgggagactaaggcggggggttccttgagcccaggaagtggaggctgacttgagccgtgatcacatcactgcactccagcctgggtgacagagcgagatcccctccaagaaaaagaaagaaggaaagaaattaaaccatgcagttgagtggagcagaggactgggcaggtggcggctcccctgcaagtgtcagggtccctataacccttggatgggaggggacggggcagctggggagggctgagcaggcctgaggcagccccgtctgctccgaggtgaggcgcctacgctgcctgccttcccaggagctgttatcgcgcccatttcctagatgtggaccctgaggcccagagaggtgcaaggtctggtctggataccaggctgctatccgcggtgcc

SEQ ID NO: 37233 - DNA, 867 bp, Artificial sequence
  DNA replication origin
cggctgaggggagatccaggaacccctgccctgcgggaactcaggacccccagggaaggaggcagcggctacagggactaggggcgcagcgcgggctcctcggcctctctgcccagggacgcgctggggctgctgctggagccgccgctcccgagctagtttggcgcggcgattcttgaaccacacctggggggcagaggggacagggagaaggtgtgaaggagggactcgcgcggcccgggtgagccgctcgggggcggcgccggcctcaaaactctcccggtgttcacccccaccccgcacccaccatatgagggcccccggctcccaggcctggagaagggagggaagagggaggggaaagtagggggaggagggtggggtgggaggggaggagccgggtctgccgcccaggtgcccggggggccagggagggttccaggggagggaccgcgggttctcacgggtgcctgaggtccgggcaccgggagaccccgtgggggacagcctgggccgatcatgtgggcgagtttgggctagcatagagttggaacaggactcaggatgcagcccgggtctacactggcgggaccccttgcgtggcagggcgggaggtggtcgggcgggccaggccccggtgagtgacagcggtggggaggctccttggggtgactggggcgggcggggtgggggtgggggtcagacctgcagctgttgctccctgaggctgagcatctccgccagattcagtcgctggtcgtagttcgggtactggtccttctgaaagtaaaattctagcactttctgctggctttcagtgtagaccgtgcgctcctgccgctgtctccttggagggtccagggccag

SEQ ID NO: 37234 - DNA, 1110 bp, Artificial sequence
  DNA replication origin
tacgattgcaccattgtactccagcctggctgacatagtgagaccctgtctcgaaaaaaagaaaaaaaaagaaaaaaaagaaaagaaaatggaggattagagcagacggcatcatttattcaatgttccaacaagcatgtgaagggtcactccaacactggcctctgggcagtgagatggagagctcagcacccctggcctcagggagttttcctgggtgagtcgggaatgtgtgagagtgagcaggatgcaagcatggacttcaggaagtgggcgtacacggtgactaagagcatggcatttgctcttcctctgttcatctctttccttctgtctttcctgaatgatttagagggaaaaagcaaggtgggggtgtcagggagggtgtgaagttatggtggtgtcaaagcccaaaggggttttgcgactccacactaggtagggttaggggaggagggggctgggggccatctggcgtggagagccagcattccagtggggtagtggggtgaggagaagtccacatagaggggcagcatgacccagggtgttggggctggagatggtggggataaatccacagatgggcagcttggtgtgcagtgttggaacatgagctgagtggggcgggggcatttatatgcaggcattgtctggggtggaggtttgcactgtaaggcaattaggaaggaggccacatagaggggatctggcatgggttgtcataacccaagcagagagagaaatgtccactcatgggaatagcatggtgtatggtgttgaagccagactaggctgggaaagacatccccacaggggtgaaatggcaaaggaaaagggaaattggctacacacagtgagtaaggggaatgggggccaggtctcctactgttggaaaagggagttactaagacagaaaggaggaaagtcgaatgagccctgtggtgttggactataactggaggcgttggtatgtcctcatggatctcaattatacatagagagataaaaataaacacatagtttcagtgtgtataggaacatttgtacacatattctctagctctctccactaagagaacatagaaacaatgatggcccatatgaatg

SEQ ID NO: 37235 - DNA, 973 bp, Artificial sequence
  DNA replication origin
caggcatcacgagtgccggtcacggggtgactgagagcagaggtggtgatctagacaaggctggtgcttgacacaaggatggtgacaaagatcaggaaggtggcaaacagtgaagggtcagtgaccccaggagaggtatagaaagacgctggcagcggccaggcacagtggctcacgcctgtaatcccagcacttgggagcctgaagcaggcagatcacttgaggtcaggagtttgagaccagcctggccaacatggtgaaaccctgtctctactaaaaatacaaaaattagcctgtaatcccagctacttgggaaactgaggcacaagaatcatttgaacccaggagttggaggctgcagtgagctgagatcacgccactgcgttccagcctgggcaacagagtgagactgtcttaaaaaaaagaaagacgctgacagcaagggagggcagccggcaacatgaggtttctgagtgccagacagggctgtgcatgcagaaaggccttaagggacccagagaggagcaggtgactgacacatggtgaagggtcttgacagtcatggagaggacatccgtggagcggccacgagggctccagagagagccatgtggagggacctaggccagcagctgacccagggctggtgactccaagatcatgactgccccagagaggatgtcagaggcaggagggccgatggcagttccacagatggcctcagagcacctgctctgggccagggccccccactgggtgctgagcagagagtggtgaacaggcccgggcagcaagctcaactctgcctgcacgtggggctctatcagctgctgacctcaggcctaccccacaccagctacatcaaaatctttgtaggtggaacctagccttgaaaacctttgtctatttttattttgtttgagacggagtctcgccctgtcatccaggctggagtgcagcagcacaatctcag

SEQ ID NO: 37236 - DNA, 981 bp, Artificial sequence
  DNA replication origin
tcacatggggctgtgtgatatctggggtcccttccaggctctgaagattcttctggtttttgaggagagggtctacatacatcaaggtcgaggagatcagagaagggaggaggcaagattggggaggtgcagacaagcccccttccctggcctgctctctccccaggtccctgagcggacggctgcgccttgggctggcagagcagtcggtgctggctgccctctcccaggcagtgagcctcacgcccccgggccaaggtgagctcctgtggcccgtctctgcatccctcgctggagttacctcaggcttcccccctcctcttcagaggcccatgcccgccccttccccagcgggcccctgccataccaggctcctctctcctgggtgggggggagggggcgtcttgggccgcggcatctgcattccttgccatacagcaaaccacccactgcaccctggtgtagccaaggatgtgggtgccttccaaagcctctggtgggtcttttcttagaattcccaccagccatggtggatgctgggaagggcaagacagcagaggccagaaagacgtggctggaggagcaaggcatgatcctgaagcagacgttctggtgagagctgggcagtgggtggagttgccaggggctgtgggcagagtgccagggtgggggtggagccagaggagcagtgggtggggccagtgaagtgacggacaggcatcacgagtgccggtcacggggtgactgagagcagaggtggtgatctagacaaggctggtgcttgacacaaggatggtgacaaagatcaggaaggtggcaaacagtgaagggtcagtgaccccaggagaggtatagaaagacgctggcagcggccaggcacagtggctcacgcctgtaatcccagcacttgggagcctgaagcaggcagatcacttgaggtcaggagtttgagaccagcctggccaacatggtgaaaccctg

SEQ ID NO: 37237 - DNA, 882 bp, Artificial sequence
  DNA replication origin
cagcctgaaggggcccagccgccagtgctgggtggaaaggctggtgatgcggatggcccgcctgccaagggcctggagtgctcggtgcttatcatgaggacactggggagccatggaaggattgtgagcaggcaaggggcagcatccagggggaagaggagctggaccccagctgtagagaagagagaagagggcaggagagatctggcagacagtggatgtcagggtgaggaggcaggaggaatgcctccaggatctccctgggtgactggatggatgacaaagccgtcggcagcttgggaccctggtgaggggcaggcacctgcagggggcattaatcaccccagcgtggggcaggcatgagcaacctctatctgtgggcccccagggccatccaggaagtttggaaacgggtctgaggctcaccaggtctggctcagagcccagggttcgggctggtcagtgtaggagggatgaccacccactggtgggttctcatccgcctggggagaggatgtgctgggagcactggagctggcttagggccatgggcaccaacatttagggaaggcaggggtttcaggctttcatgagaggacagagggactgagaaaggttgacttggatcaggaaagagttacgggcttatgggagccagaggagatgagactcaagattttctcactcattcactcaagatgtgtttcgggagcactgacgtcataccagacccagcacacacggggtcggttaagaatactctgagctgcaggtaacagaaaacccaactacattggcttggacaaagaaggatctgtttttctcacaaaagaagttgcagatgctggctttcctgcccaacaatccatggcagctggggcc

SEQ ID NO: 37238 - DNA, 1213 bp, Artificial sequence
  DNA replication origin
agaagcaagatggaatcggttaggtgtgatttctttccactgtcataatttcctcagttacggttttgcaaaggcggtttcacctccagcaatctgtgattgtcctcatggctccaggccccagagcctgggactgttctgagccctttcctcttctttctccatttctttctagtgtccacccccttaaacccaccccaccccgacaccacactttgaccttgaggaaccacgtgttcatacccccgtcccctcctccaggctccggatggtggagacgctgagcaacttgctgcgctccgtggtggccctgtcgcctccagacctcctccctgtcctctacctcagcctcaaccaccttgggccaccccagcagggcctggagcttggcgtgggtgatggtgtccttctcaaggcagtggcccaggccacaggtaagggggactgtggttggagggaccagaaggacaggagctcagccagagaaaatgcagaggtcaggtggatcggagagatggtggagagaggctgtgaaacagggttgaggagaaggctgagagggaggagagcctgatggggacagatttgcaggggtgtgggagagaacacaggggcagcagttcaggtgagggaggaccaggcatgtgctgggacagggggtgtggggtgcagggaaggggagggctggggaaagatgctggaggcagagacagcaggatttgggggctgagatggaaggttggggcttagagaggtctgaaaggactttgactggagggattggaaggagtgggaggaaagaacatggtgtgtggggggccagcagcctgaaggggcccagccgccagtgctgggtggaaaggctggtgatgcggatggcccgcctgccaagggcctggagtgctcggtgcttatcatgaggacactggggagccatggaaggattgtgagcaggcaaggggcagcatccagggggaagaggagctggaccccagctgtagagaagagagaagagggcaggagagatctggcagacagtggatgtcagggtgaggaggcaggaggaatgcctccaggatctccctgggtgactggatggatgacaaagccgtcggcagcttgggaccctggtgaggggcaggcacctgcagggggcattaatcaccccagcgtggggcaggcatgagcaacctctatctgtgggcccccaggg

SEQ ID NO: 37239 - DNA, 1276 bp, Artificial sequence
  DNA replication origin
cggcgcgcgggaccaacgcaaggcaagtggggccgtccgcaagcagatgggaggcggagggcggcgggtgcgccgaatgcttggggcctatgcttcgccatgtcggggtgtctgcagaggagtgggcgtggggacgctgaggctgccgagagcgcggtggagacggaagagcgcgggctgcgggccgccggagagtgcagagaggtgtctcccagagggaggggggccaggtagagggtagacgagagacagagacagttggacaggtcctctgagaagaggccttgaggtgcgagttcacctggaaaggggagaggccaaatggaactgaggggcggggccgggggggggaaaactgtgtgggcggggccagctggaaatcggaaggccccccgagggggcggggctatctgggagggggaggggctgaagggagctaaggggcggggccggggaaaagattgcgtgtgggcggggccacctggaagggggaggtgccaagggtggggctggctgggaaccggaagtgctgagggggcgggggccacctggaagtgctgagggggcggggctagaagaaggtaaatcgcgggcagcagcatcacctggaaggagtgggccctactggagggagatgggtggtgtcagggagaggtcagtggtaaggtccaggtctaggtaaagggctcgtaaaagatggagaatcatctgaatggggagacgtctggcctaatgtatgcttgataaagggatggagcttacctcttgtttttactttttattttgaaataattatagattcaaggaagttgtgaaaagagtatatccatcttcccctaatggtgacatcttatgtagtcccaatatcgaaaccaggaaattgacatcaatacagttctgttaactagattacagaccttgttcagttttcaccagtttgtgtggtgtgagtgtgattgtgcatctgtgtgcccgtgcagcttgattccttgtatagatttgtgtaacccccatcgtaattgtgatatagaacagttccctctccacataagaactcctccccaggcccctggcaaccgctaatgtgttcaccatctctagttttgtcattcggagattgttatgtaaatggaatcatatattattaggatgttaccttttttctactctgcacaatgccctggaggtccacccaagttgttgcttgtatcagtgcttcgtttctttttattactgagtactgtttcatccttacttgatatttttcctgtcatta

SEQ ID NO: 37240 - DNA, 1560 bp, Artificial sequence
  DNA replication origin
tgcggacggccccacttgccttgcgttggtcccgcgcgccgctgcccgggcaacacactcagatccgccaggcgcgcctctgcagtcccaagttcgcgccacggcattcgcgcgcagacgtctgcgggcgggggcggggcagagcctaggggcgggacctgggcaccgtccgcaccgccgccgtcgcgcggaggacactgggagtcgtagtctcccgaatgggaggagggcgggaaaaggggtgaagtggggcgagccctcccgcagagcacactgggaaaatgcccgcgctttccctcgccctggatgagcgggtgtggctgagggtctgaggagtgactggcagggaaagaggaggaatcggtggaagcgcccccgcgaggcacggcgggaagagaggcgggagaccgcgcggggcatcccgggagcaagggccgggccaggcctgggcgcggggcattgtgggaggtggacgccgctccggggcgggtaggtgagtggggaggggcgggaagggtgcacatcttggggaggggagaggcacagctaggtgggacggcggggctggaaggtgccgcagcgggcggggagggggggagtaggagggtcgggagcgggctggatggggctgctcgaggggagacgcgcagctggacgtggggggagcatctggggtgaaggagcccatccgaggacgaggggccatgtctagaacgaagatgcatattgcgggggatggtggatgtaactgggaggaggggcccacagctggactgggggccgcatctgaggaggaggggaccacaggtgaatactggtgacacttccgaggagaactagccacaagtggggcacacacctgtaggcgaagcgtggataactgcatgtggggagtacatctggagatgagagtgtctcagggaagccccagctacagctgcatgtggcgagccatagggtcataatcgggggaaggggcaacagctgcacgccagaggcacatctggggagtgcggagccacaggtgcatgaagcatgtgaccgggtgaggggtccgtggcctggatgtgggagcacatctggagatggagcgtctttggaggggttacagccaactgttggcacatggaaggaggagttccagatgaatacgagagttagaagttactcttgggtgagagacacagctggaaggggaggaggttttagctggaatttgagaacacatttgaggagatgtccttaagggacatctgagcttaagggtcgtattttgggaggagagattccaactgtacctaagggtcacatctgcggaggaggagacgagttggaattaggaatcaagatgacaggctccaagtgaaccagggataaggcggtgggaggaggccaaagataggatggaggttgatatttatatatttggagaaaaacaggcacgtccgaccccgggctacccacctcgatagaggcaccagcaaccgacggggcaggccaagaatggagtagatgagataccccgggtgggaatgggtctgatatccacctgttctcccc

SEQ ID NO: 37241 - DNA, 1003 bp, Artificial sequence
  DNA replication origin
ggttgatatttatatatttggagaaaaacaggcacgtccgaccccgggctacccacctcgatagaggcaccagcaaccgacggggcaggccaagaatggagtagatgagataccccgggtgggaatgggtctgatatccacctgttctcccctcctccacgcaggcccccaggatggagcggccggagcccccacccggcacggctgcggggcaggaggagcaggagctgcgggagcgggccttcttctcgtgggccgagttcagccgcttcttcgacgcgtggtgccagcagcggctggcgctcttcttcgtcaagagctccatgcacctggcgcgctgccgctgggccagtgcgcccccgctctacacgctcatcgacgtgctcaagtacagctacgtgcggcttgtgtgcaaggacgtgcgtgcgcccagccggcccgccgtggggtgcgtgaacctgagccgctgtcctgctggggggaaggggagcaccgggggtgggtgtgggtgggagacgggcagagaacaccccacccagagatgcagagggggagaggccaactgaggcagccaaatacaccttgcagagaggcgggagtcaaggagggacatgtactgagagaagaagaggagctagagagacaaagatactcacggagcaagagatggtgtgggcccgacttacagacttttttttttttttcgagatggagtctcgctctgtcgcccaggcttgagtgcagtggtgccatctgcagcctccacctcctaggttcaagtgattctcccgcctcagcctcccgagtagctaggactacaggcacctgccatcatgcccggctaatttttgtgtggttttttgtttttgtttttgttttgttttgctttgtgttgtttttttgagacagagtcttgctctgtcactcaggctggagtgcaatggcacaatctcggctcactgcaacctccacctcccgagttcaagcgttgtttctcctgcct

SEQ ID NO: 37242 - DNA, 1690 bp, Artificial sequence
  DNA replication origin
ccagcaatgacatgtgacaacaatgatgtattgctagccagggacacttacttgggccttggtgtccagggttgttattggggtcagccatgtagacttgtgctgaatactgctgagagatcgagacagacggtaagaacggctgagagctgatgcacgccaggtgtccttccatgcgttggccaggagtgatctcattttagcccatccatgaccctgttaaatagacatctccatttttccagacaaggaaccaaggctcattgaggagaggtcacttgcctgaagtcccacggctaataggcaaatccaggagtctgatccttaaacctccacccttacagatgtggccttggacatggctgcacaccctcgcgtgagttcactcactcaggatgtattgagccattgttccagggcaggtagcattcaaagcatcaggggtgctgttatagccaaggctacagtttattacagcagaaggacacggaataaaatcagcaaagggaagagccacatagggcagaggccaggagagaccatcccgaaggggaacatccctgtgcttgtggggcttccatcttaaggagggcaagcaggcaatgggcagatcaggaaacgaagatatgacttgccaaagggtggtaagtgccatggccaaaaggaggcagagagagatggggtgtctgcttagttgggaagtcacagaagagcgggacgtgatgtttgaacagagacgataattataatggccactttcagaacacttactatttgttggataagtaataacagtaatatatgtaccaggcaatgttctaaatgcttgaatgcatctcatctttccaatcacagagatgctcttattatcatcactttacaaatgaaagggaggttagggaagttggcagaaggcacacagccaggaagcaggggctccaggatctcagcccagggatcttggcctcagaggctatgcttttcaccactgtcctgcctctcagtgcatggagaaatgaatgttcagtgcctagaagggataatcagggaatatggaggttaaggaggcaactgaggcacagagaggttaaatcgcagggttcagaagtgttgggggtgggactcaaagctaaatgatctgcctccacaatctaagctcattaccaccagaccagtcatccttaagcatgcataggagtcccctggagggcttgtcaaactagattgctggggcccgcccccagagtttcagactcagtgggtctgaggtggccccgagaaggtgcatttctgtccaggtcccaagaaccgatggtgatgctgctggtccagggcccacattttgagacccactgccctagactgcctctcagcacacggaggaatgaatagccagcttccggcggaggaaactgaggctcagagaagctaaaagtgtcatgtggaaaaaatcacatagccgttagactgtggtacctggatctcaaacccaggcaatccggctccagagtgtttttaaccatttccctgcactgcctcctgccggtcaaaagaataaatgcatatgcaggcaagaatgaatgggtggtcccatttccgtagaaggggaaaccgaggtcggggagctgggcggggagaccccagcatcctctgacctctttccttgcctccctgcccccgcccgcaggtg

SEQ ID NO: 37243 - DNA, 1912 bp, Artificial sequence
  DNA replication origin
gcgctgcctcaccgccgggcccgaggtggcggcgcagttgcctgcagtgcgccagctgctgccctgcgcgcgcgtgcagatctgccgcgcgcagggcctggagacgctcttcagcaaggcgcaggagctgggcggcgccggccgcgaggacccgggcctgtggtcgcgcctgtgccgcctggctggcgcgtcgtcgcccgcagcctacgacgaggcgctggccgagctccacgcccacggcccagccgccttcgtggactacttcgagcgcaactgggagccccgccgcgacatgtgggtccgcttccgcgccttcgaggcggccagagacctggacgcgtgtgccctggtgcgaggccaccgccggcgactgctgcgtcgtctcagcccctcgcgtggcgtggcgcagtgccttcgcgacctggtggccatgcagtgggccgacgcggccggggaggcggtgcccgaggggcccgatggcggggggccttggctggaggatgagccagggaggggagcccagggggagaacgagagggtgaggggcctggagacaggcgactggggaggggctccgaaagaaggaagtatttggaggggagcccagatggagaaggagtgggcaagggcactggaaaccagagactggggcggggctcagttcgaaggtgagaaggggagggcactgcagatcagagattggagagggggtcggttggagaatcagaagccgaggggactggaagggggtgtcttgagagggtcgaagttagagaaagggcacctgagagggccagagattagagactggagggggccccagttggagggtgagaaagattggggactggaaggttatgtctggagggggtcccagttggaggaccaggcgctaagaggattggaagggtatacctggagggtggcccagctggaagatcgcaggagtaccaccgacctgagggggacccagtttgactatgagagggtcaggagtcttgaaggaagcccctggaggggggcgcagctgcacgatgaaagggcagggggactgagaactgcagaatggaaggggccacagtcagaagtagagaaggggagggggctggaggtcagaaacttgagggggatccccttggagaagtccctggagttggcccctgagaacggagaccaaaggggaccccagtgggaagatgagaggaggagagggccagagattgcagaggagaggggagcgagggtgggggtcaaaagaagaaggggcctggaggatatagttctggtccagctgggagacacgagggtcacaggcatggagaatggagatggagggggagcccggtccgtgggccccaagagccgagccggacgagggatggagtggggagacgcaggagggcggtgtctagggctggggaatggagtcgtgtctggcaccccggtggggactgtattggaaggcagcccagaatgggcagcggcgaggagtgaacacctggctgcaggtgacggcctgcaggaaggaggcgaagatggccccagggaaccaaagaggctttgccgacccccgggagaggaggaggtggactgggaacccctggccaaattccgagcagcctgcgggccagagctggcagacctggtggctgaggagttggcctttgctaggcagcatgggacccggggtttccactggaccggagctggctttgcccttaaggacggcacctcggacttcttcctggatggggccctgacacgctgcagctgctcaattcacgccgcccgccgtctgccctgcagacacctctttgcagcgcgcctcctcactggggctgccttattccacatggacctgctcagggattgctgggggagagccccagagccctgacccttcatgcctctg

SEQ ID NO: 37244 - DNA, 1344 bp, Artificial sequence
  DNA replication origin
aggaggtggactgggaacccctggccaaattccgagcagcctgcgggccagagctggcagacctggtggctgaggagttggcctttgctaggcagcatgggacccggggtttccactggaccggagctggctttgcccttaaggacggcacctcggacttcttcctggatggggccctgacacgctgcagctgctcaattcacgccgcccgccgtctgccctgcagacacctctttgcagcgcgcctcctcactggggctgccttattccacatggacctgctcagggattgctgggggagagccccagagccctgacccttcatgcctctgcccaccaccctccaccaggagggtcggagggcattcttcgatcccaaagataatagggctgaggccaaggagaccgttgcagtccccctggccaccttctgggtcatccagggacctcctcatggcagtttgcctctctgggtccaagggcaagctgtaagtggtctctgaggtcctggagccacagcttgggaaggtgttgatgggcagggtggattctgagggcttccctctggagaggaagcatgtgatgagaggtgtagacagggtcaggctgggacagaaggaaggaaaggggcagagctggggggagggggaggaagcgatcatatggggagtgtctggcaagagtagactggccagtctagggagtgcagcggggagaggggaaagggagaaagtacagaagacagatgaaggagaggaggtaagcgagaaaaaatggaaaggggagccggaaatggaggagagaggacaagcaaagagacagaaatgaagacatgaggaaaagctgggggaagcaggagaggaagggacgggatgtaggagggggaagaaaaatcggagatgagacaaaagaaatgtgtgggagacgggtagagacgaaatgcaaggggcgtggttttggtttttctccaagacctggagacatcgacccccatcgccttctgaagagagagggagggcgggcactgggggtcaggagagtctccagcaggggaggggaattgtttggactattgttcttcaggattggaataaaacaatcttattttggtttccgtgatgagttcttggcttctggggttggttgggagtcccagatccagggaacagttgagatggtccagcgttccttcattctttctaccgacaaggcctcctggggccagatggatagaggagccacaatgaattcatctccatagcaactcaagcttcctcctccatcatctggaccagtgcgtcccagtggcaacttcttgacatgagtcgattctaccttcaaatg

SEQ ID NO: 37245 - DNA, 1170 bp, Artificial sequence
  DNA replication origin
ttcaagggtaggcgacgggagccttgcggtttagccgctagtcaacggatgggggggagtggtagcaaaaacataaaaatggggacaagagagaaactggagactccccaacctgtctgtttccgcccttttacagtactgaggggaaaaaaaagccttctttccttgggaaatgcaggaagccagcaagcggccggagtctccggagcccgcaaggaggcgcgttggctgcgcagagagcgcgcttcccagctggagagcctaggaacggtggcgcgggcggaggcgacagcgaggacccaaggctggggtttcctgcttggatcaggagtgcctggggagtaagttctacaggaaatgtcaatctactggtcgtgggggtcagactctggggtcgggtcgatcgggtcccgggggcggggggtgggacgggggtgggcaggcaggagtgcgggcgctgggatcccctgcctgctcggctcccctctcctccccctggtcccttacaccgtccattttgaggaaggggtcaagaagcgagtacaaaatgtctgggcaggacgaatctctgtagtcggtccttcctggcggcctcgttaggttgatttatttcaacagtttgatccccatcctggtgcagctccgagacgctcctgggctgcgcgcgcttttgggctgcgccaccgacagagacatctggaagccggagctagtggaagagtaagtgtgcctgagtgtccgtactaagggcgggaccgggccggggcccagggacttgagagttgctgtctgcaaaagcctcattgtctctacccttccgggaggaaaggggaaggcacgaatgacccacgtgttcagaccccgagcgcgcccttcaccttggcccagggagaagggcgcttcccccataccgtgctgcagcgttgcgaaagcgcctgtccccgggcttgggcagcagagatgcccgcatgcagcggttgcaggggttgtgttctttgcatccatgaaagtattggagctggccgggcgcggtggctcacgcctgtaatcccagcattttcgaaggccgaggtgggcggatcacctgaggtcaggagttcgagaccagcctggccaacatggtgaaacccccatctccactaaaaataccaaaattagctggccgtggtg

SEQ ID NO: 37246 - DNA, 1448 bp, Artificial sequence
  DNA replication origin
tgcaaatgcactaaatgccactgcattgttcacttaaaatggttaacttcatgatatgcaaatttcacctcgattaaaaaaaaatgctgcttgaggccaggaatttgagaccagcctaggcaacatagtgagaccccatctctatgaaaataaatatgaaaaattaggaggcatgggggcccatgcctgtaccttcagctactcaggaggctgaggcaggaggatcacttgagcccagaagtttgaggctgtagtgagccatgattgcactactgcactccagcctgggcaacaggacaagtctctgtctctaaaaaattaaattaaaatataggtgtgtgtgtgggtgtctgtgtggggggcgggggtggggggatgggggtgtgtgggtgtgtgtgtgagtgtgtgtgtgggtggggggatggggtgtgtgggtgggtgggcgtaagggggttggagtgaggggatgggggtgtgtgggtgtgtgggtgggtgggtgtagagggggtgggggttgtgggctgtggtggggaagtgtgtgcacacgtgcatttatatgctgagattaatgtcaggcaggatccacatacgagtgtggggaaggcagggtgcctggattctcatagctccattcttctcccaagctctgcctcacctgcctccttgaaggaaacacggggaagccaggactggccgtcacgttggtgacaaatatgtcccaggtaagttggcagctcaccctctcccagaagcgtgttgtcgttcccacgagtcaatgtgcctctgcctgtggctgggagtcaggtaaagcacatggagccaggcagggccccccgccagccgtgctgccctaggtctctgcacctctgcttggagagagatgctgccctggggattctcctgggaccacccccaccccagtactgactggtcctttccacacctcatcctggctgccagtgggcttcacgttctgctgcaaagcacactaagaaaggagctgaaagtgtctttggtggggtgcagtggctcaagcctgtaattccaggactttgggagggtgagacaggagaatcatttgaggccaggagttcaaaaccagcctgggcaatgtagcaagaccaccgtctctataaatataaaacaaatttgcctggtgtggtggtgcacggctgtcgtcccagctacttaagaggctgaggtgagagaatcgcttgagcccaggaggttgaggccacaatgaggagtgatcactccactgcattccagcctgggtgacagagtaagactgtctctaaaaataataataaagtaaaataaaaagaaagtgtttttgtcttaaggaactcagggtctcacaggggacactaggcgtttatggagcgggcagtggcagcatctcccgcaactgtcatgacctgcagatgacaagcagtggactgagacgt

SEQ ID NO: 37247 - DNA, 970 bp, Artificial sequence
  DNA replication origin
cacgtggatctcagagaaatggatgaataggctgggtgcggtggctcacgcctgtaatcccagcattttgggaggctgaggtgggcagatcacctgaggtcaggagttcaagaccagcctggccaacatggtgaaaccccatctcgactaaaaatacaaaaattagccgggcgtggtagtgggcacctgtaatcccagctactcgggaggctgaggcaggagaatcacttgaacccaggaggcggaggttgcagtgagccgagaacgtgacactgtactccagcctgggcaacaagagggaaacttcatctcaataaataaataaataaataaataaataaataagaacgctgaatgagtgagtgaatgaatgaatgaatgaatgaatggcagggaatcgggacagggtcacagattacccccaggctggaggtagaggaagcagccatggctgaagccagctctccacacatatactttatttccacagtcccattttcccatgctgaacctggcgtcttcgccctgacttttcccacacctgtcagcactggggggctcttggggagtaaggagctacagagacagggacacaggatgcgtggagagcctgggagatggagatgaggagagagagccggaaacaggaggtgggggatccacagggggccagggctcagcagacagggaaggggcagatatggagacaagacggacagacactgaccaggaagcccagagaacaggagatcaggagtcagagggaaaagcagtgtcaggagcagagagaaaggaaccgggagacacaggtgaggcggtgatgaagggcagatgaaaacagttgaaggggcaaaaagacagaggcctgccactgggagaaaaagacagagacccacaaggcaaacaggggaagtagagacacaaaaaaagaccccacagagagccagggcagggtgggggctgcgtgccc

SEQ ID NO: 37248 - DNA, 979 bp, Artificial sequence
  DNA replication origin
ttgaggctgactttgaaggacaagtcagggagagagggatgcacagcagtgccgtccccctgcctggctggctgagctcgggtgactcccttttggtctctgagccttgaccgcagtctctgtagaatggggcagtgaggacctgagtggggagagggctggcacccagctggcggtgccagatccctgacaaccggccctccatgacgcagatatccagctcctcttcaccaaggcccattgcgacagcagcatgatcgatgacctccttggggtcaagaccagcatgggagaccgggacatgggcctcttcctgagcctcattgagaagcggctggtggagctcctgacagtgcaggccttcctacatgcccaggtgggagacggcagggagccgggacaggaggccggtctcgggggtggcccagctgaccgcaggctcccacactctccagagcttcacctccctggccgacgctgccctcctagtgctgggccagagcctggaggaccttccgaagaagatggccccacttcagccccctgacactctgtgaggcgcagggcaggagggacgcagaggggacggggcttccatgggggcagagggaacacacaggatagagagttttggggggcttttggggactggctggcggatgtggccctggggggttagaatatgaagtatgtgcttcgaggcagccagaaggagtaggggcttggcacctgtgtgggaggatggggccccgggtgccccagaagggaagggcactcggggctggtgggagaatggctgaggctcccggggtttagcaggaagggccgctggcctttttgagggctgaggtctagtcttttccaattttccttcccctccccagagaagaccccccgggttttgaggccagcgatgactaccccatgagcagggaggagctgctgagccaagtggagaagctggtgagagtggggcctg

SEQ ID NO: 37249 - DNA, 1274 bp, Artificial sequence
  DNA replication origin
ggctgtcctgtttcttttctcttttttaaaacatttattgttagcttttatttgtttttttgagatggaatctcacgctgtcagccaggctggagagcagtggtgtgatctgggcttactgcaacgtccatctcccgggttcaagcaattctcctgcctcagcctctccagtaactgggattacaggcctgcactaccatgcccggctagtttttttgtatttttagtagagacagggtttcaccatggtggccaggctggtctcaaactcctgacctcaaatgatctgcctgccttggcttcccaaagtgctggattacaggcgtgagccactgcacccagcctgtcctgggtttgaatctcagctccaccaattgtgaaccttggtgtgtggcttcctccttccgctctgggaatggggatggcagtgcctactttgcagggttgtcatgagaattagaagggatgacggatggagagaaaggtggggggtggtggggagcgagctggagagcctcctcggggcataccgtaggagctcagatatgggcaggtcctccttcctgctgtcgtgatggctgatccgagccctgtgctaggtgatgtgggcacagtggggagaggccctggaggggactgacctgcgcactgggcactcatcactcaggggctaggacagaggacgcccaggcactgggggcgagagaaggccctaactcagtctggggtgcaagaccataatttgtggggcccagtgcagaatgaggggccccttgttaaaaaattgctgagattttcaagataggaagagcagcagcgtgtcaagccaagtgcaggcccctcaccactgcctggatctcacactcatgaggctggctctgctggggtcactgggaaggcttcctggaggcagtgacacttgaggctgactttgaaggacaagtcagggagagagggatgcacagcagtgccgtccccctgcctggctggctgagctcgggtgactcccttttggtctctgagccttgaccgcagtctctgtagaatggggcagtgaggacctgagtggggagagggctggcacccagctggcggtgccagatccctgacaaccggccctccatgacgcagatatccagctcctcttcaccaaggcccattgcgacagcagcatgatcgatgacctccttggggtcaagaccagcatgggagaccgggacatgggcctcttcctgagcctcattgagaagcggctggtggagctcctgacagtg

SEQ ID NO: 37250 - DNA, 2281 bp, Artificial sequence
  DNA replication origin
taggtgagagcataaaatcttgcgaccagtgtggaaaactgttcggcattttctaataaatatcaacatatacctaccctaagacccatcggtcccactgctaggcatttatagacagagatgtacatggatgatccatggatgaatactgggtagatggatggatgggtggatgatggatatgggacagttggagggacagcatctgttttttagtgttttgtgaaacaagtggaataatgcataagtgccttgcacagtgaatgacacataataaacattgctattatattttatcatcattttctttacaaataataacatttttggtaactaagactaagaagaaatttggtaactaagactaagaagaaatttggtaactaagactaagactaggaagacaaaagtcaaatgtcattgcagatagatggatgaacagatggatgtggggctgttggaggcagatggacagatagacaatggatggattgatggacatgggacagatggagggatagaccctggatggatggatggacatgggacagttggagggatagaccctgcatggatggatggacatgggacagttggaggaatagatcctggatggatggatggatggatggatggatggatggatggatggatggatatacggacagatggatataggacagatgaaggggtagatcctggatggatagatatgggacagatgaaggaatagaccctggatagatagatggatatgggacagatggaggtatagaacctggatggagagatagatataggacagatgaaggaatagatcctggatgaatgatggatacaggacagttggaggaatagaccctggatggatggatggatgggtggatgaatggatggatggatggatgaatggatggatggatataggacagatggaggggtaggtcctggatgggtagatagatatagaacagatgaaggaacagaccctggatagatagatggatatgggacagaatggagggatagaccctggatggagagatagatataggacagatgaaggaatagatcctgaatggatgatggatataggacagttgaagggatagactctgaatggatggatggatataggataattggagagacagacgttgaatggatggatggatggatggatggatggatggatggatggatggatatgggacagttggagggatcaaccctagatggatggatggatgcattgatagatggatggatggatgggtgtaggacagttggagggacagatgatggatggatagatggacatgggacagttggagggatagaccctggttggaaagatggacagatatggggcaactgataagcaagtgaaccaggttgtccatgcaatgcctccaagccccgcgggctgatggtgtccttccaagtggagaagccaggctcgggagggggcgcccatgggtgctcaccagccttgagcttctccagctgtccccgcacatcctggaagcgggcctcaaggcgctcagcctccgagtgcaccttgtccatgcgctgctgcaacaccttctgctgctgctcctgcagcaaatgctggtcatccttgctggcacgtgcgctcaccaaagcctcctgcatctgtggggacagggctgaatgctgggccagatggcagcctcgggagttgggggtgtggagctaggaagaagcaggaggcaggctgagggagggaagggggcggggaggccgggaggagaggaggagatggagagggcaggcctcactcacctccttgatctcttcctgcacatgctccagctccaagttctgctcgttgatgaagttgaactcagcaaagttgcgctcctcgactgggagagttgggcaaggcggggcccagagagagggagacagagaaacagagacagagagaacagagacagagaggcatacagaaggccaaagaaagtgaagatgaggaaggccacacagaaaccaaggcagagagacgaacagagaggagtcacagagacaaagaggtgtgggaagatacggcaggtgggacacagaaatacacagcaaggcagagagggaaagccagagactcggcaatagcaagggagatggggagatgcaggcggggagaacggtagatatgggtaaggagagaaacagagagggacagggttgagggaaggatgtggagagtgaccccaggcccaggagttaggagggggtggggaggggcagagacagggccacg

SEQ ID NO: 37251 - DNA, 955 bp, Artificial sequence
  DNA replication origin
agtaggctttctcaaccttggtactgttgactcttggggtgggataattctttgttgtgggggcagtcctgtgtgtcgtaggatgccaagcagtgtccatggcttctactcactggataccagtagccccctcccttctccacaagtcatgacaatgacaaatgtctctaggctgagcatgctggctcatgcctgtaatcccagcactttgggaagctgaggaaggaggatcacttgagcccaggagttcaagaccagcctgagcaacacagtgagacctcatctctacaaaaataaaataaaattagccaggtgtgatggcgtgcacccataatcccagctactcgggaggctgaggtgggcggatcacttgagcctgcgaggtggaggctgcagtgagctgagattgtgccactgcgctagagcctgggggacagagcgagaccctgtctagaaaaaaataagtctccagacattgccaaatgtttttggaaggcagaatcacccgctgattgaaaactactgggcctttggagatggggagcatacgggcaagactggagaggtgggtaaggtcaggtcacttggggtctgggatcccaggctgaggtgctgagactttgtcctgcaggtactggggcatcatgggaggcctatgaggggtagggtctgctgtgggtggggtagggttggctgtgggtgtagagagaccctctgggactgtgcaggaaggctggaagttgagagaaaggttggggtgatggtccaggtaggagaggatgaggctgagcccaggggatgggttgagagagggaggaggcaagaggatggggctgagggctgctgatggtggggcagaaaaggagggagggagcaagagccttcccaattccaggtggtgtgcccaggtcccagaagacccagaggccttccagaagtgccctctggtgggatg

SEQ ID NO: 37252 - DNA, 897 bp, Artificial sequence
  DNA replication origin
ccctccctccctacaggacctggaacttgggaaagctgggggctggaaaagaatgggtgaatgatataaagaatgaatgaattacccattccctccagaaatgcctcgcttccctcctcggagcgggcgctccctgccaagcgtcccaaaggcatcctggccaaacagggtggggctcctgtagggatggacatataagacccttcagacagcaggcgggccagggcccagagagggtggacaatgaactgcgagggactgggaattgaaagggggtgaccctagaaccacgctggcctcattcctccaagaggggttggagggggacctctctcaggcctctcccacacctctccagccctcccacctctcacactctgggtcttgcgtctaggctccgattctggcgcgggtttggcaggggacaggcctcctgggctctcaggatatctgaggccaggctgtttggtcgcaggagagggggaaaccccggcctgctgtagtgggggttgggcagggtcgggggagtcctgggccctacctgccgacgggcctgacctgttcttggtgctccaagttcagtgttgtggtctggttactggggagataagggaccaatgaggactgaggacagcggccagggagggactgaggccgcgggagaaactatgggaggaggggcggagaaggatgcgaggcgtagacctgcagggttcccacggactgagaactgatgggcaaggccaggcgcggtggctcacgcctgcaatcccagcattttgggaggccgaggcgggcgcatcacttgaggtcacgagttcgagaccaacctggccaacatggtgaaaccccgtctctactaaaagtacaaaaaattagccggacatggcggctcgt

SEQ ID NO: 37253 - DNA, 1103 bp, Artificial sequence
  DNA replication origin
tactggggagataagggaccaatgaggactgaggacagcggccagggagggactgaggccgcgggagaaactatgggaggaggggcggagaaggatgcgaggcgtagacctgcagggttcccacggactgagaactgatgggcaaggccaggcgcggtggctcacgcctgcaatcccagcattttgggaggccgaggcgggcgcatcacttgaggtcacgagttcgagaccaacctggccaacatggtgaaaccccgtctctactaaaagtacaaaaaattagccggacatggcggctcgtgcctgtaatcccagctactcaggaggctggggcaggagaatcgcttgaacccgggaggcggaggttgcagtgagccgagatcccgccactgcactccagcctgggcgacagagcgagactccgtctcaaaaaacaaacaaacaaacaaacaaaactgatgggcggcgaggtcctgaaaggggcggagccgggagggcctgtggagcggtgctgcggagccctgagaggtgcacggctgtgaggcctgagaggggcgtgccgtagggagctgtgatgggcggggctgagacctgtgaggagagtgagtgggaagaacttcgaggggcggggcttcggggccggcgaggggaggggcacggacaccagtacaggacggggcttcgcagacagcgagcggaggggcttccccgtaaggggcgggcttcgagggtcgcgtttggaaggccttacgaggggcccggtggaagggcggtgaagggcgggctaatcgggaggcgctcaggccttgaaggcctgcgggaggtcgaaatggtcctggggaggtcgaggctgaggtctcactagtaccgcgggcctggaagcggcgggagttgaaagagcctgcggtgacctgtatggaagccctcgaagccaggccgaggtcctacaagacggagcccgagaggtgccggtcttaagctgactgtgaccacgttaaattaaggattcataggaaggaaggcggtgtcgaagccgggagttgcgcggagaaggagcgctcaacacagcctcagcggttcactacgcaagcgcgaccaacggc

SEQ ID NO: 37254 - DNA, 1037 bp, Artificial sequence
  DNA replication origin
ggattacaggcgtaagacactgtgcctggccccaaaggtttactgttaactattattattaattttggggatattaaattagggtcggggtgatgactactatgtacacgagtctcttgggaggggaccaggtgcccagaactctgataaattgagagcaggggaattcaaatcctggatccagggaagggaactggatgatgggatgtctgggtatctgatgggccagagctgggtttgggatagctgttggtgattcgggctccctgagggggtgagggatggacagttcagtgcttggctgggtaccccaagacctggaagctggaataccagtatagcacagactctagagccacactggttggactcaaaatccaagctgttttactcaatggctgtgtaatttttggcaagttactaataacttctctatgcctcagtctcttcatctgaaaaatagagataatagtaaatacattatagggcagttcttagggtagtgctagtcatatcaggcattggggctctgagtggagtcagtactgggggaccctgattcaggatctctaggagttggggaaggggcaaattcttgggtccattgggtctcaaggctaaagttgggaatccaaaatgagggtccctgggggagaataagtagtctcaaacttaagtgcctgagagacagaaactggggtccgcactcagatccctaaggaagttgcaaagtctgggtcactgaaggaaaaattaggggctggggagacatacgttcctcttggggagcaggaaaagagggctccactttcttgagaggactagggggagccaggggctaggaagatggaaacttgagccggggaggtgaaaaacacgagtctaggactcagaatcaagttccctgagtgggatcggcgccaggcttgggtaccctggggatattaggggggtccccgcactatggctatgtagaaggggaagaatcaaaggatctgagggtggcggcgggatctccccatcctgggcctccgaga

SEQ ID NO: 37255 - DNA, 825 bp, Artificial sequence
  DNA replication origin
ggactctttcccagggagagtccaccaggactgggatggacagagaacgaaacaaggggcagggttaggaaaggagaggggatagggtcaggcagactgtgggaagggctgggaaaagggcagggtatctgggatggggcagaactggggagagttaggatttaatatgagagggggtagggtcaggacagggaggaggcatcggaggtagagctaaaagggttaacctggtggttcatgcctgtaatcccagcactgtgggaggccgaggcaggtggatcacttgaggccaggggttcgagaccagcctgggcaacatggtgaaaccccgtctctaccaaaataaaaaaattagccgggcttggtggcaggtgcctctaatcccagctacttggggggctgagacaggagaatcgcttgaacccgggaggccgaggttgcagtgagccgagatcgcaccactgcactccagcctgggggacagagtgagacccttgtctcaaaataaatgaaataaaataaaaaagaaatactaggtaaagggggtggggccagaatgcctttagaggaggggcgtggcaagattccaaaggggaacagaagggccctgagctccaagtaggcttaccttgtccaaagtggccacgaaaagcagtataagaatgaggatgtgaagggctgagaccaccagcaagaggagtgacatggctgcagtggaagcctggggagggggagcaggggacggagtctcaagaggttggcacaggccaggcacactcacgcctataaccccagcactttgggaggccgaggcgggaggatcac

SEQ ID NO: 37256 - DNA, 826 bp, Artificial sequence
  DNA replication origin
tcagcactttgggaggctgaagcaggtggattagctgaagtcagaagttcaagaccagcctggccaacatggtgaaacctgtctctactaaaaatgcaaaattagccaggcgtggtggcacacacctgcagtcccagctactcgggaggctgaggcaggagaattgctcggaccccggagggagaggttgcagtgagccaagattgcgccactgcactccagcctgggcaaccagaggaaaactcggtctcaaaaaacaaaaacaaaaaaaacaagaggtaggtacatccagacaggcgggacatgcattagccctaggcactcagccactcaggcctggaccccgcccactccaactttgttgggggagggttcccaattctcagtcccatgaggacacgaagggtttaccttcccctttgaagaccagtcccgccgccctcacccctcaccattctcgctgacattactgcaggcccatgttttggtgtcgttgttccacgtgcagtcgtaccagagattcagggactctttcccagggagagtccaccaggactgggatggacagagaacgaaacaaggggcagggttaggaaaggagaggggatagggtcaggcagactgtgggaagggctgggaaaagggcagggtatctgggatggggcagaactggggagagttaggatttaatatgagagggggtagggtcaggacagggaggaggcatcggaggtagagctaaaagggttaacctggtggttcatgcctgtaatcccagcactgtgggaggccgaggcaggtggatcacttgaggccaggggttcga

SEQ ID NO: 37257 - DNA, 1267 bp, Artificial sequence
  DNA replication origin
gatagcaagatcaggtttcctttagaaattcttattggttccttccctgcagcgacaaccggctgcccaaagttgatggaacccagcagctgtcactggacgtttgccaggaggcagggctaacggccttggtgcacatgatgggcagtttgcccggagcgggctgaaaaagacaatgatatatagtctcgggagggcgcagctttaactcttctacctggcggtttacagaagccagagctgagcagctgtgattggcagacaccctcagctcctcagccaaaccacacttggatgtttatggtgagggtgggactaagaaatggaacagaagcagagctaaatcgctttgattggctgttcatcgaaggggcggggaagacttaacaactgctagctgctttgattggctgctttgcttaagcacacagtgcagcaaaaataatcacctgtcagttattggaagttggagtgaaaagtataataaccgtaattgacagcctgtcgtgaaggaggcggggcttagttcctagcctgctgactgggcagggaggtaggttctactcaggagatgttactgctgggcgtggcttgcgggggctcggaagtgatcggagccactgggtctagtttggggaaacccgggggtgggtacaatcccatgctgggggtcagggcctgcagatgcgccagggcccgagttccgttgaaggtcacctcacagcctgacttggctaggagccagttctccacctccgaccggagccacctggaggtctctgcaaggggagaggcaggtgttctgaggtcacactgagatcggggaagattcgagggagcagcaaggaggggcgtagggcaaagaacaggaagggcctgggtttgggagaagcctaggagtgatcttgaggcttggaggggagcggaacaaggcccaggagggtcgagagggccagaaggcccagctctggggctttcgtctggggaccagtcaggggctcttgggcagggaaggtgggggctcctgtaggcaaggggaccacctggagcccacacagggagcgcgcaggatctcttgtagggagagtgtcagctcaggtagaggaaagaatgacaggagggggccgtgccatggagccaagactcccaaccaggctgaggttaagaaagggctgtcacatcaggcaccaagatcggagtctggattcggaggtcctgtctgctgagggccggggtctcttcgcaaacccgtcaggttcacccgtgg

SEQ ID NO: 37258 - DNA, 880 bp, Artificial sequence
  DNA replication origin
tgggctctactgtgaagccccttagcccagcaccaagcaggcccatggggcagcctggggagggatgttgaactggtgcccctgagatgcagcagcccgatcctgccctggagggagaggtgtggggtccctggacacaggcagtcggtctgtaatggaggcggcagctggcacagcaggagcccgaggctgcatctgctcgtccgcgagaggtgatgtccatcctgagccttgaggatgaggcagtgaacattttccaagaacacaccaggggtggtttggcttgtgcctgggcctggaggcctgagagagcaggacctgttcagggtaaaccggctttttcagcatgcgctgcattcacaggggaggagcaggaggtgacagggagggcctcgtgtgccgggccacggagcttggactctgagagcactggggagccatgggaggaccatgagcaggggaggggcaggggcagctctgaacctatgtgcagacaaactggacggggagactgaggccagggaggaggctggagtgatgcaggcggggataaagtctgagccaaggatgagctggggagctgcagaggaggagacgggcagagagagtcaggggactgcagaatggggttgggactgacaggttggcgaagggggagcaaggatggtgccaggggcctggcctgtgactgagtaggtggaggggctgcccaagacatagaccccagggtaggaggagcgagtgctgtattccttgtgggcagcggtagtgctgaagggaccctccgggtggcagggggacccctctccagggagactctggcttcatctgtgtgccacagagtgacctgctcctttaactagaattcagctccatcggc

SEQ ID NO: 37259 - DNA, 796 bp, Artificial sequence
  DNA replication origin
aggaaggacagggagggaagggaagggaaagaaaagaggaagaatgggaaggaaggaaggacagggagggaagggaagggaaagaaaagaggaagaatgggaaggaaggaagggagggagggagggaggagagcatgacgcaggaacaatgcatgaaacagagacaactacagggggcctgacctggtccccacagcgcagggccgcaggaggcgtggcaggcgcatgctcaccttggaggcccgcaggcccatgaagatggcgaagagcagcagcagcagggaggtggccaccttgaggtcggttagcaccaccatgcccacgttgacgaagatcgccacgccggagactaccagcatgaggttgagcagggcgcgctgcagggtgggcgtgcgcaccttcagctccggcagcagctgctccaggccttccagcggcgtgtccttgaaactcttcagtaccaggtgtccccgtttggtccgggctgccaggaccacccgcttaaagtatctcctgagggacagagacagaggcaggagcaggatcgggactgcactgcccggggagccccctccaatcctaggacgctcactctggctctacagtcgcacaaccatcttaaaagcgactcagtaatcatggggaagaaaccagggatcagctgtgtccaaccacaggggatcggttcaatcgcgccatcgatccctggtattggacgtgcagattgtttgttggaatcctggccgtgccgcatcttcagaatgtggacctccctctccgagcctcagttttcctt

SEQ ID NO: 37260 - DNA, 879 bp, Artificial sequence
  DNA replication origin
gagcaagtgcaaaggccctgaggtgagtggaggcctggagtattgaacagtgaggaggccactgtggctgcaggagagtgaatgtgcggggagggtgggatatgagggcagaggggatggggacagatcgtactgggccttgtgggccactgtgaggaccttgctttgtttttttgtttgtttgtttttgtttctcagatggagtttttgttctgttgcccaggctggagtgcagtggtgcgatctcagctcacagcaaacctccgcctccccagttcaagcgattctcctccctcagcctcctgagtagctgggaccacaggcgtccacgacctccccctgctaatttttgtactttttgtagagactgggtttcaccatgttggccagggtggtcttgaattcctgacctcaagtgatccacccgccttggcctcccaaagtgttgggattacaggcgtgagccactgtgccaggccgaggaccttgctttgactctgagtgagccgggagccatgggagggctctgagctgaggagagatgtgagcagcggatttaggtgttaacaggatttctctggctgcagtgtagggaacagactatcagaggcagggacatctatgaaagagtctattatatttgtctaggggagagataatggaagctccgacaagggtaatagcgatggaaatggtgaaaaacggtcagatgctggttatgttggaaggcatcagcgttttgctgatgtgctggctgtgggggtgttctggggaggaagagagaggagtaggggtgcgtctccagcagttctggcctgagcctcctggaggatggagctgccatttactgggatgggggagaccgtggtgggatgggga

SEQ ID NO: 37261 - DNA, 871 bp, Artificial sequence
  DNA replication origin
agtgacgccctcatggagccaacattccaagtggggagacaaggaatcaaataaatataaaatatgatgcctggtggtgataagtgccatgaacaatgaggcggagtagtgagataaagagggatgagatgggtcgggcgcggtggctcacgcctgtaatcccagcactttgggaggctgaggcgggtggatcacaaggtcaggagatcgagaccatcctggctaacacggtgaaacctcgtctctactaaaaatacaaaaaaattagctgggcgtggtggggggcgactgtagttccagctactcgggaggctgaggcaggagaatggcatgaacccgggaggcggagcttgcagtgagccaagattgcgccactgcactccagcctgggcgactgaggaaactctgtctcaaaaaaaaaaaaaaaacaaagaggggtgagatggggcctgtttcagacggggtgggtggggaagggctccccaaggaggtgacatgtgggctaaaggcttagtgaagagggggaacgagcctgatgaatgcctgggggaggatgttcttggcagatggaagagcaagtgcaaaggccctgaggtgagtggaggcctggagtattgaacagtgaggaggccactgtggctgcaggagagtgaatgtgcggggagggtgggatatgagggcagaggggatggggacagatcgtactgggccttgtgggccactgtgaggaccttgctttgtttttttgtttgtttgtttttgtttctcagatggagtttttgttctgttgcccaggctggagtgcagtggtgcgatctcagctcacagcaaacctccgcctccccagttcaagcgattctcctccctcagc

SEQ ID NO: 37262 - DNA, 1853 bp, Artificial sequence
  DNA replication origin
ctactgtgagggctgttccttactatgagagtccatcagtgcctcaatagcatagggcctatagtggggtgctcaggaaaaggtggtgtcagcatttgctccgttgtcttgtttccccgtctgaccccttccttgtcctcccatctcccgcactgtgtctgggagttgagagctcctggctcctgtcacccaggggcacagtcgggccatgggagggcctcaccccttcgaagacccgcgtgatggtcttgggccttctcagaaactgcacggcttcgctgttggccagctcctggaggcttttggggatgtgcatggcagctgttttcctttggggccactgggaggtgggagccagggtgctgggcgctgcctgctgggcactgccgtccgggggcttcaggccagccctgggcttggctgctgtgggatgacacagatgggggatgccagtcaggggcacggggtggaagggctgttgggggccccaggattgggggacatggggtggggatggggggggtccccggaatggagttgtgtggggtgaggggactgctgagcctcttaggagtcagggtgtggggtgaatgggctgtcaggggccccagaagtcggggacgtaggatgggggtgcaggtgggtcccagggaatgaggttgtgtgtgctgagggggcttctgtgggccccaggagtggggggcataggatgggggtgctgggggtcccaggaatggggttgtgtggtgagggggctactaggggtcccagaagtgggaggcataggatgggggttctggggggtcccaggaaaggtgttgtgtggagagggctgctaggggtccctgaagtgggggacataggatgcgggtgctgggggttcccaggaatggggttgtgtgtggtgagggagctttctgggggtcccaggagaggggggcataggatggggatactaggggtcccaggcaaggtgtcgtgtggggagggctgccaggggtcacagaggtggaggtgcaggatgagagagtcgctaagggtcccctgggttgaggtgtgggttaagggggtctatggaggattccagagaggtgagggcctggggtgagggtgattctgggggtcccaggagtgggggacataagtgaaggggctgcttcaggttccagaagtcaggaatgtgggctgagggggttgttgggcgagagggctgtcagggatcccagaggtggagtgcaggggagggctgggatatttggggaccacgtcttgtgacccaggagctgaagggcctgcagagggactgggtccttctgtgagaggacacaggtgggactttctggggactagggggtgcggccattgagatcagagcccctgggaggtctgaaaccgaataatccctttcaggtttgggggtgacagcacccttcgtggagaacccaggtatctcagggcatatttcaggctgtccttgtcacttggggccatttcccagaataagggcctccctttcgaattcagctccattttcacggaagtgcacctcctcaagctgggagtcgggacctcggatttgtggggaacctcagaatgaggccacgccccggcactgggctaccttcttagaatcgcggtctcccctttaaggacctggaatggcagtgctgaggtttgggggtgacggcacctgagaaggggccgccccttctctggagggccaatctgcgtcacctgagggcccgcccttcctttcgccacccccacccctcctggtccctagcgccacctcagccttcttttggttccgctttttcccgccttttcgctcctccacagctgattggctgcgc

SEQ ID NO: 37263 - DNA, 1313 bp, Artificial sequence
  DNA replication origin
aggaatcgcttgagctcaggagaccagcctgggcaacagagtgatacctagtatctaccaaaacttcttaaaaaaaaaaaattagctcagtgtggtggcatgcacccgtagtcccaagtacttggggggctgaggtaggaggatcacttgagacccagaagtcaaggctgcagtaagccctgattgtgccactgcactccaggctgggtgacacagtgaggccctgtctcaaaaaaaaaaaaaaaaatcagctggtcagtgtcagagcctggatttgaacagaagtagcctggcttctgagtctgcccttgacctcttgctcttcttcctcacactggaccacgcgccttgagggcgggggctcctatcaacgaaattcggtgaaaatttgaagccccagtgatttgtcccagatggtcacaatgcagcagggcaggtctgtgccagacaaagacgagctggtgtgtagatggggtggtggggaggaggctggggcctggggtgggggagagagtcaaggtggaagccagattgagggctggatttcaggtgagttctgaactggaccttaaagaacaaggagtttctcagacagacaagaggaggaagggcattcccggcagggtggatggcatgtggaaaagccagatgctgcagagcgggcagtttcagagataagagagaaactcactggagggttctggtgtgagatgaggctggaaaagtgggtgggagccaggctctaagaggcccggaacaccagggccaggagccggacttggggagccatggaaagcattcaatattatgcatgggaggattctgtgcaggggacagctggggtcagccttggggttagagaagccctctggggtcacgtggctgatggatcggaggtgggcaagacaagaggccaacatacctgagaggaggcggggaggcccaggtgagaaaggctgaggccagagccctggggaattcagtaatatttagcgtgtaaaataggacttggtgattgattggaagtggcagtgttggcgataggggttggggatggcgggggtaggctaagggaaacagactgttgaaaatcttctctttggtctggtgtggtggctcatgcctgtaatcccagtgctttgggaggttaaggcggaaggatcatttgaacccacgaggtctggactgcagtgagctgtgatcgcaccactgcactccagcctgggcaacagagtgagaccctgtctcaaaagagaagaaaaagaaaatctccccttcgttagaattggaactcttcctggataggctccaca

SEQ ID NO: 37264 - DNA, 1252 bp, Artificial sequence
  DNA replication origin
cccatgcagcccacccccagcttcctctctccttctgtctgtctgtctgtctgtctgtctctctctctctctctgtctctctctctctctctttctctgtctctggaccacaggaatttcagggaagagccaggtcctgtttgctgtggtgttcactgcccgatatctggacctcttcaccaactacatctcactctacaacacgtgtatgaaggtagaggctccaccccacctctctggcccccactgaggcagaggagccgggtgtgggtcccagactcctaggtctgagggaggaggggctgggggcctggactcctgggtctgagggaggaggggccgggggcctggactcttgggtctgagggaagaagggactgaggcctggactcctgggtctgagggaggaggggttgggggtctggactcctgggtctgagggaggaggggccgggggcctggacttttgggtctgagggaggaagggactggggcctggactcctgggtctgagggaggaggggctgggcctggactcttgggtctgagggaggaggggctgggcctggactcctggatctgagggaggagggaatggggccctggactcctgggtctgagggaggaggggctgggggcctggactccagggtctgagggaggaggggttgggggcctggactcctgggtctgagggaggaggggctgggggcttggactcctggatctgagggaggaggggttgggggcctggactcctgggtctgagggaggaggggctgggggcttggactcctgggtctgagggaggaggggttgggggtctggactcctgcgtctgagggaggggcctggactccgggctctgagcctactggggcacaggcctgtgagttgaggccccttctcatcatccccctcctcaggtggtctacatagcctgctccttcaccacggtctggttgatttatagcaagttcaaagctacttacgatgggaaccatgacacgttcagagtggagttcctggtcgttcccacagccattctggcgttcctggtcaatcatgacttcacccctctggaggtaggcgccttgctgtgactccttatttggggggatggttgtggcagagtagctatgacaggagaccctctcacaggcttccttctgcagggtgtgcccaaactgccttattttaggatgcataagttcagtgcatgggctctggggtcagaggaaattaacacaac

SEQ ID NO: 37265 - DNA, 1127 bp, Artificial sequence
  DNA replication origin
agcgtggggcaggacaccggggcctctgagggtggaagagggtgtgtgtgtgtgggcagggcagaaactctggagcaggggggaagccagggccaggggctcctgaggtagtttgggtcagagttttggccttgagcctcctgggtgaggctcctgtttccttcatcctcaaggtctgggagaacagggtgaggtgcacattcctgaaaaagaagagaatcagggcctaaatctgtgggtcgtaaagggagaaactgtagatctagattcttaaggttaggatgtttgatccataagatggtgggggtgggaccctaagttccaaggaacagcgtcctaggagggaaaagggctggggccctgaactcctgggtctgagggaggaggggctggggccctggacccctgggtctgagggaggaggggctggggccctggacccctgggtctgagggaggaggggctggggccctggacccctgggtctgagggaggaggggctggggatctggactcctgggtctgagggaggaggtgctgggggtctggactcctgggtctgagggaggaagggctgggggcctggactcctggatctgggggaggagggtctgggggcctggagtcctgggtctgagggaggaggctgggggcctggactcctgggtctgagggaggaggctgggggcctggactcctgggtctgagcgaggaggagctgggcctggactcctggatctgagggaggaggggctgggggtctggacttctgggtctgagggaggagaggctgggggtctggactcctgggtctgagggaggaggggctggggacccagacttctgggtttgacgaacgggctggggccttgagtcctgggtctaggggaggaagtaggtggggtatctttcttgtcttctgggggattggagttagagtgcctgaaagctgcaaaagctagcagctgagcctccgggtccctgcaggatttttcaagctcagagggcagtctctacatccctgcaagggctgaggctggtgtactggactgcgtctcttccagagacacagactgcctgggcgaaccggtgctggatttggcactttccgaaccctgcgaccctcc

SEQ ID NO: 37266 - DNA, 635 bp, Artificial sequence
  DNA replication origin
ccaccggtgcctgctgggggtgttgcctgggtaggtcggcccggcccccaggggtctctcgagcgtctgccatctgcccggtgaggatctgtgtgtccgggtgtctggggctggctggtggagggggggtgtgtctgtaagcgctgcggcggcggagggagggaggggtctgtctgtctgtaccgaccctgagctgcctgcctgggtgtcgtggggctcccgctccttccccccggcccccccaaacccagatggatggtgtgtacctgggttctgtgcctcctgcctgcgtccggccaggcgtctgggcgtccccggctgcctgtgtcctcctgtctgtccaaacagcccctatcagcagtggcagcctggcccccattagaccccccactctgtgtgtgtgtgtctgtgtgtgtgtccctcctcaagctctgggggtgttgagggggaatcccagggaagtgagatcgtgcgtgtgtgcgtgagtgtatgtgtgtttctgcctgtgtttgagagtgggggagtcaagggggggtctagaggtggccaagcgaggaaggggcaagcagttccccaagcaggcaatctcccgctcctcacacgcacacaccagccactagcttcagaggtgaccc

SEQ ID NO: 37267 - DNA, 957 bp, Artificial sequence
  DNA replication origin
caaggacccaggagtccgggttccggctcctgtcctcccttaaggatccccttttggtttcaaaccctatccttcccaacatcctgggtgcccccccaccgagctctggcctccctagtcaccccacttagatcctgtacatagcacagcctgtccccaagcggggaggaggaggagggtgccagaaattcctagggtgtccctgtcttcattgccccccacagcatccaacagagaagagaggagcggccacttcgatcaacagctccccccacaacctcgagttgtgctgcagacggcatcccgtttcctcccccctcacctcccaacacacacacacaacatcggtctctccccacccgaatcctgatgcttggaagaggctggaagggtgttccagaaccttgaggaaggggtgggagcttggggcgaggggtgctgggggcctggatgccctcaaggtccttggcgggggtattaatagcagactcatagctctgacatgggaggggagagcgagaggagagagggagaggaccggctcgcgatggggggactgatgcagggaggggggtacagggagaaggtgagatagagagatggaggcacagggatatggggcatcaggtatgtggggatggggagagggagccaagtgtcagagaaatgggggcgtgaaaggtctgaggtgtagggactcaggaaaaaggggctcagagagggagagagagagggtggaggagagtccctgagggacaggggagctaggtgggggtcaagacccctgcccaccgttcaaaccccctccctccacgaggcttcttgccaacttcctctgtcctagatttgggggtccacattcccaccaccatccctgcatcccctgtccccgccttaccttttcatgaccctgttctgttggggggatggcgggggggccaggaccggaacccggcg

SEQ ID NO: 37268 - DNA, 986 bp, Artificial sequence
  DNA replication origin
aggcctgggggaggaaggggctgccagaaggactcctgggtctttacgggaggaggtaggggatagcgcttccgtctgaggaaggcaggctgggagctcagtctcctgagtccctgacagggcaggagatgagtgttggggactttagccctatgcagatggaagtggaaacggaggctcatgaggaggtagagatggaggcggggggagcggggggttgtccagaggctggactctgtgatccctgagggcgtgggttctgggggttgggccttcagagtcctggaggactggggatgcccctcctcaggccctggagtgggggaggctgctctccctaatccctgtggttaggaactgagcatgcagcccccgtgagaagggtggggccgggggctgccctcctgggcctcagtagggagtgggacgcggggtccctaagagcagaagccaggtaggggtgggtctgggagaggcagaggaggggctggagggtgagcagccactgggaatggaggggagcgtgagtgttaaccccgcgggggccaggccacagctgtgggttattttggggcggagtgggggggttattctgagcgctgattgagccagctgcttggggaagggcaatggaaaggaggagcgaagagaagccaggatcggggagggatgggcatactaggagcccccaaccccttccctggggagacaggggcccgagatctctgggaaggtgaggtggtgggcagaggggacgggctgtggcctcgaggcaggggaggggtggtggacctttcccccgccctggctgtctgtggggtggacgaggcctgcgctaccatggcaaccagacaggagcatgacagccaggagagaacccttccttgtctggaccctcaccccttctggaagcccctagtgcggactccagtccttctctgggaaccaggagtccagactcccagtgccctcctccctcagtccca

SEQ ID NO: 37269 - DNA, 1692 bp, Artificial sequence
  DNA replication origin
agcacgagcgcggcgccgccgtgcacggccacgatgggcagcgaggtctgcgccgacaggaagtcgaggatgggcgcgacggcgggcgcgcgcgagtcgtcttcgaagaccacgccgtgcacgcgcaaccccgacagcaggtcgcagagctgcagcacgaggctgcgcgggtccgagccgttgagcaccagcgccacgggccgcacgtctaggcccgggctgcgcaccgccgccgccacggccgggcccaggcgtgccgcctcggccgcgtacgcgggccccgagaacacgagcgccacgttgagcggccgcgccccgccgaggccgccgccgggcccaccggccccgcccggccccggcgcctcctccgggaacgggctggcgcaggccagcgccagcagcagcagcatcttagcggggccccgagggccgcgggggccaccggcgccgcgcatcgcctgcgggccccgccgggcggcctctgagcgcccgggccgggagagacggggaggagagggaggcacagacgggagacgcagggacagggagacgagataaagagacgcacagaggaggagatgcagcgagggacaggcgccgagatggggaggacagggagcggtcggggtgatggaacagagggagagacaggaacggaggacgagagagatggaagggagagagacagagggagagagaaatggaggagagacagagggagagacgggcagaggtagagagagatggaggggagagagagggggagacggagagagagagatggaggagagacaggcagagacagagggagagacagacacagcagagggaggtggaagggagaggtggggaagaaacaccagaggaagaggtgaaacagggagagacgcagagatagggcgagacagagataggaagaagtggagtatgggattgggggagacgcaaagacgagggtggataatggggtcaggggaagatacagaggtaagaggggagagagaggaagatagacaaggtggggatggggacacccacagagatgggatcaagataggagcagagagaggcccagggagacggggagggaaagagcggcaggaagaaggagagagacggaagcagcagagacggggagaagacggagagagagaggacggagtgacagaaacaggaatgagggaggcccagggagaggatgatagaggcgggaagagatgcaggaaggcgggagagataagcgaggcaagaaagttggacagagaagaagacagcaaggcaggaagagggagacagagaccccaaggccaccaagagacacgcgcacataaaggatggggaaacaattgagattgagggaggcaggcagagcggagcgaaaacaggaggacagaaatagcgaagcaaggccaagatcgggacccccaccagggaggtgcccagtacagacatgaaagtaaggcggggaaggcgagtggcaggagggagcagaaataaaagggaggaaaagggagagaaaaaatgagagggaaaaggggtcaggtgtgtggggagagaaagagagaaattagtggggcaccccaaggagagaaaatccccacatgaccttactcctcaccctgaccacaacccctaacccattttgtccccttagtcctgtccccatcccctcattctcaaagcaagggagtc

SEQ ID NO: 37270 - DNA, 2233 bp, Artificial sequence
  DNA replication origin
tgctgctgctggcgctggcctgcgccagcccgttcccggaggaggcgccggggccgggcggggccggtgggcccggcggcggcctcggcggggcgcggccgctcaacgtggcgctcgtgttctcggggcccgcgtacgcggccgaggcggcacgcctgggcccggccgtggcggcggcggtgcgcagcccgggcctagacgtgcggcccgtggcgctggtgctcaacggctcggacccgcgcagcctcgtgctgcagctctgcgacctgctgtcggggttgcgcgtgcacggcgtggtcttcgaagacgactcgcgcgcgcccgccgtcgcgcccatcctcgacttcctgtcggcgcagacctcgctgcccatcgtggccgtgcacggcggcgccgcgctcgtgctcacgcccaaggtgcgcgcgaccggggcggggcggggccacaggaggggcggggacagccgctgaggggcgggactgggacagccagcgggggcggggcctagagggggcggggactgtcctgtgggtccgagtctgggacaaggtgggcccagatggtaggcagggcttagggctagattagaggcggggctgacttggagggggctggtctatagggtaagctgggcctttagggtcagaaagaggccagtcctcgatgatcagagtatagggaggacgtgggcccattcattgcaggtaagggtctgtagtaaaggcgagtcgagggaagggttaggggctgggaacgaaaagggactagccccaaatggcaaaatctgagggaggggtgggacctaggatcagcacaggaagaagtcagttgaaaaggaatgggcctgggcgcggtggctcacgcctgtaatcccagcgctttggaaagccgaggccggcggatcacttgaggtcacaggagtttgagaccagcctggccaacatggtgaaaccccgtctctactaaatatacaaaaattagccgggcgttgtggcgggcgcctgtaatcccaactactcgggagggtgaggcaagagaattgcttgaatccgggaggcggaggctgcggtgagccgagatcgtgccactgcactccagcctgggcgacacagtgagactctgtccaaaagaaaaagaaaaggaatggagttcagaaagaaaggggcgaagtctagtggagaggtggcagctaggaagtatcagaggtatcaggtaccaaggacagagtttggggaggcgttcggccggtagagcatagggtctagaagtcagccagggatggaggagccatcttctaagtggaagtcggaaaagaggaagagtcattagagagaggaggacgggcaaggggtagaaccaggaagcaaggaattgagatttggtgcgaggccagtcagggaaggagtgagtcagaaaagggggcggggctagccagttgggggcggggccagcgaggggcggggcctaagcactctaataaaggggtgggtctagggaggaagccggtcctgagagtagggtttgagaaggggcataccccgctgtgaggtgtggaaagcgagagtccagaggatgggcaggaggatgaaggcttatggtggaggccgacccagccaatgacagatcaaagccaggagcctgctgggaagggatggtagaggctggagctggccagagcctggagaaaggcctgactcccaagggcacagaaggggccagttgtagcggacctctggtagagaaggagagaattggaccaagcctgctctgtggattgagaatgggtcagctaggaggtggggcctgagaaggggcggggcctctccagaggtggggccagcgcaacccagaggtggagcttcattcaatctgcccattccctgctgtgcgggcctgtggctgtgtgactgcatcactgttgtatgcagaggctcgtagtcctctcctgtccagagcattctgggaaggacctctgtccaactttcttgttctccttggcatggtacttttcagagatttgtaggtagatgccctgggaggcgaacttatttcttaactgccacttccaaggcatactcaaaagacgtgatccctcgtgccttcattgctgctgagaagtgtggtcctctctgtttcattgtccgctgggcactgcggtcggctcagtgtacgcccatagcattctgggaaatgtagtccccgtgctgcccctggatggaagaaagaatgatct

SEQ ID NO: 37271 - DNA, 858 bp, Artificial sequence
  DNA replication origin
attagccgggcatggtggcgcatgcctgtaatcccagctactcaggaggctgaggcaggagtaatcgcttgaacctgggaggcggaggttgcagtgagccgagattgcagtgagccgagatcttgccactgcactccagcctgggggacagagtgagactgttctcaaaaaaaaaaaaaaaacaataaacaaaaagaactcattccctcaggacaactgcagtatcccctgtgcgcctagggagaaagcccacttgctgttctcattgcattacaggaagatttattgagagctgattctgtgccagggctgttttaattcctagggaatacagttctagagggggggggaaaaaaagagagggagacaaggtccctgccttatagagcttgcattttaatggtgagacagacaaaaccagtaacagtaaaatccggctgtcctggaggaaatcaacacaggatgttgtaatgactgaggatggagtttcaatagatggcagtcaggggaggcctccctgaggcggtgacacctgagctggaggtgtcaggtggaggtctggcatggaggaggtagggaaaagtgtccccaggagaggcaacaacaaaggacaaagcccttgaagcaggaaggagcttgatgtatttgaggaagagcaagaagggagtgtggctggagcccactgggggattggggtggcaggagatgaggtcagagaagcaacgggggccagttcacgcagggccttggggccacggtgaggactttggctttgattctgaggtagaatcactggaaggttttcaattgagaagggatgtgatccaattaatattttgaaacaatcactctggctgc

SEQ ID NO: 37272 - DNA, 898 bp, Artificial sequence
  DNA replication origin
tgatcggggaggtgagggggcggacgggaggcggggaatcttcggggcggagtcgagaggcgggcacagccgggcgtggtggctcacgcctgtaatcccagcactttgggaagccgaggcgggcgaattgcctgagctcaggggttcgagaccagtttgggcaaaacggtgaaaccccgtctctactaaaatgcaaaaaattagccgtgcgtggtggcgggcgcctgtaatcccagctactcgggaggctgaggcaggagaattgcttgaacccgggaggcggaggttgcagtaagcggagatcgcgccactgcactccagcctgggcacagagtgagactcagtctcaaaaaataataataaaaaaaaagaggtcggcaccctggggcaggggcgcggccaaattgaggaaacacctgattggggcctggggcggggtcgcgggagggacatgccttggaacagggggcggggtcaggaggtgtcaggggcggggtttggaggagggactttggagcagaggaggcggggctaggagggtgggactcctaggggaagggggcagggctgggaggagggactttggggcagtggaggcggggctaggagggtgggactcctaggggaagggggcggggctgggaggagggactttggtacagaggaggaggggccaggagggtgagaatctaggggaagagggtggggctgggaagatctggaccaaggccttgaggtcttgctgggagcagccgggtaggacgcgggctaccaattcccaatcttgttccccatttctcacctccgcccttccctgccccactcttcgtccccctcctcacccacctcgcaatccctcttggccccttccctcaccctgtcactggtctgctcccgg

SEQ ID NO: 37273 - DNA, 868 bp, Artificial sequence
  DNA replication origin
gaggaggggacacatgaatgggaggttgtctaatggacagggcagggtgttaactctagcagggacacctaggagacaaggaagagagggtgtcgctgattcaggcacctgcgagttcttttttttttttttttttgagacagagtcttgctctgtcacccaggctggagtgcagtggcacgatctcagctcactgcaacctccacctcctgggttcaagcaattctcctgcctcagcctactgagtagttgggactacaggcgcccaccacgacacccagctaattttgtatttttagtagagatggggtttcaccatgttggccaggctggtcttgaactcctgaccttaggtgatcctcccacctcggcctcccaaagtactgggattacaggcgtgaaccaccacacccagccacctgtgagttttgagtaaagcatgggtgcttgagagagtgatcaggacagaaaggagagtgtgacaaggctgagtggcagggactttgtcctgggggtgctagggagcctggggagggctgtaagcaggggaggggccaggtcctctctgtgctgtgtgggggataggctgtaggggacagacaggagctcaggaggctggggaaatggttggtgggaggagatgaggcctgagccctgttggccatgagaatggagaggagaggcccaagtagcatcaggggcaggagcgtggggctggatactgacaggctgtggccagcgagggagaaggagggaggaagggaggacggcaaatgaggtttgggcctgtgactgggtggatggtggggctcccatcatgaggagcgtgggagctggtctgggctcagcatgggacatgatgaatggc

SEQ ID NO: 37274 - DNA, 1654 bp, Artificial sequence
  DNA replication origin
ggggtccgagcgcggccaccgcgcgggcgccggcgggctctcgtcctcgaaggccaagcggcagagtggcggcccgacggcggtggccgcggcggcggggggcgcgggcggcgacgggaagccggggaaggcgccggcggggggctcggctggctccttgtcgcgtacgatggcgaaataggagggcggcggcttctgcgggggctgagcggccggcggggacagcgggcgcccggctgcgccccgcggtgccgcgcgcgcttcgcccaggccgaggcctaggccctgcggctcgatggggccgtagtagcggtggaagccgtcggccaggcccgcgccccccggcggccccgcgcccttggtccggcgccagcggtccactgaggcgcgctcgcggggcacgaaaggtgcgggcccgggagccggccgcggcgcggggtacgcggggctgggcaggggctgtggcggcggcgggggcttggcgggcggtggggcggcctcagcgctgcagcagctgtacatgccctgcgggtccggggacaggacgggggtcagcgcgagatgcccaggacgcctgcccgcctcccctcagtccctctctcctctccatttacccgcctgtgtttcccgctctcttccccactatccacatctcgacccacatctccttgtctctgctcggctttacctttgtccccgcccctgccatctccccctctctgcctccctctctgccccataccctggagaaggccagcaggaagtccatgcggtgggtgggccccaggcagtgccgcaggcgccagtacaccaggtgctcccaggcgaagaccagcagggacaggcccatggccaccaggagcatgtagaagacgcccgccatgttgtcgatgtccagcttgctgctcatcacctcgattttgtcattgtggcagatcccagagagccacagccgctccagcatctcgatctcatctagggaggggcggtcaaaagtcacctgctatgagtaccctctgaggacccttgtctgtgatgtgggaatgtaggcccttagccccttcctccctcagaccctggtgtccgggtctttgtccctttcttccccggaacccaggggcctcgccctccccctctccgctgtggaaatccctgtgtgcagccgcaccatcccccaggaactgcagcaacgccaggtcgatgggccgcttccagcgggagcccttgtgcagggcgatgccatagcctgtcgtggcgaagaccttgccggagccgatggtgacaagcttgcagccctcgtccttgcgggccatgtaattgagcactgcagcatcgtagatgaaggcgtccagcttcctggggggagggggaatggagggtagggtcagtcccacctagatgccctggccgccaggcctggaacctcctcacctgtaacctccaactgctccaaatcctaactggccctgagctcttgagcaaatcattgcacttctcagtgcctcagtttcaacatcagtaaaatgggcatggcagcagtatctcccttcagagttgttgcaaaagtatgttgtttaagagacagggtcttgctatgttgtccaggctggaccagaaatcctgggctcaagcgatcctcctatctcagcctccc

SEQ ID NO: 37275 - DNA, 1792 bp, Artificial sequence
  DNA replication origin
gcgctgttcctcgcggtagtggcaaggccttctgggagttgtagttctacgggaggcttgttttccccattgtccagtttgattccgagagcgttctttccagttaattaattattcatatatgcaaatttgctctttcactggcaaggagactgagtttctactccccgaggacccataaggccggtttcttttcctctctctgttgtgatggctttcatttgtttcaaaaatgctttcttgtagacaggatggatattatctgtaagttaggcggttcaatctaccctctaggggcagtcaattgcctaaccagacattcacatttcagctctggtcagcgagcacttaatcagaaagtccaccctctggaggcagctattacaagtgcttcgtctctctttatcgcccatcagcaccagcggtttggctaattgacataatgaaatgttagaaatagattctcattggtgagattaacagcattcaagataatgcggattggctgggatatgtcagacactctcctagcttgcatgaacaggatattgagaatgtagcaagccttggtacctatagccataggaaataaaaccatacctttgatcttaatatgttttgtctccgggatctatctcaccactctcttggggtctcttatctgccccagtaccctctcgactttcttttcagggtctcttcccacctcctctttcttggtctttgtctccccaggcacctcctttcagagtctctgttctctctctaattctgtctcctcttcccctgtgggacttttgtgtttctgtttcctccagagaatttgaggggggctaacagatacggagcttaggcttggactgaggaggcataaaaacatggtttattccaaacactgcaatgtggaataagagagtgggaagggaagttggtggagaagtgtggactcccagaccctcccctccgcaacccagccccagacccggctggagatctgggcagaggaggctttttggaggtctgctgggtcatcactgaagggtcgcaaataagggttggatttggagaggatgtgcttggtggcaagtggggtggtccggaggtgcggcagggtgggaagttttggcttcagggaggttgggttcatcgcggtgcaagggaaggcggggcttccgttggggacgtgtcctaggtcagagtagggaaaagcgaccgagggtggaagaggaggagggggtgtcacggtttgatgtcaagggtcacagtctggtcggggcacagtctggggttcgggtcacagtttggggtcaggggtcacagtctggagtcggatgaccattttaggagtcggatgtcacagtctgggtcaggggtttctgtgtggcggggccaaggtctggggtcacagtttggcgaacgcgtctcacagttttgagtcccaatggatgaaaggttaaaaacgggcttccccggaggcgcggctggggccggggagctgcacagtgatgtgggggccacggccccgggcgtggaggtgggacgcgggagtggcgtgaaccccccacctcccgccccatctggtgacgttaaaaagcccttgtcgggtttaaaaaaaagtccggtgggctccaaggcccccgccccctcgttctcaggctgggtgatagttgagggaccaaatcctctccggcttgcggttcctccagaaccagggggcgcaggacgctgctccaggcggggtccggccagttccactgctttccttcccaacccacgcgggtcctgtccactg

SEQ ID NO: 37276 - DNA, 827 bp, Artificial sequence
  DNA replication origin
gaaaatgcataaaatggggatggggtgagagttggaggcactgaacctgggggtggattctcctggcgctgagcctgtcactgatgggaagacaaggccttcttgaaggggacaagctgaggacagggatgctggggcaggggtggatgggggcgacgcagcagagcaggaggggatggctcagcggtgccttgcatggaggcacgtacctgttggggcggcccacccccatgccctccgctgggggctcctcggctagggctgaggggaagcctctgtgggtgctgaggggctgtagtctgtccttggtcccaggggccgtgtgacgggcacccgacctcggagtccacagatggatcagaggctggatggaggggggccgggggtggggctagctcagagccgcagagggggagccagggaggccagccaggcagagcggctgggccacagcccaggcaggctggacaggagacagcggcggaggagcgagacagcgactagggggcagggagactggcagtgggggacgggagactctgaaagagggggacacagagaagaaagaaagaaacgtgataaaggggagatggacggagggagaaatggggggtccagagttccctgagatgaagccttcataagctggtgggggtcagggatgaggcccctttcactaagccagagtgagttccagatggaaggacacttagagaaggcagaacgcggcggcacccagtgggcggaaggttgggttgcactggactcccagtggcctcccccagcctagcggcctgggggcagctggtgccaaattcctccccacc

SEQ ID NO: 37277 - DNA, 1230 bp, Artificial sequence
  DNA replication origin
tctcagaccccactgctcaccttggccgctcaggatgccgggaggtgaagatcatcaccccctttcacagttggggaacaggctcagggaacgccatgagctggccaggcccccgcagtgccagggggaatgctggttgggtcctaagcctttctttccttcccagagttctgccctcgaaatcctccagtcccacctcagccccgtgaggcagacccgttgtctacttcccaaagccaacgggaaccttcaccagggggccatctgcggccaacatggcccagctcccaggctggctgcgactcaggctcagggcacccccctcccctagcaaaagcagggcgggagggaaagggatcctccacctgacctgcgagagcagcttaatgtttccatataaaggagatacagggcttaaggtgcttcaacttcgtgtcaaagtcactgtctaatctgaggccaagaagccccgcccccaggccccaccctcaccctcccaaatcaacactctcactcttccgaaaccaggggtgttccccaccactccccacctactggtgggggctggacagcaggttggaaagcagagactacagaaagacaaagagatgcagagataggcaggaggaggggtgttgagagggtgccccaagaaaaagtacagggaccaagcaggacagggaccctgagagagagggggacagagacccagagagggcagcaggaaagggacattgatccagagagaaagggacagagaccttgagagaggacagagacccagagagaggggaacagagaccttgagaggatagagactcagagacagagggggacagagacccagagagagggggggacagagacctagatggagggggacagagaagatagaggcggacagggcaattgggaaaacgaaaaggagaaaagaaatgttttaagaaatggcgacatggggagatgaaattgtgaagacagagagaggcagagagagatgggagagacagagatgggggagagagacagagacagagacagacagactgagagggtttctctgaaaggatggaagccagtgagaaaatgcataaaatggggatggggtgagagttggaggcactgaacctgggggtggattctcctggcgctgagcctgtcactgatgggaagacaaggccttcttgaaggggacaagctgaggacagggatgctggggcaggggtggat

SEQ ID NO: 37278 - DNA, 2207 bp, Artificial sequence
  DNA replication origin
tcctcctggcagcagctcagagcaagttcattctcataacaaaatgcagtcagagagccggggaaactagacttgaggctgtgggaagcctgctctgcccgttcatccagctccttagcactgcagaccggtgtccctgggacctcataagtgcgatggaagtggcgatagtcgacctcatactgggagccacgctggaagagaactggctcaaaacgatggccccagagcagttcaccagggaggtaggacgagcgacactgtgtggtcatggctgtggcctcaaccatcccctcgagaatgaccaccagctcaaagtcagccctggccagctcggcacgtcctagctcatacagaggactggcagagtcgatctcatggacgatggtgatgggggacacgaggaagatacgatcggtgcctccatcaaagcccacatccacatcctggtggtccagcgggatgtactcaccctctggggtcacacggggctgcagcaggaggcgaggagccaaagacagcagggagcacagagacgggcagagacgaagtgagagagaggaagagatgcagagaaagaaggcaaagaccacaggagtgaagaaaagggtgagaacacagatcaagagatggggccggcaacccagagagagaggaagtcagagaggcaggggagggcacagaaacccagtaagggagccagagacccaggaggggaggatggaggtccagagaaaacatgggacatgggacagagacccagagataaagagagaggaaagagactcagggtttgggggtagaaaacgggaagaggggcgtggtgggggaagaggagagagggacagagtgatattggcatagagacacagaaatcagcaagacagagatgaaatcaaagcgacaacggaaaataaggatgacattcaacagagaattggagaaggagcgggagagaaaaatggcttttagtatgtggccagagaaagataaatcagatgacaagaagggggagttagggcaacctaggtccaacattctgcacccaccactgcctcaggcttatccctgggctctcccctgagctatcctagctgtcagggcaactgcaaacccttccatgtcattctgtgtgtgagcacgctttgtgggggtgtgggtatttcacccccgcctacccgctggttccatagccacctcccaggccaagtcactgccccaccgacttctgcaagagccagtgtccctcctattcatgaatcctggtatctcaaagcttcaggcaggagattgaagtgggaggtgggcatctatcctcctcttgtaagtgtctctggaagccccaagtagaggaaccccagaggcggctgggagttgcagctcccaccacccccgatcctctccaagtccagcctcagcccagagtcctaaagtcactttacttgggccacggcagctgccggcccagagtttcttgggaacggagatgtttgagcaatttgaccacaattctaggaacgctaaggccccttcctcagggcagggagggagccagtaccccaggggccaatgggaggtgcagtttcgtttcgttgccacctccaccctgctctcagaggttaggaggctggtgggacacaatgggccactgaggtggggaatgaattctcccacagatgccgcaggaccccacacctagaggcctggagaactgtgctccacagcgatgagctgcacccattccagggcctgcttctcccgggggcctcaagtcacaggcctccgactgtgccacagtgtccagtgggaattgtacacccgagtaatagaacggtcacgcaggccctccaccaccccctcgcaaagctgcatctgaggccaccccatctttggacaggtcccttgacccagaggcttctgggaattacggcccagagccttgacaggccaggcgtggcccttttggggtctacccacaggcgggcaatcctcaagccacaggaagctctgtatgccccaaatccaggcctccaggaagagctggtcacatacctttctgttgggtttacatccccagctgcccagtgacccattcgcaggccccaggcccaagaggctgctgggagttgtagtccacgccccctccaggaccgcacgcccctcgccctcgggcctacatctcccacaatcccccagggctcacggaa

SEQ ID NO: 37279 - DNA, 1121 bp, Artificial sequence
  DNA replication origin
ttcccgttttctacccccaaaccctgagtctctttcctctctctttatctctgggtctctgtcccatgtcccatgttttctctggacctccatcctcccctcctgggtctctggctcccttactgggtttctgtgccctcccctgcctctctgacttcctctctctctgggttgccggccccatctcttgatctgtgttctcacccttttcttcactcctgtggtctttgccttctttctctgcatctcttcctctctctcacttcgtctctgcccgtctctgtgctccctgctgtctttggctcctcgcctcctgctgcagccccgtgtgaccccagagggtgagtacatcccgctggaccaccaggatgtggatgtgggctttgatggaggcaccgatcgtatcttcctcgtgtcccccatcaccatcgtccatgagatcgactctgccagtcctctgtatgagctaggacgtgccgagctggccagggctgactttgagctggtggtcattctcgaggggatggttgaggccacagccatgaccacacagtgtcgctcgtcctacctccctggtgaactgctctggggccatcgttttgagccagttctcttccagcgtggctcccagtatgaggtcgactatcgccacttccatcgcacttatgaggtcccagggacaccggtctgcagtgctaaggagctggatgaacgggcagagcaggcttcccacagcctcaagtctagtttccccggctctctgactgcattttgttatgagaatgaacttgctctgagctgctgccaggaggaagatgaggacgatgagactgaggaagggaatggggtggaaacagaagatggggctgctagcccccgagttctcacaccaaccctggcgctgaccctgcctccatgatgcaaactgatgtccccttccccgtgtatgcccccttccccaaggtagcaagatggagggatggggctctctcctgggatgggggcaggtgttcctgaataccgacaggcctgctgggtaaatgactaggtggtaaggttctgccatgcctggtgacccaccatggacatactggaccttaattcctctgcttctgtgctcc

SEQ ID NO: 37280 - DNA, 773 bp, Artificial sequence
  DNA replication origin
tgaccacattccgttacaaataatgggacatagaggctggggaaggggaaggggaaggggcctcagaggagggaggagtttaagaagggcaagggtggctgggcacggtggctcacgcctatgggcacggtggctcacgcctagcactttgggaggctgaggcgggtggatcacctgaggtcaggagtttgagaccagcctggccaacatggcgaaaccccgtctctactaaaaatacaaaaattagccgggcatggtggtgggcgcctataatcccagctccttgggaggctgaggtaggagtatcgcgtcaaccttgtgggtggaggttgcagtgagctgagatcatgccagttcattccagactgggcaaaagagcaaaactctgtctcaaaaaaaaaaaaaaaaaaaaaaagggcaagagtatgagaggacaagggggaccgtgacgtgaggggagccagagaggaaaaaaggcctctgagatgggagaaggaatcagagaggtgggaggatgctgaggaaaggggagttgtcttagcaggaggatgcttggggaagggaggagtcttaggaggatgctaagctaaaggaaggagtttggagaaatgagggaggagtctgagcggcagaaggtgccaggaaggccgagcctgtgctttcactaaatttcaccttcccctgttccattccccatgaccgataccaaatagcatagcatttagaaaaaagtaaatcttggccaggcgcggtggctcacgcctgtaacccca

SEQ ID NO: 37281 - DNA, 963 bp, Artificial sequence
  DNA replication origin
agtcttttcagcgctgaggactggcgctgaggaggcggcggtggctcccggggcgtttgagcgggctcacccgagcccgcgggccaacgcggatccaggcccgactggcgggaccgccccggattccccgcgggccttcctagccgccatggaggacggcgtctatggtaggtcggggaggggcggggtcggctgggagttgctggagcgttttctcctgaacgttccgccgcgaacgtttccccctggcgcgcggcgcccagaagcgttcggctcagtcgtagacttgtcgcgccgcttttgttgggcgctggacgggcttccggcggggcccgaaagccgggcgttccaggccattgtttgggctgagcctgtttccggtggcggcgggaggggcgggatggagtggtggaggcgaggccggggcggaaccattcccgctggaggggcgggcgagcccagcgcctgccggggccggggaggggcgcttgggttgcggggaggggagaaatcttggggggcgggggccttcgatgtcccgccccaccttcccaactctcctgagctgtcatcagttcccccggctgtagtgacttttcatggacccagtagtccggataaccaggtccccagctacctcgccagtaatggagtcagaaaaccaaggcctcagtccccttccaagtaatggacctagaagccgaggcccccagccctttcttccctcagatctaagagctcaggcacccattccccttctccctcagactcaggaatccgggccccaattccccttgtcccccaggactcaagagtttagagccccagctctttctcctctgcagggaggaatccaggcccccagcccattcttctgtgcagacataggaagccccttacacatcctctcccagctctgtccgcccccagattgcaggaattcaggctcacggcccctagcac

SEQ ID NO: 37282 - DNA, 750 bp, Artificial sequence
  DNA replication origin
cagtagtccggataaccaggtccccagctacctcgccagtaatggagtcagaaaaccaaggcctcagtccccttccaagtaatggacctagaagccgaggcccccagccctttcttccctcagatctaagagctcaggcacccattccccttctccctcagactcaggaatccgggccccaattccccttgtcccccaggactcaagagtttagagccccagctctttctcctctgcagggaggaatccaggcccccagcccattcttctgtgcagacataggaagccccttacacatcctctcccagctctgtccgcccccagattgcaggaattcaggctcacggcccctagcactgacttttaaaccttgaccccgatccctagaacccccagacctgactccggaggagcggatggagctggagaacatccggcggcggaagcaggagctgctggtggagattcagcgcctgcgggaggagctcagtgaagccatgagcgaggtggaggggctggaggccaatgagggcaggtgagggctggggcggatgacctagggggcgtggggttggctgaggccagggatgcccaggcattgaccctccacccccaaccctgctctctgctcctgcagtaagaccttgcaacggaaccggaagatggcaatgggcaggaagaagttcaacatggaccccaagaaggtgcttggggccacaggactgggatcagctgggcaaacatccaggc

SEQ ID NO: 37283 - DNA, 910 bp, Artificial sequence
  DNA replication origin
tcggcaggctgtgcggcgccaaagccacggtgacccagacccgaggtttttccgggcgtcgcagtttcccgagactccgtggcggcgtttgtcttctttttcttagtcagatcccgtacttttgtggagggtagaggaggctttgaccgccgcggccccgggggctggtgggaaatggagttccaaatgagaaaatagaattccccacttctctttcccacaggtgccagggaaacggagtcatcgacccaagaaggtcgtgggagatgaggtcccagggtaaacagcgggtcccgccactatgtcaccctttcctgccgcctccccggatgaactgcatgcagggcggccggctccgtggcaggcagaggcaggaagaggcgcggagcccgctggtggcgaagaggggagtgcggcgggaggggagggcagaggcaggcggccggtcgcgtggggcctgggccgccccaggagggcctctggctggattcttagcagatggaagccgtgcaagggcaggaggcaggggcctgacgtgtttggattgaggttgcaggaggggcccctggctgcttcagggagaataatttggaggcgagcggggaggtgagaggaagctgtgcggtgcaggatggcgtggctgtggaggtggagaacgttgggccacgctaggagtcttgaaagaggagccaaaaggacttgctgagagccgccgcagctggtgaatgacggtgccatgactgaggtggtcgaaagggagtatttaaggggaaatcaggcattccgttttgaccaaattaagctggagatgcctgtggaacattccagccaggctgcatcacgtcacactgaccttcagcattgcccacagtccatcttcccccaggacctgaggattttgcgtccggct

SEQ ID NO: 37284 - DNA, 1778 bp, Artificial sequence
  DNA replication origin
gggaaggtgagagctggactttctgggtctgagggaggaagggctggtgactgggggcaggacttctgggtctgagggaggagggggctgggcctgaactcctggatctgagggaggaggggctgggggcctggactcctgggccttagggaggaaagaccagggcctagactcctgggtctgagggaggaggggctgggggcctggactcctgggtctcagggaggaggggctgggggcctggactcccgggtgtgagggaggaggggctgaagcctggactcccgggtctgagggaggaggggctgggggcctggactcccgggtctgagggaggaggggctgggggcctggactcccgggtctgagggaggaggggctgggggcctggactcccgggtctgagggaggaggggctgggggcctggactcccgggtctgagggaggaggggctgggggcctggactcccgggtctgagggaggaggggatgggggcctggactcccgggtctgagggaggaggggatgggggcctggactcccgggtctgagggaggaggggatgggggtctggactcctgggtctcaaggaggaggagatgggggcctggactcctgggtctgagggaggaggggatgggggcctggactcctgggtctgagggaggaggggatgggggtctggactcctgggtctcagggaggaggagatgggggcctggactcctgggtctgagggaggaggggatgggggcctggactcctgggtctgagggaggaagggctggggcctggacttctgggtctgagggaggaggggccggggtccccaactcctgggtctgagggaagaaggggctgggcctggactcctgggtctgagggaggagtggttagttatctagggctgacataacaaagtacctcaaaattagtggcttaaatcacaaaaactgaaggtctcccagtgctggaggtcagaagtctgagatgagggtgtcagccctggctgctcctgaggctgtgagggaggatgagtccccggtctctggcttctgagggtgtgccggcagctttggttttcctcggtttgtagaggcgtcaccccaatctctgccttcacctccacatggtgtcatttctgtgtgtctgggtctctgtacaaacttttataagacacacatcctattggattagggcccacatgaatgacctcatctgaactaattatatctgcaatgaccttatttcctaatcagatcacattctgagatgctgggggttaggattttaatataaagttttttgtgggggtgggggagacacaatttgatccgtgctgagtccattttgtgttgctctgacagaagacctgaggctgggtctttataaaggaagaggttgatttggctcagattctgatggctggaaggttcaagactgggcaggtgcactcactgaggacctccctcatccctgaggctgctgctgcttctgggggagggcagaaggatgcagctgtgtgcacagagatcacatggtgctgaaggaagcaagggagagaaaaccaaattcccaaattcccaagggtgagcactcactcaccccttaaggcaggcattaatctatccatgaggactccacctccaagaccacacagctccttatgaggccccacatcccaacacctgccacactggggctcgaatctcaacatgaattttagtgaggacaaacgatatccaaaccattgccacccaaaagaagtgggctgag

SEQ ID NO: 37285 - DNA, 764 bp, Artificial sequence
  DNA replication origin
gcacaggccccgtgttcctccaaaaagttgtttttgtcttttttaaataatgtgaaaatgccacgcgaaggtttgaaccagaggcccctccaggggccgggctggggagggaaaggggagacgcgaaatggggggtccgggtccccgaagcctgcggcccctgtcttgggccaggagtgggtgaggagggacctccgctgtgtcgaggggctccaggcccaaaagagttcagttcagttccgagaaaggcggctctctatggaggggcggggggattcctgcctcatttggctccgagggggtcaggggggtcaggggagccatctggggggctggggggcgggggcccggggcctcccgtttggcacatggtaggggagtgggagggggagggcccagcctcgggggcctccccagaggcggcgtctgcggtggtggcagtggcgccgtcatccacagaggattccattctcaacccctcttctgagggtgcagcggggtcgggtcttcggggaatcaattctccacggggcctgaggatggacagaggagacagagaaatgaaattactagggggacagcctcatggcttctaggtcactcagcggaaaagcaaagccctcacccaccatggcccaaaagatctgctctgttccctctctgtcctcacctacccctcttctcccctctgctccagccactgggcctcctgctgttcctccagtgctcccagcacggtccgacccctgggtctttgcacatgc

SEQ ID NO: 37286 - DNA, 928 bp, Artificial sequence
  DNA replication origin
acaaggtcaggagttcgagaccagcttggccaatatggtgaaaccccatctctcctaaaaatacaaaaattagctgggtgtggtggcacacctctgtaatctcagctacttgggaggctgaggcaggagaattgcttgaacctgggaggtggaggttgcattgagccaagatcgtgccactgtactccagcctgggcgacagaataagactctgtcttaaaaaaaaaaaaaaaaaaaaatagccgggtgtggtggcaggcacctgcaatcccagctactcaggaagctgaagcaggagaattgcttgaatccaggaggcgaaggtttcagcaagtcaagattgcgccactgcatgccagcctgggcaacagagtgagactccatctcaaaacaaacaagcaaaacccccccaaaaaacaaacaaggacaggttcggccgggctcagtggctcacgcctgtaatcctagcactttgggaggctgaggtgggtggatcacgaggttgggagattgagaccatcctggctaacacagtaaaaacccgtctctactaaaactacaaaaaattagccgggcgtagtcgtgggcacctgtagtcccagctactcgggaagctgaggcaggagaatggcgtgaacccaggaggcagagtttgcagtgagctgagatcatgccactgcactccagtctgggcaacagagcaagactccatctcaaaacaaagcagcaacaacaacaacaaaaccaaggacagggtcatcccagagtgacaaatgcaaaccagtcagagggaaatgagtgagaaagatgagcgtgcaggggtgactgcttgattcagtatggttggggaaggactctgtggaggggacgttgcaggtggggcctgagtcacgtaggaagaatgttccaaaaggccgggcgcggtggc

SEQ ID NO: 37287 - DNA, 820 bp, Artificial sequence
  DNA replication origin
ctttgttttccccttagaagtgtcatttaaggccaggcacagtggcttacgcctgtaagcccagcactttgggaggccaaggcaggcagatcacctgaggtcaggagttcaagaccagcctgaccaacatggagaaaccctgtctctactaaaagtacaaaattagttgggtatggtggcgcatgcctgtaatcccagctacttgggagggtgaggcaggagaatcgcttaaacctgggaggtggaggttgcggtgagccgagatcaagccattgcactccagcctgggcaacaagagcaaaactccatctcaaaaaaaaaaaaaaaaaagtgtaatttaactgggaactggaagggttggttgtcattaactaggtgaaggggaaggggatggcgtgctggcagaggggacagcttgcacacagggcctgaggcaggagagagcttggcccgctcaaggaacagaaggacactggtgtggcttcagggttacttagagtgcatggagggctgaggagagatggcagggggtgcactgaggagctgggactttgtcctgggggtgccagggagccacggacgactataagcaagggagggaagtcaatgttgggtgtaggaagactgctctggggtctcttgggggcagaagggcaagagtgggagctgggaggctggggaaaggctgaggagaggatagtgagccagggctgtgggaatggagaggttggacagggcagagagtcaagggcaggtgggacaggtctgggggctgactcttccttcacttggctgcatcctcaggcttcactctgaatgt

SEQ ID NO: 37288 - DNA, 978 bp, Artificial sequence
  DNA replication origin
gaaagaaacctgaccaatgttcactactggagagggcacagactcagaggccgcgcaactgtgggtttgaatcccagctcctcacttctctccgtgcctcagtgttctcttttgtaaaattgggaccagactggccaggcccggtggctcacgcctgtaatcccagcactttgggaggccgaggtgggtggatcattccaggtcaggagttggagaccagcctggccaacatggtgaaaccctgtctgtagtaaaaatacaaaaaaagtagctgggcgtggtggtgcactcctgtgaacccagctacttgggcggctgagacacgagaatcgtttgaacccaggaggcagaggttgcactgagcgtagattccaccactccctccagcctgggcgacagagcgagactccgtctcaaaaaaaaaaaaaaaaaaaaaaaaatgaggacgaggctagaatccaccccatgggatcgcaatgaacattaaatgggttaaactgtggtgaggcactgcagggtccacgcgagagcagcggtgccgctgtgactgctctctaacccccagctgtgtcctccctgctctggttcacaccaaccggctttgagcactctgggtttctctctccttgtctgcccctgagcaccgtgttccccaaacggaggtgggatcaggatccggcaagtgccaggccggagtctgagcccagagatgggacaaagatgggcaagagtcgggggtgggggtaatccccacagaaggtaaaactgaggctcgggggttggggacggccggcctgcctgcctacgaccgtctgatggacgtcgcctggtctgagctggttccagagctgggtggggtgtctgttgactgagaggggagagagaagagactgggaagagagaggcagggacattgaaagatggtcacaagaagttggcagtggaacatagggggacagagatgggcagaggaggggg

SEQ ID NO: 37289 - DNA, 2805 bp, Artificial sequence
  DNA replication origin
gacctttcccaccctgcctggagaagccctggtgcagcccttccgttcacaaagtgggtgctgaggcccagattgtgcgggggtcttatctgaggccacacagctaggtgggagggcctgcctcagtttcaccgggacaggggctcaccaggtctctcccctcgcagccaggctctcccggctctcgctggcgctgccgccgctcacgctcacgccattcccggggccgggcccgcggcggcccccgtgggagggcgcggacgccggggcggctggcggggaggccggcggggcgggagcgccggggccggcggaggaggacggggaggacgaggacgaggacgaggaggaggacgaggaggcggcggcgccgggcgcggcggcggggccgcggggccccgggagggcgcgagcagccccggtgcccgtcgtggtgagcagcgccgacgcggacgcggcccgcccgctgcgggggctgctcaagtctccgcgcggggccgacgagccagaggacagcgagctggagaggaagcgcaagatggtctccttccacggggacgtgaccgtctacctcttcgaccaggtgcggaacccgagagggcgcggtttcggggtcgcggcctggagggagcaggagcctagagccgggaagggcctggcgggaggccgagcttagagttgggcggggcctggagggaggcggagctggagtggggcggggcctgaagggaggccgagctagggtggggcggggcctggagggaggccgagttagagtggggcgtggcctgaagggaggccgagctggagtgatgcggggcctggagggagggcaagctgaattggggtgggacctaaggggagccccaatctagagtggggcggggcctggggcggggccgagctagagtggggcggggcccagggagagggcgggctggggggcggagcccagggcggggcctggagggaggtcgagcctagaggtgcagggcctggggcggggcctagacgaaggctgagcttagggtggggcggggtctacagcagggtttgaaggcaggctgagcctagagcgggggcggggcctggaaggagaccgcgcctaggatcgggacagagtctggatccgggcctgagggaggccaagtctgtggcgcggcaagaggaggcctggagaaaatccaaggctggaatgggggcggagcctagggcggggcggatggagcagggcgcgggaagggcctgaggggtgaaggcggggtctggggagagactggtcagggaaatggggcgggactaggaagatgggaggaggctttgagtgtgagggcagggcctggcaatggggcagggccaggagtatgggccgagcctagagctggggcgggacctagggtgagggcagggcttgtgacgggggcgtggtctagagggcgaggagaggtctggagagagagtgtgggtctggaaggaaagagggggtactgggtagtcaagtatgggatcctggagaggctagggaggaagtgttgagaagaggcctggatggtgaaggggcctagtgagagtttgggcatggtttgttgactagagttctagtgtctgtaggctggttcgggttggagcagatcttacccactagggaagggccatggctaggctgcaggtgggcttcagagatggagcaggcagtcttaacgtattctggggtgaggtcagggatgagcgaacctaacgactgggacgggtctttagagagatgggttgaggaatgtgttaagagttaggcctgtcccgggtggctcacgcctgtaatcccagcactttgggaggccgaggcgggaggatcacttgaggtcaagagttcgagaccagcctagccaaaatggcgagacctcgtctcttaaaaagaaaaaaattatcttggtgtggtggtgcgcatctgtagtcccagctacttaggaggctcaggtgggaggatcgcttgagcccaggaggttgaggctgcattgagccatgatcacaacactgctctccagcctgggcgacagtgagactctgtctaaaacaaaaagaaaaacacaggatatggtgttgaagagaaaaagggagggcgagtggtgctgaggaactgggaccttgtctagatgaacctggggcgggcatactgggctgagattatgaaaggaatggaaacaaggccaagaactggggcctgggccactgaaatgttttcagaggggtgggacttggagggcgggagcaggtctacttctgagggagggctcaggggcagggtcacagcatccagcacggcatgcgctcaggatggggcaggggttgggagggccactggagcaggtcaagatctcagaggtgggtgggactgacgtggacggggtggggcttatggagatcgctttgggttaggggatccggtggaggcctcacgttaatgagccaggagagaatccctgcgttgggctacttagctgtgcgcggggctccgctgtcaggaaaggagcctctggccaggttgaggttaaggctggcccaaggcttcgaagccagattaggggctccagccacctctccagagcgtgcgagtcagtgattacaaattgggattcctagagccccagaaatattagccggttttgttgcttttgggggatgcggtaaatgggacgtgaaggtttgtcccctctggcttccccctaatctgccttcacaggagacgccaaccaacgagctgagcgtccaggccccccccgagggggacacggacccgtcaacgcctcc

SEQ ID NO: 37290 - DNA, 1242 bp, Artificial sequence
  DNA replication origin
agaggccaccagagactgggccttggagagccccagggccctgggagaagacgcccgagagttggggtccagcccccacgatcggggagccagccccagagacctctctggagagagcccctgcacccagcgcagtggtctcctcccggaacggcggggagacagcccctggcccccttggcccagcccccaagaacgggacgctggaacccgggaccgagaggagagcccccgagactgggggggcgccgagagccccaggggctgggaggctggacctcgggagtgggggccgagccccagtgggcacggggacggcccccggcggcggccccggaagcggcgtggacgcaaaggccggatgggtagacaacacgaggccgcagccaccgccgccaccgctgccaccgccaccggaggcacagccgaggaggctggagccagcgcccccgagagccaggccggaggtggcccccgagggagagcccggggccccagacagcagggccggcggagacacggcactcagcggagacggggacccccccaagcccgagaggaagggccccgagatgccacgactattcttggacttgggaccccctcaggggaacagcgagcagatcaaaggtgaggaggctgcggggcacagtcagggctgaggtccggctgtttccgaggcgtgcggagggtgagtgtgggtaaacatgtcgggtcgggctggcagtgatgaatgcaggtcctgaagcctgcaccacctgggctcacatcgtggctcagccccctctctagctctttggccttgggcaaatgtccttgctgcacggtgcctcagtttacccatctgccaaaaacggatggcagggatagaacctacgtcatagggttgctgtgaaggttaaatgaattaggacatccaaggcacttaatcagagcaagggattcagtaagcacctgcttttattattgcaactcacttagaccaggggtctcaaactcatgcccacaggggccagacgacatagggaaacggatgaagcatgctagggaggcagagtggggcttcagaagaaaatgccctgtgtagaaggggcagccacttctcaggaatgtgcacctggtgttggcgaatctgctacttttcccttttaaactagagctctggtttttatttcttttgtttttatggttgcagccagttcaaaggaagcctgtctgtggatggctcaagggccccaggct

SEQ ID NO: 37291 - DNA, 1086 bp, Artificial sequence
  DNA replication origin
gaggacgactcctcgctgcgggcagagcggggctccctggccgacttgcccatggccccccccgcctcggccccccccgagtttctggaccccctcatgggggcggcggcgccccagtaccccgggcgggggccacctcccgctcccccccccccgccgccacctcctcgggcccccgcggacccggccgcgtcccccgaccccccttcggccgtggccagtcccggttcaggcctctcgtcgccgggccccaagccgggggacagcggctacgagaccgagacccctttttccccagagggagccttcccaggtgggggggcggccgaggaggaaggggtccctcggccgcgggctccccccgagccacccgacccaggagcgccccggccacctccagacccgggtccgctcccactcccggggccccgggagaagccgaccttcgtggttcaagtgagcacggaacagctgctgatgtccctgcgggaggatgtgacaaggaacctcctgggggagaagggggcgacagcccgggagacaggacccaggaaggcggggagaggccccgggaacagagagaaagtcccgggcctgaacagggacccgacagtcctgggcaacgggaaacaagccccaagcctgagcctcccagtgaacggggtgacagtgctggagaacggggaccagagagccccaggcatcgaggagaaggcggcggagaatggggccctggggtcccccgagagagaagagaaagtgctggagaatggggagctgacacccccaaggagggaggagaaagcgctggagaatggggagctgaggtccccagaggccggggagaaggtgctggtgaatgggggcctgacacccccaaagagcgaggacaaggtgtcagagaatgggggcctgagattccccaggaacacggagaggccaccagagactgggccttggagagccccagggccctgggagaagacgcccgagagttggggtccagcccccacgatcggggagccagccccagagacctctctggagagagcccctgcacccagcgcagtggtctcctcccggaac

SEQ ID NO: 37292 - DNA, 909 bp, Artificial sequence
  DNA replication origin
ggaagggccggggcgcagggaagaggggggaggcccaggtctcggacaccagctgggggacctcggagggggcctggggggcctgaggggcgggcactcctgggtccagggggtcccagtcgttggggaagaggggctcaggaggggagccgtgctcctccaagcggatgtagtactcgctgctcacggaggggctgcgggcgctgatgacaggcagcacgctgggcgtggacagcgcctcgtagaaagggttggaggggttggcgtggggggccgggggggccgacgccggctgccaggcaggtgcccccccaccccggccggccccacgccgggccttctcccacaggcactcgaggttgaggccgcggctactctcggtgaccgtgagcacatcgtcggggtcggctccagggaagccatccagtagggggaacggtgaggagagggtccccgggcggggcgcactgtgtgcagggggccagggccaggggaagggaccgtctcggggtgggggtggcggcggtgggggccggggaggccgctcggagagcaagtaggtgagctgcaattggagatcagaggctgaagggcgctgggcaggtggccgccagcaggactgaagaatgtcatacctggggagaggtggggcagagtgagcagggcagagacccagggaggggaaagagacccagggaggggacagacaaccagagagagggggacagagacccagagggtaacagagacccagagagagggggacagagacccagagagagggggacagagacccagagacagagggacagagatccagagacagagggacagagacccagagagagagggacagagatccaggcgtggtggctcacgcctgtaatcccagcactttgggaggctgag

SEQ ID NO: 37293 - DNA, 1154 bp, Artificial sequence
  DNA replication origin
gtaggtgagctgcaattggagatcagaggctgaagggcgctgggcaggtggccgccagcaggactgaagaatgtcatacctggggagaggtggggcagagtgagcagggcagagacccagggaggggaaagagacccagggaggggacagacaaccagagagagggggacagagacccagagggtaacagagacccagagagagggggacagagacccagagagagggggacagagacccagagacagagggacagagatccagagacagagggacagagacccagagagagagggacagagatccaggcgtggtggctcacgcctgtaatcccagcactttgggaggctgaggccggtggatcacctgaggtcaggagttcaagaccagcctggctaacatggtgaaaccccgtttctactaaaaatacaaaaaattagcctagcgtggtggcacctgcctgtaatcccagctacctgggaggctgaggcaggagaaccgcttgaacccgggaggcggaggttgcagtgagccaagatcgtgccatcgcactccagcctgggcaacaaaagcaaaaatctgccaaaaaaaaagaaagagagagagggacagagacccagagagagagggacagagacccagagagagggggacagagacctagagagagagggaaacatagacccaaaaagtggggcagagatccagggagaagaggggacagcagacggtagagattcagaggaggtaactgggctggggagctgggtattgagacccaaagaagcaggggtggggggaagatgcccatagagagaggctgacgggacctggaggcagaggggacacagcagcagatgggaacggctggtgagggtagtggtgtccctgtttgcgctgtgagctctggaatcagacaggtaagaagcagggacctcttagggtgaagtgggttcaaatcacagctctgccatcccctgcctgtgtccccctgcaagtagcagatgctggcagaaagggtggggacagcccctcttcactcttgaggggtatggagggcaaacgggatgtgggtgatgtgggaaacgaggggggatgctgggaccatcctgggtggggtgcggcaggccaggagccccgggtgggctagccct

SEQ ID NO: 37294 - DNA, 1497 bp, Artificial sequence
  DNA replication origin
tgtcaactggtgagggtcttggggggttggggaagggcagagggggcagctggacaaggccggggccaagcctggtgcccctgggcttcgtcgtcatcatcatcatcatcgtagatgatgtgtggcatgcgctaacatttcatgagtgctgcctgtcctgggggctggcctgaacaagcaggcaagatgggctgtgttattacctgctgcaagcagcagaggaaactaaggctcagaggggctacccagtgacagcagaagccattccagcctccgggccgactagctggagacctgagcggctggtggtgctgaccttctttgcctccctcccagggggacctgaagcgttacctccgagcccagcggccccccgagggcctgtcccctgagctaccccctcgagacctgcggacgctgcagaggatgggcctggagatcgcccgcgggctggcgcacctgcattcccacaactacgtgcacaggtgggcgggccggggagccgcgggaggagctactaaggggaagggggaaggaggtgaggcctcaggggaggggctagagggggggcggacccatgactggctgacacaaaatagggacgaaccgaggagggtatggaggagaaggggccaggagaggaggcgggaccaggaggggaatgagaggaaccaagtgagagggaggcggggtcaggtgatgaggggaagggccaggagaggaaaaggggtcaggagaggaggaggaggaaccaggggagggggaggggtcaggggaggaggaggaagaaccaggataaggggaggagccaggagagggggaggaggagccaggagagggggaggaggagccaggggaggggaggggccaggagagaaggaggaggagccaggataggggagggtccaggagagaaggaggagccaggagagggaagaggagccaggggaggggggcaggggagggggaggagtcaggagaggaggagggtccaggagaggaacggaaggagccaggtgagggggaagcagggtcacgtgatgaggagaggtggctgggagaggagggggaggagtcaacagagaagcaggagaagccagaagggtcagatgaataagaggaggagccagtgcagaggaaaaggagaggagacttggaggaaccaggggtggggagaagacaagacagcaggggagagtgaaagcagtcagaggggagagacagatcagagggaaggggcagagtcagtgtggcggggcagggtcatgggaggggtggagtcagtgtgaaagggcggggtcagggcgtggctggagggctgcccctgcgctcacctcctcgcgttcttcccgcagcgacctggccctgcgcaactgcctgctgacctctgacctgaccgtgcgcatcggagactacgggctggcccacagcaactacaaggtagggcttccttccgtcgggatgggggctgtggggtgccctgacccgcctgacacc

SEQ ID NO: 37295 - DNA, 1801 bp, Artificial sequence
  DNA replication origin
gtaaaggggagggtatccaacctggcattgggggggcagcaaagcttcccggggagatgatgttgaggcagaggcccggaggggccaagagaactctgatgagaggagggcgttctgcagagagagaaccgtaggtgcaggcagggtgcggtggttcacgcctgtaatcccagcactttgggaggctgaggcgggcgtatcaccggaggtctggagtttgagaccagcctggccaacatggtgaaaccctgtctctactaaaaatacaaaaattagccaggcttggtgtcgggcatctgtaatcccagctactcgggaggctgaggcaggagaatcgcttgaacccgggaggtggaggttgcagtgagctgagatcactccattgcactccagcctgagtgataagaatgaaactccctctcaaagaggaaggaagggagggagggagggaggaaggaaggaaggaagggagggaggaagcaaggaaggaaaaaaaagagagagagagagagagagaaaactgtaggtgcaaaggcccgggcctaagcaagggcctgcaggtttgggaaaacccacatgggataaagctgactcttgggccagccggaggagcaggaggaatcaaagagccggcgctctatcctggggtgctggggatcgacagagggctgtgtgtggtgaaaagcaggtgaggcaaagggaaggggagagactagagccagggaggctgggaggaggctgtggggacgaggaggagaagactgagaagagtctggggcaggaatgaaggtggaggtgaggtgtaaggaggaaggagaggtaaaggggtccctggggacctgctcccccaggagcaggccagtgagggccatccagagatggggacctggggaaggagtggggtgtggtcgaggagagagactccgaggtgaggaaactgagatcaaaaaggtagagtgggccgggtgcggtggttcacgcctgtaatcccagcactttgggagcctgaggagggtggatcacttgaggtcaggagttcgagaccagcctggccaacatggtgaaaccccatctttactaaaaatacaaaaattagccaggcgtggtggcgcatgcctgtaatcctggctactcaggaggctgaggcaggactcccgcctgggcgacagagcgagactccgtctcaaaacaaacaaacaaacaaaaacaacaaaaaagggtggaggcagcagtttggttctgctgggggttggggcaggatgaagaggaaggggctgccttcccaactcagccacctcctcactccacaggagcctgcagcaccccaatgtcctccagtgcctgggtctgtgcgtggagacgctgccgtttctgctgattatggagttctgtcaactggtgagggtcttggggggttggggaagggcagagggggcagctggacaaggccggggccaagcctggtgcccctgggcttcgtcgtcatcatcatcatcatcgtagatgatgtgtggcatgcgctaacatttcatgagtgctgcctgtcctgggggctggcctgaacaagcaggcaagatgggctgtgttattacctgctgcaagcagcagaggaaactaaggctcagaggggctacccagtgacagcagaagccattccagcctccgggccgactagctggagacctgagcggctggtggtgctgaccttctttgcctccctcccagggggacctgaagcgttacctccgagcccagcggccccccgagggcctgtcccctgagctaccccctcgagacctgc

SEQ ID NO: 37296 - DNA, 1714 bp, Artificial sequence
  DNA replication origin
tctccatcccttcatccgtctgtcccttcaaagagggggaggggggtacctgagccagcaagcagcccctccctccccctgtcctgcgtctcctgcccctctcctgggccgggaggaggccagggtcgcgcgggtccccatggctgggggctgagggcccgcccccccctcctccccagccgccaccacctccacctccctgccatcctcgacaagatgcctgcccccggcgccctcatcctccttgcggccgtctccgcctccggctgcctggcgtccccggcccaccccggtgagtctgtcgggccatcagtctgtccggtggcccccacccccgcggcggcctcgctgtctgcccaggggtctgtctgcgggtcctgccccgtcacctggtgcgcgtcttcccgcagcccagcagggcccggagcggcggggacggtgcctctgtcagcagggcctgtgggagggaggctgggggctgggtggggagggggctccgtttgggcaacatgtgtgtatgcgtgcacgcatgtgtttgtgctggtgtgtgcaggaagaaggggaaggacagggcctctgggagaattgggggcagaggacaggaatactatttctaagggggacacaacacgggaggctgtctctggcttctggagagacccagggcttgcggagttcccttctctgggtcttgggctggggatagagaacatcggtgtgcgccaagcgtccctaaaagagacagatctcaaccccacaaactggggggttccagcatggggcaagaatcttctcccagcctgcagctgagagctagtcctcctccccaacgaggggtaatgaggctgtccacgggagcgtattttaaattctgcaagctccagacttcactatcactcctctttccttcaaccctcattggaattcatccaagcctggggtgaggggatggggtgggatgaggtggcgggggtcccagtttgggacgagaagagagaccccacccccaatccaaccacttgggaaggccccaaactacaactcccacaatgccttgggccactctgcacctctgccaagggaccctggtcgcagagcatcacgggagttgtagtccaagacgtgccgggacgggagggggcatgattccggtatccagggacttgaagctgggaccccagcccagccctgtgcccacagatggattcgccctgggccgggctcctctggctcctccctacgctgtggtcctcatttcctgctccggcctgctggccttcatcttcctcctcctcacctgtctgtgctgcaaacggggcgatgtcggcttcaaggtgaggtgcatgaggggattcaacttggggaggaagactccagcaaggcctttaccccctacacaggtggttggtggggagaagggggcagtaaatccgagagcaccttccagcttgaagctatggcaagatctggagccttgggatggggaaatgggggatggaaattgggctgggactgggagacagttacaaaaatgaaggggagacaaacttaagagaaagacgatggcgtgtctctcagccctgcgttctcccacccctcttctcctctcctggccccaggaatttgagaaccctgaaggggaggactgctccggggagtacactccccctgcggaggagacctcctcctcacagtcgctgcctgatgtctacat

SEQ ID NO: 37297 - DNA, 1769 bp, Artificial sequence
  DNA replication origin
gggtgcgcagctccggcccagcctcacccaggggaacgcctcgcaggtgctcacggacgatggagaggtccgcgcccagggtgggagtccgcgcttccgggtgtgtctgcagctcggggcgctggagggtgggatgtgaccccgagacggcggcggcctggcacgtgatgtatgtgtgtccttgtctgatgtgtcggtgtccccgatggaccgggttccagtcccagctttgccactccccggcttgtgtgccttggggcaggtgactaccccgcgctgtgcctcagttgcctcatctgtacaatgggcatgattaaaaaatacctgtctcagagggcggttgtgaggattgagaggtaattctgtacgtgtaaaacgctgcggacgatacctggcacagactaaatactcataagaataaatacattaaataaactatgatcatgtatcttttgtatgaggcaagtgctgtggttgtgtaatgtctgcgtaaccgcacgggaaacgtgggtatttgcgacccgtgtgtctgtgcgcgtgtctgtgtctgtgttgtgggtgtgtgactctttgtatgtgttatgtgtgccagtgtgtgtttatgtatgtgatgtgtgactgtggtggggttctgtgtctttgtaaccttgtgtgaaaggtgtgtgtatttgtgatgtgtgtgtccatgtctgtttaggtatgtgatgtgtgcaactctgtgtgtctgtgtatttgatctgtgtgcctatgtctgtgcttatgtatgtgtgactgtgtatatgtgcatgttatatgtgtctgtatgtatcagtgtgtggtgtatttatgtgtatttttgcatgtgatttatgtagccctgtatgtatgagttgtgtgtgcccgcatgcatgtgtatgtagtgtgtctgtgtgtatccatgtgagtgaagcttgtgtccgtgtgagtgatgcatgttacgtgtccgtatacatgcatgtattatgtttctgtgtactcatgtatgtgatgtgcctgtctctgtgtagctgctgtgtccgtgtctatgttagttcatgtgatgtgtgtgtctgcgtgtgtctgtgcaattgctgtctgtgcatgtctgtgtgacgtgcatgtatgtgatacttgtgtctgtgggtattctttgttgcccatttgtctagggactgtctgcgtggctgtgactatgagtgtcagcatgtcacagtggtgtccgtggggatctttgtctgtggcgtgtgcgtctgtggatctggggctttactttgtccggggcatgtgtgggtctttgtgatgctttgacgttcctgcgtggccgggtgcatctgtgctggaagctggcctgcctgtgcgtttccagtgcggtccctgcgtctttgtgtgtgacgtgtacgtgtccccgtctgctgatggctgtccacctttgtatgtgatgcgcttgtctatgagggtccctgcgacgtgtgtcagctgtgtgtgggctgcgcgtgcctgacatctgcatcttagcgtgtagcacatgtgtccatgctggtggcatgtcacagcggtgtccgggccaggcacccgtgggccctgcccccccacccccgctgcaagtgtgtgccggtccctgtctgtccctccccctcccatttcctcccctccctcctggcagccaatgctacgggggagccagttgccatgacgacgctccatcctccctcctcccacccttcctgtgacaggctctctgctcccccaatcctggctgccctcgggggcgg

SEQ ID NO: 37298 - DNA, 1168 bp, Artificial sequence
  DNA replication origin
gcaaagctgggactggaacccggtccatcggggacaccgacacatcagacaaggacacacatacatcacgtgccaggccgccgccgtctcggggtcacatcccaccctccagcgccccgagctgcagacacacccggaagcgcggactcccaccctgggcgcggacctctccatcgtccgtgagcacctgcgaggcgttcccctgggtgaggctgggccggagctgcgcacccaagacgcagcctcagcaacactcggcgcaggcgacccagcccccaaccccaacccccagcaggggcccagggctttccaccaaaacgcgcagccgtggcgcacaccggccgggcagtgcacactccccgcagagcgcagccgtcctcatcggggggctcaggggaaggggctgccctcagggtgtctcattggagaaactgaggcaggttcatcgcgggagggagggggcgcacggcctaggctgcagggtggaggggatgcaatcggggggcggggagtgagaaaagacgcaattcgctgcccgggtggctgaagggcacagaacctggcggaagcagaggcttatgggaggtgtagtcctggccttgagacttgtaggaaatgtagtcctgctcgacccagcaaggaggctcagattaagctgcggttggatgcgggtagcaggagccgaggaagggtccgctgcctgggtctttggaagtgatgtgggcagaattatcaagtcctagggagcggcacaggcggggctgcagtcctgactctggccccagctcgcttgttcatgtattcactcaacgaacgtttactaggtgcccactatgtgattaggcaggcgctgggccagaagctggggctgcagcaggaagcaagtgagacgcgttccctcaccttctgggagtctcgggggttcaaggaaagcagccacgagtggaataattgcacatcaggacttagcactgccgggcaccactgagtcagggtggggatggagtgggtcttgtctggggagtaacagagggttccctagagctttccaaactgtgagcgcccagccattagcaggggtgatatcaagatcctcggtggtctcagaaacaaagtcactctctgaaaagaaagaaagacaaaaaatcctccgtggcaatcagcactt

SEQ ID NO: 37299 - DNA, 1952 bp, Artificial sequence
  DNA replication origin
acttagacatgtggacctggggaagggggttggggggaggttacgggtggtagaggacacccctgtccccaagcccacgcaatgcccccttgaggctcaggcaacctcagatgggtggggtgagagatggcggctgacacctcaaagccacgctggttccccccagccgtcccctctaatcactgggtccatcttggggtgcagcgaaacctccttgtctgctccccaccccaccctgattactccatccccacgatgtgccggcacaggcccccagggccgataccaccgcccgccccaccccgcacactcacactcacactcatgccccgcctgccctgagctgggctggggctgggctggaggccacttggggtgggccccacaccacgcctaggctcctctcttgggagggggccactgagagtgccggctcctgggtccccaaggtgacagagactggggagggatgctgggggagtggggtggggggactgaaggccagaacctgggtccttactggctgcatggtcacaaaaggggaacagggtggggagagaggcaggtgcacacagagcagggggcccaacaggccacggctgtagtgacaatgtgtcagggaaccagagctggaggctggactcctgggtctgagggaggaggggctgggggtctggactcctgggtctgagggaggaggcgctgggggtctggactcctgggtctgagggaggaggcgctgggggtctggactcccgggtctgagggaggaggcgctgggggtctggactcccgggtctgagggaggaggggctgggggcctggacttctgggtctgagggaggaggcgctgggggtctggactcctgggtctgagagaggaggggctgggggtctggactcctgggtctgagggaggaggcgctgggggtctggactcctgggtctgagggaggaggggctgggggcctggactcccgggtctgagggaggaggggctgggggcctggattcccgggtctgagggaggaggggctgggggcctggaattctgggtctgagggaggaggcgctgggggtctggactcctgggtctgagagaggaggggctgggggtctggactcctgggtctgagggaggaggcgctgggggtctggactcctgggtctgagggaggaggctgggggcctggactcctggatctgagggaggaggggctgggggcctggactcctgggtctgagggaggaggggctggaggtctggactcctgggtctgagggaggaggcgctgggggtctggactcctgggtctgagggaggaggctgggggcctggactcctggatctgagggaggaggggctgggggcctggactcctggatctgagggaggaggctgggggcctggacctctgggtctgagggaggagggtctgggggcctggactcctgggtctgagagaggaggggctggactcctgggtctgagggaggaagggctgggactgggggtcagggaggttgggtttctggtttcctgggctgggacagactgagccaagtgaggggtgtgcggtgggagtgttgtgttggggggtctggggtctataggggtacaccggtgagcacggtagccactcctcccctgtgtcttttgggcctggggtgctcccagcaccatcctcacctgtccccggcgctctcctctgccaaacgccaggaccagtcaaaccagctgtgccagttgggaatcaccgtgcaccaccaccctccgataccccccttccctgcagtggcttcagggaggcctgcgcccagcccgagggtggtgcatgggtgggcaggaggccggattacaggagaacaggacgccccaatcgctgcttcatctttccacctcccaccctcatcttgctcatccctgttcggctcctcctcctcctgcctcg

SEQ ID NO: 37300 - DNA, 1050 bp, Artificial sequence
  DNA replication origin
ggagcccgccaggtgcctactccgtgcccggcccaaggggaggggcagcacccagccggttctcccagctgctacccacgcctccaacagcggggagaggccagagggagccaccctgctctgagggcggggaggagcagtgatgggcacgtcctggcgtctggtgctcagctgggggcagagtccagggggtcagtgccaagcccacgccagaaccttccgggctggcagttctgggcctgtgggcacccacctggagcccacgttgctcatttgggaaatggcgctgatctcgcccatctcagcgagttcattcattcattcattcattcactcattcattcctttattcatttgagaaatatttactgagcatctcctgtctgccaggcgctgttccaagcactaggccaccgctggggaaggggcagacagaaacttgccctcacgggctgacgcgtaaggggcaccctggaaacagacacagggacagaggcacagccaggaccacggcagcacagacagggcgggagccagggagaaagggagagggcagagggcatgggagacagagaccaggaggggactgagatgcacaggggccagagaccttgagagacgcaacagagatacacggagggcggagacagagacacacggacacccagaggagacagagacacacaggggtcagagaccctgagagacccagcagcgatatacagagggcagagacagagatacatagaaaggtcagggacagggagagacacagatatgagagacaactgccagatatggttgggcgtgagagtctgaaggtcacagccctggttcaaatcccagctccagtgcctcccagctgtggggccgggaaccatcttgctcataggctcatcttgccttagtttccccatctgtgaatggcacccatcgggctgttgtgaggactgagggagacactctcagctgctggtggaggatctggtacacagtgagctcagcatagacggtgttctcttctcttctgcccccaccccaaaccctggc

SEQ ID NO: 37301 - DNA, 1024 bp, Artificial sequence
  DNA replication origin
tctggcctctccccgctgttggaggcgtgggtagcagctgggagaaccggctgggtgctgcccctccccttgggccgggcacggagtaggcacctggcgggctccccaggtggcagacgctgtcgctgcgcacacctggcctctgtgccgcctgctccctgctcgtcctcccctccccaccctcacccacctgccatggacgggcccgccgagccccagatcccgggcttgtgggacacctatgaagatgacatctcggaaatcaggtgaggcccagacctgggcaggagccaggagatcccagggaggaggtggctgtttgggggagccggggactgtggcaagggtggcctccagccacccgcagccgcaggcctggcccagacttagctggaggggctgggctgggctggggcatccagtgtggtgtataggtccctcctgagaagggagtgaggacccgaccgtgttgagtcaccagtggggatgcctggggtgtccctgtcgctctccgggcctcagtttttctgtctgtcaaaggggcccacaagccctgtgtctccctgatagagcagtggaagagagcaggcagcttggtgcatagtagttgctcaggaaacacaacagcctgtagtacccaggacaccccatgcaagccctgaaataacgggggtgcttgggggtgaaatgggagagactgggatgctgctgagacccccagagggagaagctgtgttctagggcacttggggcggagagggcaggctctggactcttcaggtctcctaacagtggttagggcagagcactgcccacttccatgagctcagcgtgactccctcttcctggggatgagtcagacactttgacagtacctgctttccagatggggaaactgaggctgggagggaacgcgacatgaccgcaattacgcagctagaagcaaatctgaacccggtctgtctcacgccagagcctgtggtttctcctgctcctcacagccttggtgatgtcccctttacac

SEQ ID NO: 37302 - DNA, 1342 bp, Artificial sequence
  DNA replication origin
cacgcgcctgtcatcccagctactcggaggctagaacctcagagcgcccgcttcacctcccatctgggctgagtctacctcctggatctcgctccttcctggtcttgctcatcatccctaaattccctgtccagggcatgataacagtcaggcttccctggttcaaatcctggccgtgccctgcttggcagctgtgtgaccctaggcaagttactcaacctctctgggcctcatctctgacacaggatgacagcagtcaaagtgggttcatctcagatggctgtgaggattagatgaggtaatacacctgaacctgggaggcggaggttgcagtgagccgagatcgttccactgtgctccagcctgggtgacagagccagattcagtctcaaaaaaaaaaaaaaaaaaaaaaaaaaagcagtagagtagctggaatgcaggtgaggaggctgggggggcggggtgggtgagggctgggcgctgaggaattcactggatggctgggaggaggggaggagcagcctgggacagccaaggctggagtggtgaggttggggggagatgaggaggcctgagctggggctgtggcaaccgagaggaagaaccagggcagagagtcaggggacaggggtgggggttggggactgacaggctgggggcgagcagagggggaagtcggggccaggagaagccctgtggatctgagccagtgatggggaggggacatccctgagatgggcaacctgggaggaggtgcgaatctgggggggtacgtggcgtatctgagggggtctgggaggggcacatcccgaaggaagtgggccccagggggatgctccagcaggctcgctggggagaggcacgcttccaggcctgggggattccagaagtgcctggaagtttgaggtcctaagggcacccccccagggctctgcagccatcagggctggaggagtcttgcaggggagggctattctcccccacgatgacgaaaccgagcttcgcagagggtcagtgactaaaccaaggtcacccacttagcgaggtcactcagggcgttttatgaccagctggcagagccgtcgcggagataaaaaaaaggctcccaggtgcctggctggggtgggggtgaggccttcccagaggcgggaaccctggaggcgagctggcttatctgtttatctctggagagaagaattgcagaactcagaagtcctggattagacaatgttgagtaaagaatgctggggcctccctcacgcagaactgggccagcctggtcacagctctcagcccaggaggcccagagacatcaggaagcttgtctaggtcacacagcaat

SEQ ID NO: 37303 - DNA, 794 bp, Artificial sequence
  DNA replication origin
ccactgcactccagcctgggagacagaccaagatttcatctcaaaaaaaaaaaaaaaaattacagccaggcgcagtggctcacgtttgtactcccagcactttgggaagccaaggtgggcagatcacctgaggtcaggagtttgagaccatcctgaccaacatggagaaaacctgtctctactaaaaatacaaagttagctgggcgtggtggcacatgcctgtaatcccagctacttgggaggctgaggcaggagaatcgcttgaacccaggaggcggaggttgtggtgagccgagatcgcgccattgcactccagcctgggcaacaaaagcaaaactccgtctcaaaaaaaaaacccccatatattatactacatattataataatttaatagtattacaatatactttaattatatttaatatttatatgtttaacatataataacataatgcaatataatataatacataaaatgtctgatgggataaatttacattggggggagagggctggagatagagttagaggtgggtgtggggctgcaattataaataaggaggtcaagggggcccccagtgagtaaaaacccgggaggtgatggtgggagccacagaggtttctagaggaagagcatttcaggcaagagggaaaagcaggtgcaaaggccctgaggtgggtgtatctgaggtgcaagagggaggtcggtgtggccggagccaagtgagcaagtggggaaaggagtggagatgaggtccgggtggggaggcaacaggggccaaaatgtgcagggc

SEQ ID NO: 37304 - DNA, 1165 bp, Artificial sequence
  DNA replication origin
cataaaatgtctgatgggataaatttacattggggggagagggctggagatagagttagaggtgggtgtggggctgcaattataaataaggaggtcaagggggcccccagtgagtaaaaacccgggaggtgatggtgggagccacagaggtttctagaggaagagcatttcaggcaagagggaaaagcaggtgcaaaggccctgaggtgggtgtatctgaggtgcaagagggaggtcggtgtggccggagccaagtgagcaagtggggaaaggagtggagatgaggtccgggtggggaggcaacaggggccaaaatgtgcagggccgcgtgggcccggtgcggacttgagctctgaccgagtgacgaggcagcgcggcagggatcgcagcagaggaggagcccgagcgggcttaggcttcaccggcgccctctggcggtcagatggggaccgactgtcgagagagcagaagccgggaagcccgagaggcggcgctggccggggtccaggggaggggacggtggctggactagggtgatggtcacggaggtattttgaaggtgagaccgggaggatttgctgacagactggatgtgggtgtgagagaaggggatgagtcaagggtgactccaaggtttcggcggaagcaactgtcagggtggggcaactgggaaggggaggagggaggggagcaggcgggggaggaagacacgggctctgcggcggcccatcccacgtccagcagaggctgccggtgggcacagaaatgcacccatcgggatctgaggggagagacttgggctgacacgtccatttgcaattccttggcacatatattctgtaattaatcgaagctccaggactgggtgatatcgccaaggaattgagcgtggacagagcagagagggggggctgcaatcaggaagtccccaagaccaccctcaggctcaacgacttagcaaaactcatagtgttcagcaaagctgctggactcccgggttatagtcaattacaatgaaagcaaacgtgaaaatcaggcaagggggccgggcgcggtggctcacgcctgaaatcccagcactttcagaggccaaggtgagcagttgattgagcccaggagttcaagaccagctgggcaacttagaaacacccatctctacaaaaaa

SEQ ID NO: 37305 - DNA, 1336 bp, Artificial sequence
  DNA replication origin
ccagagggaggaatgtgtagggaatggtgagtcccagaaggagagggtgggaaaggtattggaagagctgtgaccagaccacatctgttttttgggtttttttttgttgtttttttttttttttttgagatggagtctcactctgccacccaggctgtagtatagtggtgagatctcggctcactgcaaactccacctcccagttcaaacgattctcctgcctcagtctcccgagcacctgggattacaggtgcccgccaccacacccagctaatttttgtattgttagtagaaacagggttttaccatgttggccagactggtctcgaactcccgacacctgtctcagcctcccaaagtgctgggattacagacatgagccactgcacctgccccacatctgtgcttgaaagccgggtctgggtctgggactgtgtcccagggcactcgggagccacggaagagttgggagccagtgaggagcagggtcagctggggtgtgggggatgagctggagggggatggagactggaggcaggaaggctgtggagcagccggctgctgaggcatggatccaggaaggggaggatgaggcctaagcagttctaggctacagggacacagaggaggggatatggcaaggggaggcaggtggggagggacagggctcatgatggacaggttttgggggtgaggggtacccagagagggaggccaggctcctgggtggatggtggggccatcctgcaatgggggcctgggggaggagcaggtttgagatgtagaccagccaatgcctgtctctaacctgaaggagggtgattccaggtaaggtgatgcactgacctctgcccccggatgtgacctctgccccccactgtgacctctgcccccggctgtgacctctgccccctgctgtgacctctgccccctgctgtgacctctgccccaagcccacctattccctcccacctagagaaccctccaaagacagaaactgcaaaaacccttagaggcgatatagcccaacccctcagtttggagttggggaaactgaggcaaagaggcagcgtccctcaggcagccccaggttaggacccagacatgcggatcccaggttccacgctccttccttggccgagtgccctccctccgctgacccctctcccctgcctgcaggacttacagggctccgtggagcgcatctgtgggttcctgggccgtccgctgggcaaggaggcactgggctccgtcgtggcacactcaaccttcagcgccatgaaggccaacaccatgtccaactacacgctgctgcctcccagcctgctggaccacc

SEQ ID NO: 37306 - DNA, 1039 bp, Artificial sequence
  DNA replication origin
atcgtgcctaccgcaagcagatgcgggggatgccgaccttcccctgggatgaagacccggaggaggacggcagcccagatcctgagcccagccctgagcctgagcccaagcccagccttgagcccaacaccagcctggagcgtgagcccagacccaactccagccccagccccagccccggccaggcctctgagaccccgcacccacgaccctcataataaacacgtcgattctgtccaggttccttgatgcgctgtggcagggcaggcagcggggcgtggagaatcctcaccacaccaaggcttccagaggccggggtccccgactcagagtcccgcccagaggcaaaggtgctgcaggaacccagcgctgggcatctcacttcccggggtgggggcctgactccccagtctgagggaggagggggctgggggcctggactcctgggtctgagggaggaggggctgggagtctggactgccgggtctgagggaggagagggctgggggtctggactcccgggtttgaggaaggaggggctgggaggctgcactcccgggtctgagggaggagggtctggaggcttggacccctcagtctgagggaggaggggttgggggcctggactcccgggtctgagggagtagtatctgggggcctggagtctcgagtctgagggaggaggagctgggggcctggacccctgggtctgagggaggagggggctgggttgtggactcttggattcagagccagtctttagtaacgcacgtttttggcataaagtggttttattccgagcagaggtaaacgggagctccggcagacccgccctctcagcgcccacagaaagtcccaccacccaccctgttcccctgtggctgtaccacattccactccctcagtattcagctccttgcctcagtttccccacagctcctgaacacagtgtgcctggcagcgactccccatcttcccctccacagctctagcagctctagctcggggcctcacccgggcccctcatcaggaaggcctg

SEQ ID NO: 37307 - DNA, 1188 bp, Artificial sequence
  DNA replication origin
tggggtctcactatgttgcccaggctggtctccaactcctggccttaagcaaccctcccaccttagcctcccaaagtgcagggattacaggcatgagccaccactcccggcccaagttgcagaacaagtgacaaacatcccttctgcttgacagacgccgaggccagaagccttgtccaaggcagggcattgaggcagagggctctgagccgacagttgtccggcactgctccttgggtgggccagcagatttggcttgggctcctgttcagggttgccccccaagtcctgcccggggggcccagtctgacggcctgacgcctctgggctcttgaagtttgaatgtagcatccccaccgaaccgccttcgggctggggacagatagcggaggcggtgggcggggggcaggggcagggcaccgccccacggaggtcgggagtccacttccccccaggggcctcctccagtgccccgctgcctcatcagagccttggctggagtgtccttggagccccaggatttcttgagctgtggagggaaagagagggaggtgagaggaggctggggtggggccctgggggcatcccagatccagggaaggcaggaggtgaggcaagagagaagcagcgaaagtgacagacggccaggcacggtggctcacgcctgtaatcccagcactttgggaggccgaggtgggtggatcacctgaggtcaggagttcaagaccagcctggccaacatggtgaaaccctatctctactaaaaatacaaaaattagcctgaggtggtggtgggcgcctgtaatcctagctactcgggaggctgaggcaggagaatcgcttgaacccggaagggagagattgcagtgagctgagatagcgccaccgcactccagcctgggcatcagaacaagactcagtctcaaaaaaaaaaaaaggaagtgatagaggatttgagggaggtggaaggagatggtggaggagggaagggagggaagagaggagagagggaggagagagatggaggccggacgcggtggctcacaccagtaatcccagcactttgggaggtgggaggattgcttgagctcaggagttcgagaccaacctaggcaacacagtgagacctcatctctccaaaaaatacaaaaattagccaggcgtggtggcgtgggtctgtaatcctag

SEQ ID NO: 37308 - DNA, 824 bp, Artificial sequence
  DNA replication origin
cagtgagctgagatagcgccaccgcactccagcctgggcatcagaacaagactcagtctcaaaaaaaaaaaaaggaagtgatagaggatttgagggaggtggaaggagatggtggaggagggaagggagggaagagaggagagagggaggagagagatggaggccggacgcggtggctcacaccagtaatcccagcactttgggaggtgggaggattgcttgagctcaggagttcgagaccaacctaggcaacacagtgagacctcatctctccaaaaaatacaaaaattagccaggcgtggtggcgtgggtctgtaatcctagctacttggaaggctgaggtgggaggatcacttgagcccaggaggttgaggctgcagtgagccgagatcatgccactgtactccagcctgggagacagagcgagaccctatctcaaaaaaaaaaaaaaaaaaaaaaaatgggtggaggaggtaaaagaagaggaaggggtaagggagaaggtgagggaggagaaagaaggagaggagggaggaggggagccaggaaggagagagaggagacagagagggtgaaaggggaaggatgaggtgaggaagaggcaggaaggcagcagcaggaggagggacagaaaggagagggatgcagaggaggaagcaggtaaggaggacggtgtggggagcccgagagggaaggggggaagtgagagggcaaacctgggaccccctaacctacagagggacaaggagctgggtccccacctctgcagctggggaggaaccggaagcgccggcatctgccagccgggatcaaatatttgccaa

SEQ ID NO: 37309 - DNA, 1779 bp, Artificial sequence
  DNA replication origin
ggaagctccctgcctccttcccaacagccaggtggcaggtgttcccacaccggcttccttgggtcagccacgcccgcccctcttaaaggatcctgtgcccctccctggtgctgggatggcgggtggggcgtggaccgggaagtgcagggtgcaggctggcagggctgtggggagggagagactgcctgggaacaggtgaggcaatctcaaccccccggggaccgggaagcctgagtctagaggggcgttcaccccctgggagagcacaggtaaagaaagcgtgtgagccgcacccccggacctcctccaggggcctgtgggggccctcctgtgtttacacaaggggccgggctccctggattccaggtcgaggcctgatgagtgaggccagaagccgggaagcaccgcagaagtagaagccggggagccacagcctacgttctcggaaaaagcaggcactggaagggaggccattgagcccggcactagccggtgtgggtgagccccggcgatgggggggatgggtgagggtggggcggggaggctggcctgccttgactcctttcttctctttgcagctccctgctgtggtctggaggaagcagcggcctgggttggtgggattggaatgaagggcttctggtttgcagggatcaagggtccagggtccccgaggttgggtcaggagcctcaaggggataactgaggcttgggagggagacagggcgagatagagactggcccctgtccgggaagaagcgtccgggtagctggcaggagatagcatttaggcagaaaccaggctgggggcagcttgggtagggctccccgcagatcagaggacggcctggaacaggtcccagggccaggccccaggcaggggcagccagcctgaggagggtggctggttaggtggcactcacacctagatgggctgtgaagatcatagacctgtcccatagtaatggagacccctgtagcgcatttcaccctccactgcagcagctggaaggagtgtgaggagggtccagggagcagggtcccccattgacagggtagggaagggtttgccaagccttcggcctttaaggctgagcgagcaggcccagtggagaggcatcctggctggtctgcgggtgagagctgatgagcaggagaaactcgtgggggctgtcagatttggccagagacagatgctccaacaggcagatactgtgactgtcagtcggaagccattggcgtttgccagacagtggaaggagagggtcagttcgtcgtgctcttggccgggggcaggcaggcaacctgtcgtgcctttaaggacctttgggtgattagagacaggcaggcagcttgccgcctggaaatgatcaagtggtcagcctgaccaaattcaggacagctgaagggtctgactgggcactgtgtgactggtgggttggaggctgtcgtgtggctgagcagagatggccagctgatgggtcacacagttggggatggtgtcaggaggtcaacctgaccagcagagacggctggcaggaaggtcacggaaggccagccaggcatggtgccactgggtgcaggcaggtggcggatctgagtggcctgacacattggatggtcgcttatttgggcagcgtgattgtcagaacagtgtggcaggggctgctgcagggagccatttggacatctgcagggccccgccggaggcctcggatggccacgtagggtctgcctatcaggagaacccccagatgatcacagtccccagagacagcc

SEQ ID NO: 37310 - DNA, 929 bp, Artificial sequence
  DNA replication origin
gaaaggagtcaaggcaggccagcctccccgccccaccctcacccatcccccccatcgccggggctcacccacaccggctagtgccgggctcaatggcctcccttccagtgcctgctttttccgagaacgtaggctgtggctccccggcttctacttctgcggtgcttcccggcttctggcctcactcatcaggcctcgacctggaatccagggagcccggccccttgtgtaaacacaggagggcccccacaggcccctggaggaggtccgggggtgcggctcacacgctttctttacctgtgctctcccagggggtgaacgcccctctagactcaggcttcccggtccccggggggttgagattgcctcacctgttcccaggcagtctctccctccccacagccctgccagcctgcaccctgcacttcccggtccacgccccacccgccatcccagcaccagggaggggcacaggatcctttaagaggggcgggcgtggctgacccaaggaagccggtgtgggaacacctgccacctggctgttgggaaggaggcagggagcttccggggcagtgggggcaggaagagggctggtcttcactggcatgacgtccctgtccccaaaccaaatgcattctcacccgcaggaaccaattctccaacccatcccccaataacacacacagagcactgtcagcaaaaatctttttaataagagagtaggatccagggttagtttttgtagcctcggctggcccgtcggcctctggcacgctcgaacttccggcccttggagcggacgtagggtctgtggggagaggagggagtgagaggggggccctcttaaaggaggccattgtggagtggcacaggaacaccacaagcctgtcacattcagccccaggagagtcaatgctgctggaaaagct

SEQ ID NO: 37311 - DNA, 1685 bp, Artificial sequence
  DNA replication origin
gtcccagcttctcactgtcttcccgtccctccagttatacaggtttctggccagaagaaccaactccacattcaaccaggttgtgttgaagaggttgtttatgagtcgcaccaaccggccgcctctgtccctttcccggatggtgagtggctggtccagagagcacggtagacctgggagccgctgggtcttgtctgtctggaagggaggcaggacttggagctctgggagcaaccagggcatcaagggtttgtctcagccagtcgcgagcgtagagcttggactgttggttggaactgagtgtccatgggcagtgggcaagtctcctggtcctcctctccttctctttgtgaggtggaggtgtcctggtggcttcaggagattgccccaagtcataactgagttttatgtcaaaggctctgctgagggaggccctattgaacagtctgcatttttttttttatctggagctttccccagctggacctgaggagaggcctgtggggtttaaggggtgtggtgtgagtggggggtcccgttagagggcacagctgccctggcctggggatgcctcaagcggggctgaatgtaaacaccagaacaacttacgacgtacatcctccccaccctaagatccggaagatgaagcttcctggccgggaaaacaagacggccgtggttgtggggaccataactgatgatgtgcgggttcaggaggtacccaaactgaaggtgagctggcgggggctgggcagacccatcagacccttgctgtactgtgctgtgctgtgctgtgctgtgctgtgctgtgctggtccatcctcagtcttgccaccgctggtgaggcaagcatcctgcctgtctgagtggctttgaggattggtgtgggtcgtctctggcatggttgatggtggggtcccctgggcaagcttcttctggggcaagttgtaaactgttagtgctggcccctagagccagacagcctgggctcaagtctagactcctttgtcacctctgcacaggtctttttttggcccagcttccttgctgtagtttctagcataacaccagggatgtggtggtgaaagttccggaagtgttgagaactgctgctgtcagcccagggtgctccgggtagtaaacgatagtgttggttaccagggctctgctgcgccaaggcagtggagggtgagtcctggcagcccctgggtgaccacgcaggggtctgacccgccagccttgtcctctccaccaggtatgtgcactgcgcgtgaccagccgggcccgcagccgcatcctcagggcagggggcaagatcctcactttcgaccagctggccctggactcccctaagggctgtggcactgtcctgctctccggtgagtgatacgtggtcgacgggtttggactgagctgtgtggctactggcagccttcaccctcctggatctgggaggccagaagctgggcgccagatccctgtctcacccggttctccttccccttccctaggtcctcgcaagggccgagaggtgtaccggcatttcggcaaggccccaggaaccccgcacagccacaccaagtgagtatcaggcccccagccctgccctctccccagactcagcctgcagggccaggcctggccacacttgggctgcttctcctatccctcgtaccagccagccc

SEQ ID NO: 37312 - DNA, 1203 bp, Artificial sequence
  DNA replication origin
tgtctggccctgggcccccaaaccgccatccgcactcttatttccagaacccagtcccaggcctggctgggttcagtcctggcccaggttttccatttccatctcccaccccggtgccccagtcccgggcctgagtctctgttcctcttggtccctcagtcccctagactccggtccctgccccgacccccgcaccctcctcacacgccgggtcctcctccaggcggtcccgcaagtcagcaccaacagcccccatcagacctaggggtggggggagggtgtgcatccgctcagccaatggccgtgcagccggcctgggccgcaccaatacgagggcgcggggggtggagccagtcagctcgcgagcttggtgcagggaccggccgcgggagaggccgagagctgggcggggcctcgcgcttcgggagactggccgccatcgtgggtgagggccgacgcgcagcggagacgacgtcgcggccccatagacagcgccgttgtcgccatctttgttaagggagagtgggcctgtctcatccattgaattcacaaaagaaaaggggcgtgagggaggaggtctttagctgcaaagacagagactctaacacgcgtaacaaaggcccagagatccgatccagacacagagcaaggcagagacccacagaggttggatgaggcaataagagagctgggaggagagggagagtggggaaagtgaaggatacttttttttcggacagttacagagtcagagagacccagagaaaagcagagatataaacaagagaccaaaacagtgggattgagaatgtgcaaggtaaggatacaagaaaaccctgaaaatgacagacacggagacagatggagacagacacttctggaatggaagccgcgaaggagaggctcattaattcagacttatttatctcaggctcaaaccagaatggaagcggcatgagataaacatctgcccagtgaatgaaccagtcacatggcaagacagagacagagagatggggacagtatctctaggtcaaaggtgagggagggagagaatattggaagcccaggggctgggaggaactgggacagaaagtgaagatgttgacagatgcaccgaggcaaagacatggtgaaattgaaagaaaggcaagtatatattaggagacttagaaacagaattgcatagagagaaagagatat

SEQ ID NO: 37313 - DNA, 1638 bp, Artificial sequence
  DNA replication origin
acaccaaggtggctccaggatagagcagctgcccagcacctcacccccatccccgggcagtggcagtcctcggagcagacaggtgagggcagtggcccagcgctgggcctcggcacggttctcttcgtaggtggcggccccatctgcccggaaggtgcgagtggctctgcgccgggccccgcgccggccccgagggtaggtgtagatgcagaagtaggccgctgagtctgaggggctgcggcttcgcagggtgcagcagcctgagacctcggccaacgggaccaggccaccccggggcctggcttcaggtttggggcgcagccgctgtatgtgcagggcctgcgatgtaagggtgagggcaaagcgtgggcctcgggctgggtaggagccaaactcgccatggaggagcggggtgctggcagccagtggcggtgggggcggggccatggccttagccctgaccagggtgctcctaggcccgtggccccagctcccggtcagctcctggtctggcctctgtgggaagggaggagagaaggggtgagaattcaggaccccatggcaggggcagggaggggcaggggctgtggacaggaggagacaatgaggggcagtggcaggtgagacaggagcatcagagacagacaggctcagacaggtgtgggcagaccttgaggatgcgggacagaggccagcatcccagagggggccggagacccgggcatgcaaacatccaatcatttattccccagtaagtattcagtaccctttatgtgccaatcacggtgctaggcctagcaaacacagcaggagacaaaatagccccaaatccttgccttcataggaatagataaacaagagaaaggattgaaatatacaggtggttgggtgatgataacgggctttgggggaaaagaaggcacaggaaggggaatggatagtgggattggatatgcagaaacagacatgcaaagactgaaagacacacctccccgacacccccaccccccatacggtgcagtgggtaaaacagcaaaacaatcacaaacgcaatagagatagggtctgagagccagagaaacactgagaggagacaaacagggtcaatgaggtgaaactcaggcgatgaaagatacttaagagagtaagactttttcaccccaacgagaaaggcaagacagagtggaagggagagcaaataggaggggtacgaggcaggcatggagacagctggagagaagggatatgacagggactacggggtccgagaggagccacatgcgagcgcctgcaaggggcaggggccaagagctggtccctgagcactgacctgggtgtctggccgcctgctctccagggagcgggtgggagcaggactgaggtcccttccccacaggccctctccctgccctctgcccggattctgcctcctcctttcgctcacctttgttccccactgccccgcccagccacctgccagtcctgcccctcacattccccaggcccagagcgccaggacagccccccaccccccaccgcctgtggactcacccttaggaactacatctgcccccctatccccagcggctctctcgggtccaggacgtctgcttcacccccaaacctgccctggcccca

SEQ ID NO: 37314 - DNA, 1325 bp, Artificial sequence
  DNA replication origin
aaaaaaaaaaagcacaggcagaggtcgcgtgcagtggctcatgcctataatcccagcactttgggaagccaaggcaggcagatcacctgaggtcgggagttcgagaccagcctggccaacatggcgaaaccctgtctctattaaaaatacaaaaattagccgggcatggtgacggatgcctgtaattccagctactcgggaggctgaggcaggagaatcacttgaacccgggaggcagaggctgcagtgagccgagattgcaccattgcactccatcctgggcgacaagaccgatactccatcacaaaaagcaaaacaaaacaaaaacgcaggcagagaaaagtgatttacatctgctgttctcttgctagatttatgtttctgtctcctatcctcttcccctttgcatgggtcttgaccacaggtgagtcacccagggtggtgagagcagcagcctgagacaggaccaggtaccacccagagtgatgggtgccaacagaggtctagggcttccctggagttcagaggtggcatctaatcctgcctggggcccctaagggctggaagtaacctaatcctgggtaataggtgtttggggtgaggaaagtgggaaccacagctctgaactacagctcctcccacacatggggacaaagggcatttggtttcacacctaagccctgcctttgtctcagcagctaggagttggggcagggctgcatacctaggcctggccacatgagagccagcaggtcccaggggccagccctccaccaattccgttgggggctgatgaagggactgtttccaaggtggggggcctgggtcactggcctctgcagaccctaacctctctccacagagatcacccctgacctgctacctcggccgccccggttgcttctattggtcaatccctttgggggtcggggcctggcctggcagtggtgtaagaaccacgtgcttcccatgatctctgaagctgggctgtccttcaacctcatccagacaggtaagggccagtgagaatgggagctgggggctgggacagctgagtcctaagggagcaaagtggtgggtgggactcctgggtctatggggctggggtgggacagcctgcctaacagcccggtatcccacttcagaacgacagaaccacgcccgggagctggtccaggggctgagcctgagtgagtgggatggcatcgtcacggtctcgggagacgggctgctccatgaggtagagcaggagcaccctgcccctagccctgggccctgggggactatagagactgccaccaggacccaggcttctggtctcccac

SEQ ID NO: 37315 - DNA, 1599 bp, Artificial sequence
  DNA replication origin
acaactctagcagccaggccacaccccctagctcaggctccgccccattggaatgtaggccccgcccccggcgggtaccaagcttgtttagtttcagggctcccgccccgggcagccaggaggcccagtgagcagtgtaccgatgccagggtgcatctgtgcctgtagcggcccatactccacctgctccccgtccactgtgagcacgccgcgtggtgtgagcggctctaggcggaaggcacgggccgcggcgtagcccagctgcggacagcccaggctgaagtggctaccacgctccatggccaagaaaaggcgcagcagcgcagcccgcgagatgccgctacgcacccagcacaggtgcaccaggccgtcgtcgaagcgcgcatgcggagctgccaccaggtcagcgcctaggtggctgggcgagatggccaacatgagcacaaagtccccctccagcgtcacccagtctgggggcagcggggtgcccagcggaggcagcaggtggtcgggcgggccgcaggtggaggcccctacccgggcatcaggggtgggaagtgggagcccagaggatgggggaattacgggggccccttcggagacgggtgagtgtagagctgccttgggagagccaggaggtgaagacagcagtgggtccggggacagcggagcatccccagccccaccccagtccccagccagctctgggcccccaccgttgagggacaggatgggcaggggttctggcgagccaggagaggccagggcaggctggggcaggggaagaggcaggtcagacacagaacgatgcaggggtgagtgggccatgggcggggctgggtctggggttagggtcagctccgacttggcacgaggcaggctatgggcaggggtgggcgaggcaggttccacagtggcggggaggtaggagaggcgtccgcggtaggtgtgcagtgtggcgaggcccagcaccgtgcccagtgtgaagcgggcactgcccaaggccctgaagcgctcgctctggatatccacatctgacacgaagccccaggccacagacaggaaggagaaacagcgggagcccgaggccagcgtcacggagagcaggtccagtgggtggccaccaccccggcacagcaacagtgagcagttgagcaacaggtcgaggcccagggctggctcaaatcttcacagccggagatggacggacacacagaaggaaggagcaaacaggggttggggaaagagacaggtaggaaagcagctggcaatgagaccacgaaggccatggcccaggcccaccacagccgtggggccacctccaggcgactccttacggggccaggttcctggtcatctttcatttgctccctacaattcactgagtgcctcccatgccaggcagagttctgggcgctcgggatacagctgggaagcaggcaggcaaaaatgtccaggagctgggggtgagcatcccacaggcaggctgatttacttgactgactgtgggtttggctgagtgggagatataggggtccctatcaccccaggaggggctcatccctcccttcgtggtatcctcaacctaccccccgtgct

SEQ ID NO: 37316 - DNA, 1434 bp, Artificial sequence
  DNA replication origin
atgctccgctgtccccggacccactgctgtcttcacctcctggctctcccaaggcagctctacactcacccgtctccgaaggggcccccgtaattcccccatcctctgggctcccacttcccacccctgatgcccgggtaggggcctccacctgcggcccgcccgaccacctgctgcctccgctgggcaccccgctgcccccagactgggtgacgctggagggggactttgtgctcatgttggccatctcgcccagccacctaggcgctgacctggtggcagctccgcatgcgcgcttcgacgacggcctggtgcacctgtgctgggtgcgtagcggcatctcgcgggctgcgctgctgcgccttttcttggccatggagcgtggtagccacttcagcctgggctgtccgcagctgggctacgccgcggcccgtgccttccgcctagagccgctcacaccacgcggcgtgctcacagtggacggggagcaggtggagtatgggccgctacaggcacagatgcaccctggcatcggtacactgctcactgggcctcctggctgcccggggcgggagccctgaaactaaacaagcttggtacccgccgggggcggggcctacattccaatggggcggagcctgagctagggggtgtggcctggctgctagagttgtggtggcaggggccctggccccgtctcaggattgcgctcgctttcatgggaccagacgtgatgctggaaggtgggcgtcgtcacggttaaagagaaatgggctcgtcccgagggtagtgcctgatcaatgagggcggggcctggcgtctgatctggggccgcccttacggggcagggctcagtcctgacgcttgccacctgctcctacccggccaggatggctgagggcggagtctattttacgcgtcgcccaatgacaggacctggaatgtactggctggggtaggcctcagtgagtcggccggtcagggcccgcagcctcgccccatccactccggtgcctccatttagctggccaatcagcccaggaggggcaggttccccggggccggcgctaggatttgcactaatgttcctctccccgcgggtgggggcggggaaattcatatcccctgttcgtctcatgcgcgtcctccgtccccaatctaaaaagcaattgaaaaggtctatgcaataaaggcagtcgcttcattcctctcagaccttctgcccttcctccatccgacagcccgcgggaggactcagactccagcacttccagcagcgcctgccctctatggacgacagcccggagctgcccacgggctgcagccagtatgccagggagctgccctcttcttccacaacagctggctctggggttctcaagatttattcaggatcgtgttaacggaggcggtgggaggatagggtccctgacg

SEQ ID NO: 37317 - DNA, 931 bp, Artificial sequence
  DNA replication origin
aacccgtctttcccggcccgcaggtctcctgaaggaaaaggagcgcaaggcggccctgcctgcagccacaacccctgggccaggcctggagactgcgggcccggcggatgccccggctggggcagtggtgggcggagggtccccgcgggggcgcccggggccggtgcccgccccgggtctgttggcgccactgctgtgggagcgcacgctgccgttcggcgatgtggagtacgtagacctggacgccttcctgctggagcacgggctcccgcccagcccgccgccccccggtggcccgtcgccggagccgtcgcccgcgcggacgcccgcaccctccccagggccgggttcgtgcggctcggcttccccccgctcctctcctgggcacgcccccgcccgggctgccctcgggaccgccagcggccaccgcgcaggtgcggcgaagggggcggggcgggtcctgacggggcggggcttggactcagggggcggggctgtgcgacgctgggggctgggaccgtgggacctggctgcggcctcgaattctgtgtccagttgtcgagaggtgtcgtgggagggggccagattcggtgtctcttaatgggtcagggaccaatggatccatgggggaggagagacttggaaccctaaattccaggaagcctgcccaatgagattttgtgggtttttctgtgggacttggggacaaacgatgtggatactcgtgaagccagaactggaagtccggaacaccagagttatttactggggagtggactgacccccgaatctgggcccataatcgatggaactgggataggactggagcccctaggtcctttacaggggcaaaggcaaaggagaggcacagaattctgtttacccaggacataagagactggcagcccaggtccctgggtcccccagtggg

SEQ ID NO: 37318 - DNA, 1373 bp, Artificial sequence
  DNA replication origin
ccacggtcccagcccccagcgtcgcacagccccgccccctgagtccaagccccgccccgtcaggacccgccccgcccccttcgccgcacctgcgcggtggccgctggcggtcccgagggcagcccgggcgggggcgtgcccaggagaggagcggggggaagccgagccgcacgaacccggccctggggagggtgcgggcgtccgcgcgggcgacggctccggcgacgggccaccggggggcggcgggctgggcgggagcccgtgctccagcaggaaggcgtccaggtctacgtactccacatcgccgaacggcagcgtgcgctcccacagcagtggcgccaacagacccggggcgggcaccggccccgggcgcccccgcggggaccctccgcccaccactgccccagccggggcatccgccgggcccgcagtctccaggcctggcccaggggttgtggctgcaggcagggccgccttgcgctccttttccttcaggagacctgcgggccgggaaagacgggttgggatgagggtgaggtgggggagatagagatggagaagagaccccgagtccgagaggcacagggcggagatccagagaaagaggggacggggggtcggagaggagagacgggagaaaaagggacggagacgcagagtgggagagagacccagaaagaatggagacgggggtggcagagacaggtggacagattcacagagatggggacagaatgccgggaaggaatagacacacagaaagacagcgaaccagagaaagagagacggaagttcaggaataggggggcagggacagggtaggtggagggttgggcaggtgagagaaaaaatgacagctctgtaatttcactgtaattacccaacccccatcccctgcgcgctgtacccccttcccctcccccaccatctgtaaggggcaggaaggggctctattcctggggcacatccctcatccctagactccatgtgaccccatgacgccccgcccaagcccgtgtcaccaccgtgtgagcacccgacacaccccctccctgggaccccaggggtccagactcccggaccaaaaggaagaggaggctggggcctacactcttgtgaactaagcggggaggacgttggggacgttggtgcctgggtccttagggtggacgggcttcagagccggcgcttttgggtcctgggcgctaagggatctaggggcctaaacacctgagtaattgagtagattaaggttgggaagatggactccccgcacgcaggtttctatgggaccccaccccacggcacctgagtccctaagggggtagggtgtccgaagtgggtgagatgggggttagaactcacagctggcc

SEQ ID NO: 37319 - DNA, 839 bp, Artificial sequence
  DNA replication origin
gaggtgtgcgcggaggggcggaggagggggcaggaggaggcggccgccttgaggcgtggccaaagcaaacttctttcgcggaaaaaaaaatccaaaccaaaacacccgacgccacagcgcgcgcccctcctccgggtccccgcccggcgcgtccagccccgccagcctctatgggcatgcaacccagccgcgtgcctccctccggctgcaaacacggaccaatcgtctccgacaccttgagacgcacagccaatggggcctctgggtccgccagggcccaggagggcgcgtgaggggctcagcgcgtgaagttgccttgcctttcggtgggaggcgggacactgacctacatttgcccaatgggaggcggtactggggggcgggaccgtgacccagtttgggccaatgaggcaggcgggagggggaagcacatggctctgctcgtgctgcctgatggcgaggggggtgatggggggaaaaggggcgccgcttaaaggggccgcggtcctaaagatggttttgagaagcaggaagccaaaataccgagagcggaggtttagaaagaggaagattggtttccggaagaagtctgttctttaatacccaaatgtttccccaccgcgcctagaatcagaccactgagaaaacaggaagtattctgtccctttaatagctttgttttaggggtaactcccctcgccttgtggggaggcttaggacgggcgggtgcaatcctcgaaggggagtctcagcgaccatgggggacaccatccactgtaagacagagaacaacggcagggggcgtcagtataggatggaaggggcggggggtgtgcagg

SEQ ID NO: 37320 - DNA, 1140 bp, Artificial sequence
  DNA replication origin
atgaggcaggcgggagggggaagcacatggctctgctcgtgctgcctgatggcgaggggggtgatggggggaaaaggggcgccgcttaaaggggccgcggtcctaaagatggttttgagaagcaggaagccaaaataccgagagcggaggtttagaaagaggaagattggtttccggaagaagtctgttctttaatacccaaatgtttccccaccgcgcctagaatcagaccactgagaaaacaggaagtattctgtccctttaatagctttgttttaggggtaactcccctcgccttgtggggaggcttaggacgggcgggtgcaatcctcgaaggggagtctcagcgaccatgggggacaccatccactgtaagacagagaacaacggcagggggcgtcagtataggatggaaggggcggggggtgtgcagggggcgtgggctgcgccgcgctgggccctaccgtcggaagtctgcgagcggggaaccagaatgtactaggtcgagaagcactgggctgaaccacaagaagccaataggaggggggaatcgggacgtccagattcagcagtaggctgaactacttgaaggtcttcatgggggggggggggtgtggactgtaccatgttgcgaagccgggggtgtgtgagattcctgggctaaaccacagggaggcagaggtggagggaaggggttgtaccttgtagattctcagtaagggggaagggagcatcagattgtggaacagcgtaaggtagtacgacttggaaagggagagaggatccaaattgtaccattttggaaattcacagtaataggaagcacagaacagtaggtaattggaccataggaaggcaggggtcaagggttatagaccaagttacaaagcagtgaagaggaaagacaaatcgtgggctagcaatggcctagggctggcaggtggactgtaccacatagacatgtagggaaagagagaaaaagagacagctcacgaggctagaccatatagacgcaggaaggaggatgggactgaatcacactgagacaccaaggggagacacatataagagggttagcccaagacttagagggggtgcagactggaccataccatgcaggcggtagttggggcctcggca

SEQ ID NO: 37321 - DNA, 663 bp, Artificial sequence
  DNA replication origin
agggagcatcagattgtggaacagcgtaaggtagtacgacttggaaagggagagaggatccaaattgtaccattttggaaattcacagtaataggaagcacagaacagtaggtaattggaccataggaaggcaggggtcaagggttatagaccaagttacaaagcagtgaagaggaaagacaaatcgtgggctagcaatggcctagggctggcaggtggactgtaccacatagacatgtagggaaagagagaaaaagagacagctcacgaggctagaccatatagacgcaggaaggaggatgggactgaatcacactgagacaccaaggggagacacatataagagggttagcccaagacttagagggggtgcagactggaccataccatgcaggcggtagttggggcctcggcagcgcctctcggggtgccgggggtccctgttgcccctcagtgccctgtgggccaagggctgcaggggccggctgttaccgctgaggctctggaagatctgagatggaggattctggctcaggagtctcagggagtgcatctgcagtggaaggagggtgggaaactgggagtgaatagtgaatggtcttggtgacgtcacgcaggaaaccccgcccctgggagcaggtgggcggggtctgttctcagccc

SEQ ID NO: 37322 - DNA, 967 bp, Artificial sequence
  DNA replication origin
agagacagctcacgaggctagaccatatagacgcaggaaggaggatgggactgaatcacactgagacaccaaggggagacacatataagagggttagcccaagacttagagggggtgcagactggaccataccatgcaggcggtagttggggcctcggcagcgcctctcggggtgccgggggtccctgttgcccctcagtgccctgtgggccaagggctgcaggggccggctgttaccgctgaggctctggaagatctgagatggaggattctggctcaggagtctcagggagtgcatctgcagtggaaggagggtgggaaactgggagtgaatagtgaatggtcttggtgacgtcacgcaggaaaccccgcccctgggagcaggtgggcggggtctgttctcagccccacccacccccaaggtggtctgaccctcttacctacttgagttcagtctatgaggagagggagggcaggtgagcaaggggatgcccaggccagtgagtggagtacccaggcctaggaagggcggtgcggacagagggtcacctgaagggaggtgatattgagggcccggtcaatgaggatccaggtgacagtctcggagcagggcggggtgctgagagagccctgataggtgatgaagccgaaggattcagggaacaggagctccaggctcaggtcttgaagaaagtaggcatcatctgcgggaatatcaggccagagtaaagagggatggcactcttgaaccccctcgtgtgtgaccactgcccccagcacgccagggacttactcttgtaggagatgcgagtgatggtgtcgcggttaaggaggcgactgaggaatgggttagaggtactggcaacctgtgtgggggtacgaggtgaggacacaggagcccagaagtccaagccctcaaccttctcctcccccaggacccaggagtctgggcctcccagcaccccgc

SEQ ID NO: 37323 - DNA, 1094 bp, Artificial sequence
  DNA replication origin
ctctccgtatccatctcaggctcccttcccctccccagcctacgcagatgtgggtcctcacctcccgctctccgcctctgccctcccggctcctcctccccgcccctctctccctcgccaggtctctgcctccccctccaggcgagcagccctcactgcacttcaggctcctaggggatcccccggccccgttaaggcagccccaggcagagacccagtggagccctggggcggggaaggggggctgcgggcgctggggcggctccaacctgggtcccagcgagcagggggaccctgcatccgccaaggccggcggcccccagcatggagacttccgaagccactcccagctccaccttaagcgcccccccttccccttgctgcggaggatggaaacagcctgctcccggccccaggtgtcccggccacccccgcccgcgtggccccagcgcggctgggagccgaggaccagccccctacctccttccgaatcctgccctttcgcacatcccaccccaagccaacccgaggagtgtttgccgctatgagatcacctgctcccccagcccaacaacaaaattaaataacaccacgggagaggagagagggagggggaggagggaggaagggacaagagagaagagagactgaaacagggagaagaggcaggagaggaggaggtggggagagcacgaagctggaggccgacactgagggagggcgggaggaggtgaagaaggagagaggggagaagaggcaggagctggaaaggagagagggaggaggaggaggagatgcgggatggagacctggagttaggtggcttgggagagcttaatgaaaagagaacggagaggaggtgtgggttaggaaccaagaggtagccctgggggcagcagaaggctgagaggagtaggaagatcaggagctagagggagactggagggttccgggaaaagagcagaggaaagaggaaagacacagagagacgggagagagaagaagagtgggtttgaagggcggatctcagtccctggctgctttggcatttggggaactgggactccctgtggggaggagaggaaagctggaag

SEQ ID NO: 37324 - DNA, 661 bp, Artificial sequence
  DNA replication origin
tctctcctctcccgtggtgttatttaattttgttgttgggctgggggagcaggtgatctcatagcggcaaacactcctcgggttggcttggggtgggatgtgcgaaagggcaggattcggaaggaggtagggggctggtcctcggctcccagccgcgctggggccacgcgggcgggggtggccgggacacctggggccgggagcaggctgtttccatcctccgcagcaaggggaagggggggcgcttaaggtggagctgggagtggcttcggaagtctccatgctgggggccgccggccttggcggatgcagggtccccctgctcgctgggacccaggttggagccgccccagcgcccgcagccccccttccccgccccagggctccactgggtctctgcctggggctgccttaacggggccgggggatcccctaggagcctgaagtgcagtgagggctgctcgcctggagggggaggcagagacctggcgagggagagaggggcggggaggaggagccgggagggcagaggcggagagcgggaggtgaggacccacatctgcgtaggctggggaggggaagggagcctgagatggatacggagaggaagggcggagggacagaaggttagagaggcaagaacaaaccgccaggcaggagt

SEQ ID NO: 37325 - DNA, 1088 bp, Artificial sequence
  DNA replication origin
ggtggagctgggagtggcttcggaagtctccatgctgggggccgccggccttggcggatgcagggtccccctgctcgctgggacccaggttggagccgccccagcgcccgcagccccccttccccgccccagggctccactgggtctctgcctggggctgccttaacggggccgggggatcccctaggagcctgaagtgcagtgagggctgctcgcctggagggggaggcagagacctggcgagggagagaggggcggggaggaggagccgggagggcagaggcggagagcgggaggtgaggacccacatctgcgtaggctggggaggggaagggagcctgagatggatacggagaggaagggcggagggacagaaggttagagaggcaagaacaaaccgccaggcaggagtgaggaggagggggaggaggtgaaggaggagggggaggagggagaggagggggagggagaggagggggaggagggagaggaggagggggagggagagaggaaggaatgaatgagagagatacagatagaggcagaaaaggagatacagagacgcagcgagacagacatggagacatagagacacacacttagagatagacagaaactcagagaccaagcagcagatggggtggggagagacaaaaagagagaaagagcgatccaaagacagagagagacaccacatttttgtatttggggagaagagatggggtcatgctatgttgctcaggctagtctcaaactcctgtcctcaagggatcctcccaccttggcctcccaaagcattgagattacaggcatgaacaaccatacccagcctcagagagaccacatattactgttgttgttgttatttattatttttcaccccgtctaatggtagtgaaactgctcattgtcttcttttattttcttttttgagacaagccttgcaatgtcacccaggctggagagcagtggtgcgatcatggcttgatccagcctcgacctcctgggcttaaacactccttccacctcagcctcccaaatagttgggactacaggcacatgccaccatgccaggctaatttttaaaa

SEQ ID NO: 37326 - DNA, 1230 bp, Artificial sequence
  DNA replication origin
cgataccagaagcccacccaccggtctcgggctcctgcccactgtgactgaccccacgggacccagaggtaccctggaagctccccacgacctgggctgacatctcccctccccacagttctccgcgcgcaggtgctagcgtccgaggcggcgggcccggcatggcagcggctggccgtgcgcgtgctggccgtttacaagcagcgggcgcagcccgtgcgacgcggcgaccaggacgcctgggtgccccgcgccgacctgacctgcggctgcctgcgcctgcagccaggcaccgactacctgctgctgggcagcgccgtgggcgaccccgaccccacgcgcctcatcctcgaccgccacggcctcgcgctgccatggaggccgcgctgggcccggcccctgaagcggctgcagcaggaggagcgcgccggaggctgccgcggcgtgcgggcacccacacccagtcccaggccggagcactagacgtgagatggggctgcctcgagcaccaacaaagtaatttgggagcgactaggagctgagccttctacctcgacggtgcactgcagagagccaatcagacgtcgcagagccccgacgacactatgcttgcgcccacgccgagcaggcgtgcggaacttttagcaaaaggcggcaagcgggacttctggtcccaacatttcctcctttggcctgtggcttattccccgccagtgatctgtttcccccaataaagtctcaaatctttgggaatttttgtctacagacccctgatcgatgctggcacactctctagagggaagcgaacaaggccttgaatcaatacgcggagctgaagttaggaccacagcacaacgggaccctgacaaagtggccaatccaataagaacgctcttatgacgtcattgggtgctagtcagattggtgttgcctgacgataggccgaaggccaatgggcggggcttggttggaaaaggcgggaaatctcacaaagggagggacagcagttccagatttctagaaaattccagacgtaggaactgttggtttctgatgggcctcaggataggctctgagaaaggaattgagatactttgagtgactcatttttgaaagaatagccaatcggaagccacagagtggtatgacataacttggtgctaagcagaattgtattcccactcaacaattggcctgcacgccagaggggaggggcgcaaaaggcaggaa

SEQ ID NO: 37327 - DNA, 863 bp, Artificial sequence
  DNA replication origin
tgattggctctctgcagtgcaccgtcgaggtagaaggctcagctcctagtcgctcccaaattactttgttggtgctcgaggcagccccatctcacgtctagtgctccggcctgggactgggtgtgggtgcccgcacgccgcggcagcctccggcgcgctcctcctgctgcagccgcttcaggggccgggcccagcgcggcctccatggcagcgcgaggccgtggcggtcgaggatgaggcgcgtggggtcggggtcgcccacggcgctgcccagcagcaggtagtcggtgcctggctgcaggcgcaggcagccgcaggtcaggtcggcgcggggcacccaggcgtcctggtcgccgcgtcgcacgggctgcgcccgctgcttgtaaacggccagcacgcgcacggccagccgctgccatgccgggcccgccgcctcggacgctagcacctgcgcgcggagaactgtggggaggggagatgtcagcccaggtcgtggggagcttccagggtacctctgggtcccgtggggtcagtcacagtgggcaggagcccgagaccggtgggtgggcttctggtatcgcagtggggagagaaaccttgaaccttggagagtttgaccctaaatcgtgaggggtagagcctgctggaggaaacatctttgagataaggagttaaactatagtaggtggggctggggacagggcagaagaggcaggtccagggtctctaatgcagtggagtcagaaggtatcaatggtggaattcttgggaaggaggggtcacattgccgggggaggggctctgggataaatttcgaggaccagaagaaggaagagactggtccctggaatgtgagggctgag

SEQ ID NO: 37328 - DNA, 1243 bp, Artificial sequence
  DNA replication origin
gaggttgcagtgagctgaggtcgcgccactgcactccagcctgggtgacagagtgagtctccgtctcaaaaaaaaaagataataatagagatgtcctgggacccaggcattctcttctaccttggacactcacggcttcctttcatgagggcagggccatgggaagaaagctgaggactggggagcagcacactcggccctgatgcgcccccaccccattttgctcctagcctgctcctgcaaccagcacgcccgacgctgccggttcaactctgagctgttcagactgtcgggcggccggagtgggggtgtttgtgagcggtgccgccaccacacagctgggcggcactgccactactgccaacctgggttctggagggaccctagccagcctatcttcagccgcagggcctgcagaggtgagtgtggcctgcagacaggcctggggggagcagaggtagggctggactcctggggctgagggaggaggggctgggggcctggattcctggatctgagggaggaggggctgggggcctggactctgggcctgagggaggaggggctgggggcctggactcctgggtctgagggaagaggggctgggggcctggactccccaggctgagggaggaggcactgtggaattgggaggggcatctggggccctgataccccatgcccccagctcctctgctcatgtagcctgccagtgccaccctattggggcaacaggaggaacctgcaaccagaccagtgggcagtgcacctgcaagttaggggtcacaggcctgacctgcaaccgctgtggccctggctaccagcagagccgctcccccaggatgccctgccagcgtaagtcttgaggggccaggccacaagcctgagtagagcgggaaggagacatcccaggtctccagtgcacagctgcagtgagggctggggccttgggaattgggagcccaaggctggaggctggactctgggccctcggataagcagggactgaaattctggactcttgaggaaaaggaggcttggggcctgaaggcaagggatgcttgcactcttgagtcctaaaggaataaacacttaagagtttgggtgcctggattcccggggcaggggcgaggggatcctgggggaaatgactaagaggttaatttctcctttggtctcacaggaattccagaggcaacaaccacccttgccactactcctggtgcttatagctctggtaaga

SEQ ID NO: 37329 - DNA, 2160 bp, Artificial sequence
  DNA replication origin
gacacagctggctgccgtggcggcctcctgccctcaggcctgtgccctgtccccaggaaaccaccttggcgccagggaaacctgcaatggcagcctgactttggccctgggtggccccttcctcctgacatctgtcagcttgcgcttctgtaccccaggacccccagccctcatcctgtctgctgcctgggcctcagggggtccctggaggctgctgtggcacaggcccgcctggcctggggccttagggggccctgaaagggtgaccttccactccacaccaggtcctaaggccactgtggcggccagccacctccgtgtggagtttgggggccaggccgggctagcggcagctgggctgagaggccgctgccagtgtcatggccacgctgcccgctgtgccgcccgtgcccggcccccccgctgccactgccgccaccataccactggcccggggtgcgagagctgccgcccgtcccatcgagactggccctggcggcctgccacgccccggcacccccacccttgcctacgtgagtcctgcgcccctcactctccctgcctttgcctgcctgccactgggtcctttgtccctacgggagcaggatgttcccttccctcgctggaactgggtgctccttgcctctcaccccagtctcagactcggtcccctcatacctcctccctgcagccagtcctgtatctcagccacacatgggcctgtctgctcatgaggggctcagcctctccccaacactcatcagcctgtgatgatggtgatgatgatgatgatggtgtgatggtggtaatggtgatgatggtggtgatggtggtggtgataatggtgatgactgtggtggtgatggtggtggtgatgatggtggtgatggtgatggtggtggtgatgatggtgatgatggtggtgatggtgatggtggtggtgatggtgatggtagtggtgatgatggtgatggtggtggtggtgatggtggtggtgatggtgatggtagtggtgatgatggtgatggtggtggtgatggtagtggtggtgatggtgatggtggtggtggtgatggtgatgatggtggtgatggtgatggtggtggtgtgatggtgatggtagtggtgacgatggtgatggtggtggtgatggtgatggtggtggtggtggtgatggtggtgatggtgatgatggtggtggtgatggtggtgatgatggtgatggtggtggtgttggtggtggtgatggtgatgactggtggtggtgatggtggtgatgatggtggtggtggtgatggtggtcgtggtggtgatggtggtgatggtggtggtgatggtggtggtggtgatggtggtggtgatggtggtggtggtgatgatggtcgtggtggtggtgatggtgatggtggtgatggtggtgatgatggtggtcatggtggtgatggtggtggtggtggtgatggtggtgatggtggtggtgatggtggtggtggtgatggtggtggtgatggtggtggtggtgatggtggtggtgatggtggtggtggtgatggtggtggtggtgatggtggtggtgatggtggtggtggtgatggtggtggtgatggtggtggtggtgatgatggtcgtggtggtggtgatggtggtggtggtgatgatggtcgtggtggtggtggtggtgatggtgatggtggtgatgatggtggtcatggtggtgatggtggtggtggtgatggtggtgatgatggtgatatgatgatggtggtggtggtgatgatggtgatagtggtgatggtggtggtgatgatggtgatagtggtggtggtggtgatggtgatggtggtggtgatgatagtgatagtggtgatgatggtggtgatagtggtgatgatggtgatggtgatagtggtgatgatggtggtgatagtggtgatgatgatggtggtggtgatgatgatgtaataacagtttccgagcacccatcccagggcctggctggatgcaggtacttgggtaatatttattgaacagttgtaggggaacaggacagctggatggtacctgactcctcaaaccaaccacagggggaaagtattcggtcattaaacacatatttatcagtcacctacgtgtgccaggcagggatgtcatcaggcccat

SEQ ID NO: 37330 - DNA, 1652 bp, Artificial sequence
  DNA replication origin
caggcccatgtgtggctgagatacaggactggctgcagggaggaggtatgaggggaccgagtctgagactggggtgagaggcaaggagcacccagttccagcgagggaagggaacatcctgctcccgtagggacaaaggacccagtggcaggcaggcaaaggcagggagagtgaggggcgcaggactcacgtaggcaagggtgggggtgccggggcgtggcaggccgccagggccagtctcgatgggacgggcggcagctctcgcaccccgggccagtggtatggtggcggcagtggcagcgggggggccgggcacgggcggcacagcgggcagcgtggccatgacactggcagcggcctctcagcccagctgccgctagcccggcctggcccccaaactccacacggaggtggctggccgccacagtggccttaggacctggtgtggagtggaaggtcaccctttcagggccccctaaggccccaggccaggcgggcctgtgccacagcagcctccagggaccccctgaggcccaggcagcagacaggatgagggctgggggtcctggggtacagaagcgcaagctgacagatgtcaggaggaaggggccacccagggccaaagtcaggctgccattgcaggtttccctggcgccaaggtggtttcctggggacagggcacaggcctgagggcaggaggccgccacggcagccagctgtgtcactggcgggaggcagaattgggggcggccctgtggatcgtagcatgggtccgcagtggcctggcccaggaggagcaggagggcaaaggtcacgggcatggtcacagcagagccagcacctggagggaagagaggtggctgggctggggatctcagccgcagcctctacccctcctggaggtgtcctgtggaactggggcattccacccccaacccgtccaggccccctccccggctgcatggaagcgaggaaaatagttccatctggggagaattactgtttacataacccaaaggggaaagaacgcagacaaaatcgagaattttgcctgaactaatccgtagcttaacaccccagagttatccgtcagtgtcgaggggcagggggccctggggagcggtgagcggctggagcagaggggctggccaaggccagcagacgtggaaacctagagagggacacagagacaagcagggctgggcaggagagggggcttagggacagatgaagactcagtcacaaagaaatagaggacaggacagaggcagagagaggacagtcagcctaggggaggcgctcggcacagagaagttgctgcaaagacagaggaacagacaggaggctgagaggctgagacagaggccaggcacccagaggccacagggagctgggagactgaggctcggactgcctgggggctgggataggtgggcaggtgggctcagagacacccagcctggcaggccctggggaggggagggaaggggacaggctaggggtgtctggcgggggatcagaagtgagagaccgaggcccaggcctgcagggatcagagccattgcctttcccacatggggccctaaccttgttctccacaccctgggcacggaaggggattatcaccaaacaacccagcctccctgccaccc

SEQ ID NO: 37331 - DNA, 1098 bp, Artificial sequence
  DNA replication origin
ctcagtcacaaagaaatagaggacaggacagaggcagagagaggacagtcagcctaggggaggcgctcggcacagagaagttgctgcaaagacagaggaacagacaggaggctgagaggctgagacagaggccaggcacccagaggccacagggagctgggagactgaggctcggactgcctgggggctgggataggtgggcaggtgggctcagagacacccagcctggcaggccctggggaggggagggaaggggacaggctaggggtgtctggcgggggatcagaagtgagagaccgaggcccaggcctgcagggatcagagccattgcctttcccacatggggccctaaccttgttctccacaccctgggcacggaaggggattatcaccaaacaacccagcctccctgccacccgcccacccacccccagcgccccacccttaaccctttcccacccgagtgcaaagcccagagagctgagctgaggaaagggatgctgggagctggaacctgggtggctctggggcttgggagcgggacagtgggatccccatggggtcaggggaagcagacacctgggttcccttcagaactcagggtgtggggaccggaagttagcgttctgggactttctgctcacctcaaccctgccctctattctgggcctcagggcctggagaccagagtccccacattctccacccatccagagttccccagagcagatgggggaacagatgttgggggcggtgggtaatgaggaggagagaggcaggaaggcaggagctgggacagggtggggtgccagatgccagggcgcccgtgggggcagaagcccagaccctaggaatggcaggagctgggaaggactggactctgaaatgcccccactttccccttccagggccagcagcctctggtgaggagctcactgtggactgggggcctcggagcctttccaggcccttggctctgaatctgcgcccaggaatgtccctgggctgggcatctctggggcaccctggcggttgaggtgggccacacctgccccagcctggcctcactgcccatgtccccactgctgttggccacat

SEQ ID NO: 37332 - DNA, 1020 bp, Artificial sequence
  DNA replication origin
ctccctctgccgcatgagaaacactggggcccaggtgttctcagctcatttgtcgccttccccaccatcttagaaagcgactgaggtcttttgaattccaggggctggtctgaaccttccaagagcacagattttactgaccttaaggctcggtgaacccacagctgacaaaaggttccagagaggaggaggaggggctggcttggggtcacgcagccagaggcaggggctgagcaaagtttccaacagcgattgtctcccaaaggtcagcccctgcccgatcgcgatggcggccaccacaaggcggggctgagccagtgggcaggggtggagtgggatggagcgggacccccgactgacagcctcccgtcctacctgcggtgagcctcctaggccaggctgctcggggctgtcctgctgctggaccgccgggggcaacggcactcacgtcccacaccgttgcgggtggcctggctggcaggggtccctgtggggatagcgtggctgcggttggtgagggattggggtgggaggggggtggcggtgttagattctgcgggctctgctctgagcccccgcccagcccagaaaccccactagcctggggcctgagaacagccacgccactccctcctgagagcccaccgcgccacagcttggaggaagagcctgcggggaactggctgcaggacgctctcttcttgagtgcaggtttggccaatgtcggggcctcagggctcgggttggggggtgcatgccaagagccagggaaaggaagcctgggtcccagatggaccccaggccgcccaggcaggcctcctatgagtctgctgggagcatggctggactctttcttaaagaggggtatgggctctctgtgggccacgactggtttctggatcccccaggaacactagggaactcacagcctggttcctcaaggtgctaagggccagagggtgccaccccctgaactatccagcaactatccagagagaaaggggacatgggggactggcc

SEQ ID NO: 37333 - DNA, 1287 bp, Artificial sequence
  DNA replication origin
catcagagggggcatgtcagagctgggggcccaggctgtgtgagtcagagtggaacttcgggattcaggcgcaggtccctccgctgaccctgcctgagctccccctgtatgggactttgccgggggttcgcgctgggaacacagacccctgccccatcaggctcagtgtccagagagggagggggagaccccagcagcgcaggtccttctgtgctctaggttgttggaaggtgccaagtgccttggagcaaagcaagtggggggggcggccacgggggcccggggattgcagatgtaagtggggtgatgcggaggggcatttgtgctgagcccaccgccagcacagaacccagctttgctgccacacaaaactgaggaagaaggcttaggtctcgctgcgtcttcctccccacctgggcgaagtctcaagctccggctcctggagggaagcttttgttccttgcagcttgagctgcctgagttgatgggcgcccctgcgggtgcccgggggcaggcggggaagaacagacggagctgccacagccgagcacatagtgccccaagctgggaaggagactgttttttttgttggggagagttctttaagggctggagaccttcaccctcacagcttctacagaaggccaggcctgcccaaggcacatctctgaggtgggttcaacccagagagaacctcagtgctgggctcacacagacctctaacccctgccttggtggcccagatataacggagtctccacgaggcagggcaggtcacccgcaggagttactgggcattgtgtggctgggtagggcctgccctcccggacatgttcaaaaaggccaggatggtaaccccagccatactgcctgggttcaaatccacctctgtcctagctgtgtgaccgagaacaagcttcttaacctctctgtgccttcatttcctcatctgttaaatgaggaagaaagaatggaccttcctcatggtgggcggagggggtcatgaggactgaatgagctgacatgcccacgggttcttatctgagctctctgggaaagtcgtgttccggaaccttctgcttcctggccctgttgtcggatgcatagtacgtacgtgacatggcatccatggtaggtctgggccgcatcacattgtcaaacatgttatgttttaggcagcagagcacatgggtgttcacagtaagagaagtaaagtctgcaaatagccacatgaccctcctccaagccagggttgtccccagatgagttcagtccaggttggcgttt

SEQ ID NO: 37334 - DNA, 1458 bp, Artificial sequence
  DNA replication origin
tggatggcaagatcatgtttgggacacagttttcaccagctcagtgaaaaaaggcttgggcagatttaattcactttttgcaaactaaagcagcaccaggagcatttttcttaggccttaggccagctggccttgctggggacccacacgagactttcaaggagggccccagagtgttcaggcttctcagaagggtcagatgaaccaaatgaggagccctggaatagaggaggatgacagctgaagaggcctggagggccccagattgttcaggcttctcagaagggccagatgaaccaaatgaggagccctggaatagaggaggatgacagttgaagaggcctgtaggcccccgatgtttaagaggacaggcggagggagagatggggagccgggaggggtgaggcagaagccagaagttttaggggtgagcccatgccaaccagggcttcagcaggaatggggtgggagggagggggtgaagggatgactgctgagctgtagccattggagtggccacagggaaaccataggacattggtcagaggagtggacaaggggagaagagaaagccgatcaggacatggtagaggctgggagcagaggaccttctgggagccctggggagagctggaggagactcggaaagagcagcccccggagaagggaccatccatcccacggcgaggaccgggaccgaggtccttggagcccagtcaggcccagtggtcagggctggacctggaggtgaataggtgtgggccccacggtgagatggccctgcacacccaccacaaccaaacacgacggcgagcgaggctgggaaatggggccttcccgtactgctggtggaaacggaaactggggcagccacctggcagctcccaaaacgattcaacgtagagttcaccctgtgacccagcacacaggttcgtggcagcactatttgcaacagccgaaaactggaaacaactccagtgcctatcacctgatgagtgaatacattgtggtctacctggacaatgggactttcagtcttgaaaggagtgaggcaattatctgggcgtggtggctgtacctgtagtcctacctgtagtcccagctactcgggaggctgacgcaggagaatcactgaaacccaggaggtagaagttgcagtgagccgagattgcgccattgcactccagcctgagcgacagagtgagacaccgtctcaaaaaaagaaaaagaaaagaaaggcgtgaggctgtgacacgtgctatagtgtggatggaccttgaaacacggtgccgagtgaggaagccagactcggaaggccatggagtgtgtgattgcagtcacatgaaaaatcgagaataggcaaatccataaagacagaaaggagattacttggtggggggacaaggaacagggaagattgtggggagatggttaaagggtgtgggtttttttgggagg

SEQ ID NO: 37335 - DNA, 774 bp, Artificial sequence
  DNA replication origin
gccaccaggtccttccttgtctccttcccctcagcagtttctatgaaccaccctggcagtaatggtgcagatggctcgcgcacagctggtggtgacccgactttcctgcctccaccctggggctcctcagaggcttcatggaacccaaactgctggtctcacctccgagccctgccgtcgcccagggagggcggctccgtccctcctgcactccctaatcccgctctgaatcaccgcttctgttctgggtcggagaataaaggtggggtttccaagtgatggccctacgttattgtctgaagctcccttctcctccccagggtggaagtgataatgccgggaatccgggaatcccggggaggtgcaggaagacagcgagctcgaggcagtggggtgcgactgagccggatgtgctgagctgcccggggcacggggcggttggggtagagaaaggctttcagagctgggggacaggacggggccccgggtgagcggagagctgggttatttcacgggaacagctggtgacaaagccggaggggtgtgcggggccggcgagagactgggattgtgtcttaagaggcatagggagccctgaaggggctgcgagctgggaaggggcagggccggcgctgggtgtaggggacagaggggagaggaggaagccgggccgcaatagaaagacgtggacggggctggacgtggtggctgacgcctgtaatcccagcactttgggaggccgagacaggcggatcacttgaggtcaggagttcg

SEQ ID NO: 37336 - DNA, 772 bp, Artificial sequence
  DNA replication origin
atcaaaaaaaaaaaaaaaaaaaaaagaagaagaaggaaagaaggaaaaagagaggaaggaggaggagaaatattttttccagtctacacaatgaacatgactatatccttttggggagggagtacgtttataatataaattagtaatttttggtattttgatgttggtggtctttttcaggcctcatgatgtaaatatccaccttctgttgagatcagaggaaagaaggaaggtgctgcttggggttccccatctgatcccccttggtccagccctggttttcctgaggcaggagggagggatgaagtctttggagaagagttgggtgttgggcgctcggcagtgccggcagtgcaggaggcaagcctttcagttaggctgaaggttcagacaggcaccccaccaagccggcttcctggccctgactccttggggcagtgcagggaccacgtgcaccctcagctcaacagagcccactctggatgcaggcgagatgcggaaggtgcaatggaggcaggtggggggcctggcagaagctgaaagacgagtgcccgagacacagagagatgagcgcagagactgacagggatgacggatgcagcagggataaagggcaggagggagttggagacagagatagggaggagagaacagccagagggcaaatcagacagagaacagagaagagatatgaagacagaaccaggacagagtgacctgagtcaggcagagatggggacacattgatatggagagtgatacagtcagaaaa

SEQ ID NO: 37337 - DNA, 2093 bp, Artificial sequence
  DNA replication origin
ttggggtgtaactttccaggccttctctctccttcggtggggtcccagaattccaaccccgcagcctctgccctctggaaatccaggagatcgggtacccagtcccatcctgttttagggtcccaggagtccggacccccagtgcctcctttctcggtttccaaatatcctgtccagctcctgcctgcgcccgggagcccgcccagcactgcctcttcccacgccccgcccctccccaggtctcagagctccggcagcagctgcgcctgcggggcctcccagtgtcggggaccaagtctatgctcctggagcgcatgcgcggcggcgcgccgccccgcgagcggccgaagccgcggcgcgaggacagtcccgcgggtgctccctggccgcgcctcaagcccaaggccctggcagccgcccggcgtcagggctcggtgagggcggggctatgagcttgcggaccaatgaagagaaagcaaagtgggccggggcggggtgtcgaaaaaactagccaatgaagtgtgggggcgaggaccagcggtaggaagccttgaaggcgaggggacgtggttcagactaacagggggcggatctttagagaagaggagccaatgaaagaatagggggcgaggccaaaggggttgatgagcgaggggtcgcgagaggatcaaggggtggagccacacgttgcgagtgggtggggttgcgccctgtgggcatggcttatgggcgctcgccctcttggctgctctaggtcaagcccagcgcagcatctcacaggccacctcttccacgtgccgcggataccccggggacggctccggctccaactcccactccggctcctgctgcagctccagccctgaccccttcctcagggccgggctcagcggctctgactctggaggaggagctgcaggaagcgatccggagggcgcaggtaagagggtgtgggttgaatccggctagggttctccagtcaggtccaggtcgcagtcccgagttcacgccaaatttctccatccgcagttgcttcctaaccggggcatcgatgacatcctggaggatcaggtggagcctgatggtaggatccaaactgctagatttaggggaggtgggggctgaggttctggactcctgcgtccaagggaggcgtgagctggggagctggatcctggaaatggggtatggggggctggcgcccggacccctgactttccaagctcatgtaccattctttatcccgcagaccccctgccccctattcccctggacttccctggctccttcgacgtgctgtccccctccccggactctgaaggcctctcatctgttttctcctcttcactcccgtctcccacgaactcctcctccccttctcccagggaccccacggactccctggactggctggaggccctgagcgggggtcctcctctgggttctggtcccccaccccccagcatcttctccgctgacttatctgactccagcagcagccggctgtgggacctgctggaggatccatggtgatggattctaggatttacagagacagagaactgatgggggtggagagaagctccttgtgggaggagagggaactaccagcagagcccctcctaccgcagacacaggatcggagacaacctccaaccccacctgcctcctgaagtgctgctgacatgcaactgccttaactttgcctacctggcctccttatgatccccctccggcgtggtatggttggggggcttcttttgctgctggccacggcaaacaagctgcttgctgcttccttcagagacctcatggatgttcttacatgcccccgaccccggtagatggctccctgttgtttggggagcctggaaggtggttatgccttttggatgcaggagaggagcaagaaagagtggagagggagaatgggggagccggaccctgacctccctgggttctggttggagatgaaaaaattagaagcatcaggtctaagatcagcttctcttggaagcagagcctgagacaagatataaatgccagtcatttattaaagaagtgttctggctgggtgcggtggctcacgcctg

SEQ ID NO: 37338 - DNA, 2205 bp, Artificial sequence
  DNA replication origin
aacgtgtggctccaccccttgatcctctcgcgacccctcgctcatcaacccctttggcctcgccccctattctttcattggctcctcttctctaaagatccgccccctgttagtctgaaccacgtcccctcgccttcaaggcttcctaccgctggtcctcgcccccacacttcattggctagttttttcgacaccccgccccggcccactttgctttctcttcattggtccgcaagctcatagccccgccctcaccgagccctgacgccgggcggctgccagggccttgggcttgaggcgcggccagggagcacccgcgggactgtcctcgcgccgcggcttcggccgctcgcggggcggcgcgccgccgcgcatgcgctccaggagcatagacttggtccccgacactgggaggccccgcaggcgcagctgctgccggagctctgagacctggggaggggcggggcgtgggaagaggcagtgctgggcgggctcccgggcgcaggcaggagctggacaggatatttggaaaccgagaaaggaggcactgggggtccggactcctgggaccctaaaacaggatgggactgggtacccgatctcctggatttccagagggcagaggctgcggggttggaattctgggaccccaccgaaggagagagaaggcctggaaagttacaccccaaactcaccgtcagctcctccagtttaagggtctgaagttccaacttgtgtggggggggcgaggggctagggactcctggtgggcagggagtgaggggagagggcttcatcctggtgataatcgtgaggggcgaacaaaggttagagaggtagagggggaaaaggcgttctggggtcctcaaagacggggagctggggaagatgcagaaaagtgagggtccagaattctgggtctccaagggcgcaaacatggggctagatttctgtgcatgggggaggaggaactaggcgttcagactcgggtctgaagggcgaagggaggggctgggatcctggactcttaaaccctgggagaagagagggttgggggccccaatcccctaatcttggactcgaggtttgagggaggaggatgctgggacctgaatttctgggtcccgggagaacagaagtgggtgtcatacctaggatgtggctgctgcgagtctgtcccttcccacagagatggcccaggaggacccagggcggacccctcggcttgggggtccgccctggatccctgtctcggctctgggggcatgtactggtggtatgtcaagttccccctgggcttggactccctccaacgttgggagatcttgggagactcctgaaagagcaggtgtgatgttttaggcttcagcgcggctcccaccttccggccccaggactacatgcaaagtatggggtcagctcggtgccaccgaagaggagcaaaaatggcagcagcaacaagggagacaaagactaggctctcagagggacctctccctccagtcgagactcaccttctttggggacctccaaggaggacaatattctggctcggggagcaggaccccagggctgaagaggaaaggggccgtgcccgagggcaaggccggggccagaggagggtctgaggctgagatccacgggtccggatccgagactggagagacggtgaaggaccctgagaggcctgcaggcagcaagccaggccgggaggagcaaggctgtgtggaaagcggggctccagggtgccggagggcaggccagggagcaagacttgattgctgggagatgggcgcctgaactggatctgagggcggaggtgtgggggggctccggttgctacattctcaagtaaagcaggaattttctatcacaaaggggtgtggtagctgaggatcacagatgtctgaggttttgctaggacaggggtggggcctgcactcctggttcttggggagagggagaggctgaaagctacatccaggccggccgcggtggctcacgcctgtaatcccagcagtttgggagactgaggcgggcggatcacttgaggtcaggagttcaagaccagcccggccaacatggtgaaactccgtctctactaacaatacaaaaattagccaggcgtggtggcacgtgcctgtaatctcagctactcaggaggctgaggcaggagaatcgcttgaacctgggaggtagaggttt

SEQ ID NO: 37339 - DNA, 804 bp, Artificial sequence
  DNA replication origin
attccaggtccctcccctcccaggatcccagggttgagaccctcagccctgtctttcagaccaggtgtctgggtccccagcttcctccttcctcggagcaaggtgtccgggtgtgcagccccctcctctacagcccctgggatccggaagttatggcccaaggctgctcctattcccacctccttcgggccctttccctgctgaattcactctcaggggcggcctcctgacctccactctgagccagccctctatggggcccctgccctgccccctctccgtccaggtccccatcccggccttggcaatgaccctggcggcttcctcccagcgttcccaaatcattcgctccaagttccgatctggtgagagagggctctctttatgcgtgggggatgggatcctgagaatgctgtactctggggtgggaagggaggggtggtaggtcccatgaggcctgtgttttttgtgcaaaaggtcatgttgcataaaggaggcccaagcacaggggtccggctgtggtggatcaacgagtgtgcaaatggctagtagcatgctcacggggggagcaatggggattggaggccaggggtaggcgtgcagagggctcaagcactgaagagaaacaaaggcttatactggcgcacacgcaggggcagaagagcagaggagggacctcagaggaccagtgtgggagtttgggtgaggggacaatgagctgtcaagctgtgaaagtgtcaaaggtcttgttttaggtcccagggcaggcaaaaagtctgcaagtatagccgggtgtggtggcgc

SEQ ID NO: 37340 - DNA, 1142 bp, Artificial sequence
  DNA replication origin
gtagggtgtcagccaccaggttctctggggaagggactgggaccagagaggggatagaaccgttgaggagtgcgccccccccgtccaccccaggggcttctcaccaggtgggctcggcgaagctgtgctctggggcgggttgagtctagaggccgaggctggacaccacaggctccgccccaccagcctgggaccgcctccaacccaccttcctggggtgtgacgggagccccgccggggaccctgagaaggggtgggagcacccgctgggagggcctgtgcgggccttgggggatgctggggggtgagagcggggacgtcagggttccccggctcgctcctcctgcacgtcctggggttgtggggtcggggggaacggtggcaggcggactgacagaagcaggtgcccggagaggggcgccgggtgagcagcagcggcaggtggtcgtgtcctggccctaccggcaggtgccacctgtcgcctactttttccctgacgcagcaactggagtcaagttcaggggagtgaaaagttcaaacggggggcccagattcctggatccaagaaaggagagggatggggacctggagtcctgggtttaaagaaaaagaggcaggggcctctggggtgttgggaacagggacagaggtgttcggattcggcggtgtgcccggcaggcagaaaggtccagagggggctggggacttagattcctgggtctgagggaggagggggctggagtatggatttgggggggtgtcgaagggagaatcgctggttcccactggcaggactgagggccttataatcggcagagcaagcttagggccgtgttctgaggggtgtgggaggctcctctgctcttgggttggattacatgcaaaagggcgagccaaggccgtggctataaatacctcctcagactcggcaggggcccagacaagggccctgcaaccttgttctgcagaaaatcatcattagcgcccctgagtcttaacaatcgaggcgctgccgataccacggatacctttattgctccctggcattcacatcctaagcccatgctcccaccgtcccatccgctacttcccgaaaactcaatctcccaacattccacgcgggataagaactacaactccca

SEQ ID NO: 37341 - DNA, 779 bp, Artificial sequence
  DNA replication origin
ctcaagatcccagaggaggcggcggagcctacggagttcacggtgcaaggcatcgtccgtcactggaccagtgaggcgcaggcgcgagctccccagggggaggatgaggggcgggtgcgaggagaagctttcgaagatgtcccctgtgaggccgaaggcggcgcggttagagtctgaaagtgggagtgaggtagttgcatcgggaagagccgaggctgcgtcacacccaaaggaagaaaaaaactacaaaccccagcaactcctggggcggggtccgttcacacgctactctaggagcccctgggcatgatggaagttgtagttcagacgatggaaggccaccgttgcctgggaaacggcttcccaaatccccgagaaagggctgggaacttgccttacagattcctaaaggtggaggagtcaagttcaggggagtgaaagtcccgagacctggactcctaggggtggtgggtgggtggctggtggagggaatggactagggatgcgaaccccagagaataaagggagctgggggcttgaactcctgtatcttgacgggggaaggggctgggtcctgcacttatgtcctggtggggagggacaggggtccagaatctggggttagaaggagactggggatctggactccaagatcctgagaaaagaagaaaggtgaggtggttcacgcctgtaatcccagcactttgggaggccgaggcgggcggatcacgaggtcaggagttcgagaccagcctggccaacacggtgaaacccccgtc

SEQ ID NO: 37342 - DNA, 830 bp, Artificial sequence
  DNA replication origin
ggggttagaaggagactggggatctggactccaagatcctgagaaaagaagaaaggtgaggtggttcacgcctgtaatcccagcactttgggaggccgaggcgggcggatcacgaggtcaggagttcgagaccagcctggccaacacggtgaaacccccgtctctactaaagatacaaaaaattagccaggcgtggtggcgcatgcctgtaatcccagctactcgggaggctgaggcaggagaatcgcttgaacccgggaggcagaggttgcagtgagccaagatcgcgccattgcactccagcctgagtgacagggcgagactccgtctcaaaagaagaagaaagctgacagccccaatgctgtatcccattgctcctcacctgtgtccacagcctcccgctctgcagggggagggtcccacgcggctggcggcccgcggccagggcccagctgatagtggctgagcagatggtgcagctgggcgggggtcaaggtggggtggtcggttcttaggctgctccatgaagcctggtgggaagaccaggtgagaggttgatggtcattacggggcagttaagaaatgaaatggaagggcttccataaggggagtgggtgtggtgggaagataatggcatctctgcagtgtcttctgggcactgtgaagtctgtttatcaccaaagtgatggtggggaagggtgtgctcccagcaatttgtaaaaatgtgatgtgcctcaggataattgaggatacaggaaatgagtagggtggaaataaataagattggccattcgtttatattattgaatctggcgatggtacttggggat

SEQ ID NO: 37343 - DNA, 1440 bp, Artificial sequence
  DNA replication origin
cacccggccatggtgcgcccgtcccggggcgccccagtcacgcacaacgggtgcctcctgctgcgggaggctgagctgcacccgggcgacctcctggggctgggcgagcacttcctgttcatgtacaaggacccccgcactgggggctcggggcctgcgaggccgccgtggctgcccgcgcgccccggggccacgccgccaggccctggctgggccttctcctgtcgcctgtgcggccgcggcctgcaggagcgcggcgaggcactggccgcctacctggacggccgtgagccagtcctgcgcttccggccgcgcgaggaggaggcgctgctgggcgagatcgtgcgcgccgcagccgccggctcgggagacctgccgcccctcgggcccgccacgctgctggcgctgtgcgtgcagcattccgcccgtgagctggagctgggccacctgccacgactgctgggccgcctggcccggctcatcaaggaggccgtctgggtgagcgccccccaatcgccgtccagccccaccagcgccccaagtcccttctccagcctcccttccctaccttcaacccttttcatagctgggctggatactactgttcccatgacgcctcgggaaggatttggggttttgggttttgtttgtttgtttgtttgcttttgtttttgagacggagtctcgctctgttacccaggctggagtgcagtggcggtcttggttcactgcaacctctacctccggggttcaaatgattcttctgcctcagcctcccgagtagctgggattgcaggcgcctgccagcacgcccggctaattttttgtatttttagtaagacggggtttcaccatattggccaggcttgtctggaactcctgacctcgtggttcgcccgcctcggcctcccaaagtgctgggattacaggtgtgagccaccacacccggtgttttggggttattaagcaaggggcccccccatagaatgctgggagatgtagatccactgcacttagagggaagcccaaactcaccttaggagagctcacctaagcacgaactcaccttaggaagaaaccattatgggagatggtgggggagagatcccactggatgagaagttgacagagatcagtgtgagaattcaccgcagcccattgggcttggagcttggatagcagtgagcgagttcattcttggaggcgaggaagcacaaatccactggacctacagatggaagttccagaaagaaaccattcagagtgggggaaacgttccatcctattgagctagggcctaaccagagaggtttaaggagtttcttgggggtaaaaattggagaagaggacctgaaggagctagatcactcataatcatagggtgtgtatgttttaaaaagtaaggagagaccattctaaagcttgtgggattagaatttg

SEQ ID NO: 37344 - DNA, 1805 bp, Artificial sequence
  DNA replication origin
cctctgttaggggggtgggaataataggtgagtccattgcaggacttaactcctgcaacctccacctcccaggttcaagcgattttcccgcctcagcctcccgagtagctgggattataggcatgagccacctcacctggctaattttgtatttttagtagagagagggtttctccacgttggtcaggctggtctcgaactccctacctcaggtgatctgccggccttggtctccactgcgcccggcctcttttttttgagtctcactctgttgcccaggctggagtgcagtagcctgatcttggctcattgcaacctctgcctcctgggttcaagcgattcttgtgcctcagcctcccaagtagctgggactacagtcatgcgccaccatgcctggctaatttttgtatttttagtagagacaggtttcaccgtgtctggtcttgaactcttgacctcaggtgattcacctgcctcggcctcccaaagtgctgggattgcaggtgtcagccactatgcccagtccaagggaatctctttaaaagtacccattcattgcttgaggaatattgagaaaaactattattggaaggggaaatatatctggaagcctttaccatggtggggtgggggtgaaataatggacaggtgggaccagggatggggaaaaggagatttccttggaaaggtccattctttgagggtgagggtagttgcacagttcattttagaaatagggatctccttgaaagcatctaatgcttgagggaaagaaatggtagagcccatgttaagaaatgggtctctggctgggtgtggtggctcacacctgtaatcccagcactttaggaggccaaggcaggcggatcacaaggtcaagagatcgagaccatcctggccaacatggtgaccctgtccctactaaaaatacaaaaattagctgggcgtgatggtgcgcgcctgtagtctcaactactcgggaggttgaggcaggggaatcgcttgaacccgggaggcggaggttggagtgagccgagatcgtgccactgcactccagcctggcaacagagcgtgactctgtctcaaagaaaaaaaggggggtctccttgtacatagccggtcttcgggatgggtgttatgggaccatccaccatacaaagtgcctgggaagagtccactcagtggcgttgcgggtgcttagagagtcctttgagatccagatctccttggagtgtctattcaaagtcggtggggggccgggcgcgatagttcacgcctgtaatcccagcacttcgggaggccgaggtaggtggatcacctgagatcaggagtttaagaccagcctggccaacatggtgaaaccctttccctactaaaaatacaaaaattagccgggtgtggtggcaggcgcctgtactcccagctactcaacagactgaggcaggagaattgcttgaactcaggaggcagaggttgcagtgagccgagatcgtgccactggactccagcctggaggacagagcgagactccatctcaaaaaaaaaaaaaaaaaaaaaaagaagaagaaggaaaaaaaaagttggtgggaatagaaaagttgttgtagaaaacagagagaacagatctgaagatatggattgaagtgatgtccttagtgcatcctcgtttcccctccaggactttgtggtgtatgtgatgacgcgagagcagcacgtgtttgggcgaggtgggaactcgtctggccgcggggggtccccggctccctatgtggacaccttcctcaacgccccggacatcctgccgc

SEQ ID NO: 37345 - DNA, 746 bp, Artificial sequence
  DNA replication origin
tgaggtggctactgagcagggcctatgtgggtggagtatagaagggggcgacacctgcagagtgagtgaatacaggttcctagatcaggcctgctgggactaagatgggcggagccgctgaggggccggccttggataagacggccttaggctgggttggctgccaagtgggatcacatgggaaaggaaggggctgaaggaagatatcactgtagaggcgaaggaaggcctggaacagaaggtagagtcaatggtcaaacagctggtggtggaccgcgcctggcaggggtggggcctggcgcattgaaagcacgggtctgctcagggagccttctaaacgcttttctgtatctgagcttccttttgggagatagaatgttgtagcaattcaactgatgggctttgaactggggtttgaattccaacccattctgtgccagttaatctcagtaaaatcctaggtgaggattcaatgggataatatattcaatgtatataaagggcctagcacagggcttggcacagagtaggtgcttaataaagaatgacgattataagcattgtctccgccaccccctcgacaaagtatccattgagcacctggtgtaggccacacattttcctttttgtttttttgttgttgttgtcgttgttgttcgagatggagtcttgctctgttgcccaggctggagtgcagtggcacgatcatggctcactgcgacctccacctcccggttcaagcaatt

SEQ ID NO: 37346 - DNA, 2084 bp, Artificial sequence
  DNA replication origin
agcccccgctggctacccgcgccacggcgcctccgggggtcctcaagatcttcggcgccggactggcatcgggcgccaactacaagagcgtgctggccacggcgcgctccacggcgcgcgagctcgtggccgaggcgctagagcgctacggcctagcaggcagccccggcggtggccccggcgagagcagctgcgtggacgccttcgctttgtgcgacgctctgggccggcccgcggcggcgggcgtgggaagcggcgagtggcgggcggagcacctgcgcgtgctgggcgactccgagcgcccgctgctggtgcaggagctgtggcgggcgcggcccggctgggcgcggcgcttcgagttgcgcggccgcgaggaggcgcggcgcctggagcaggaggccttcggggccgcggacagcgaaggtgagcggcgggcggggctctggggcggggactcggtgccagagaggcggggtccgtggggcggggcctgggcggggcttgtgggactcgcgggctggctgggggcggggcccgcgggaggggactgggaggggactggacggtgcgtgttggactctaggcagagctagagcagggccgggggcggccagatgggcgggcctgagagttgggtggggcttgttgattgagcaggagttttacaggggccaagcttggggcttaggcgggacgggggctggttgctggtggtggcttggagtggcctgaagtggctccgaattggggttagggccttctgcaggcatttcagactgccttggaggaggtggggtgtgtagcggggtctgcggagtagtagatcctgaggagcgtttgtggagtccagtggaatgggcaggagtccgcaggggcctaagggattcgccctgtgtggtaggttagaggacactagcaatttgctgatctttgaaagttcctttctctaaccaatccccactttctggtaaggtttctgcgaggtctgttaggtgtacatcctgcagcttaatggcttaaactgtactctcctttgatgtggtctcttggggccaattaggagaaagagaaatcaatagtgcaactgttttgatactgaatattgacaagggtctttttgaattaaagaactagtcctggccgggcgtggtggctcacgcctgtaatcccagcactttgagaggctgaggcgggcggatcacctgaggttgggagttcgagaccagtctggccaacatggtgaaatcctgtctcttctaaaaatacaaaaattagccgagcgtggtgacgcatgcctgtaatcccagctactcgggaggccgagacatgagaataatttgaacccaggaggcagaggctgcagtgagccaagatcgcgccactgaactccagcctgggggacagagcgagacttcgtctcgaaaaaacaaacaaacaaacaaacaaaaaactgtcctccagaaaaagaaaaaggaattggagacctaggagccggaagagtaagcacggacaatgttcttgggagcgatgcagagcagatgggcggggcatgttgtggggcggggcctgtggtggggcggggcttgtggaaaagcgtggtctggggcaaaaactgttgggtcccgcgaggagtggtggcatgtggtgagcatgggtctctgtggtaggaggcagctctgccaagtaggttgaggtggctactgagcagggcctatgtgggtggagtatagaagggggcgacacctgcagagtgagtgaatacaggttcctagatcaggcctgctgggactaagatgggcggagccgctgaggggccggccttggataagacggccttaggctgggttggctgccaagtgggatcacatgggaaaggaaggggctgaaggaagatatcactgtagaggcgaaggaaggcctggaacagaaggtagagtcaatggtcaaacagctggtggtggaccgcgcctggcaggggtggggcctggcgcattgaaagcacgggtctgctcagggagccttctaaacgcttttctgtatctgagcttccttttgggagatagaatgttgtagcaattcaactg

SEQ ID NO: 37347 - DNA, 1080 bp, Artificial sequence
  DNA replication origin
gcgggccggcccagagcgtcgcacaaagcgaaggcgtccacgcagctgctctcgccggggccaccgccggggctgcctgctaggccgtagcgctctagcgcctcggccacgagctcgcgcgccgtggagcgcgccgtggccagcacgctcttgtagttggcgcccgatgccagtccggcgccgaagatcttgaggacccccggaggcgccgtggcgcgggtagccagcgggggctcgggggccacgcccgccgccagctccggcagcttcttctcgctggcccagcgctgcgcgccccccggggtcccagggcctcctgcgccgctggaccccgtggtcccggtccccgagccccggaagagctgggagatgcgcttggcgcggctaccggaggctcccccggccgccttgacagcgcccactcgccgcagctccacgtgcggcgggggcggaggtagcggctcgctgctgcggctccccgtgtccgacgaagaagacctgggagtccgccggggaacagagtcgcgggagagagacccaggacgacacgccaagacgggggtgggggcatattaggagggaagtgggcagagacccagagggaggacagggacccagggtggatggacggggcgggggtgagggtggggacagacgcgaggcaaagagagagagaaaaaataaataaataaaggcaagtcccacagtaggaaattccaagaggtgagcagggaggggaggaaggaaggtgaatcaatccccctgctccttctgtccccgtccccgtgcccatccggcctcactccacctcctagcctagctcttactcccaccgcgccctggtatcactgtgccccaccgtctccccctgcccaccagctcgtttgcccaattcaggatgaggaccggagccaacactttgcagggactgggcagtgaacagggacagatgggaagcaggtgtgcaggggcaggagtcctgcagagatggcactcacttgacagaggctgcgctgggccagcgccgccccagcttcgccagctgcttcctgggggaattgatccacaggcccacgggga

SEQ ID NO: 37348 - DNA, 1388 bp, Artificial sequence
  DNA replication origin
ttcagggcccaggaaagctggggtccgcggcgggggcgtggccttggcgatgggggcgtgacttcctgttgggtgtggtttcggggcacggggtgtggcttcctgccgggggcgtggcctctggccccgaggacaggggttcccttgggtgtgttcaggcttgacactgttgaaggcgtgattatctctgggatggccggctactgggacgggcttgtctttgccagggcaggaactccacgccctgccaggactgctctttacgctttctctaacagtgttgcccaaaatgatcaaggaggaaaaaccttctccaaatatcgtaaccccgggggaggcgaccacggagtcgtccataagcctccagcctctgcagcccgagaaaatgctggcaagccgccttctggggctgctgatctgcggctccctagcactgataaccggccttacctttgcgtaagcaacccattgaagaagacaggcttggcttggagtaaggggcggggcttccaggaacccaacacagaagctggtctgggggctactgaggcctgagagcaggactttcctggggatggagtgcggggggcttgaataggaggacttcgaagggcgaggcttaggtaattgctagaataaggtcacaaagggggaggttgggaggggtgtcccccacacaattagtacccaaaccggttccatgatctgcaccccactcccacccctaggatatttcgtcgaaggaaggtgatcgatttcatcaaatcctcactgtttggccttggcagtggagcggccgagcaaacccaggtcccaaaagaaaaggccacagattcgaggcaacaataaagatttatcttgttgtctaagcatctgactcactccccgggacgggactgattctagcctttggttccccgagaggagaggtctggggatgggctccggcctgagggaggaagggcagaaaaccgggacccttgggtcctggaggggaccaactgactgcgatgtaattccagaatcaaggaatggggcagggccaaccctacccagatctcctcccccaggcctggtctcctcacaggacgccccctccccgctcttcctgccgggtttcctcttgccttttcctgtcccccacccagtgctgggagccgtggcagaggcaagagcagtggaactgacccaggccagtggagccagggcctccgggtgtgccggacccgaagcagggtaagagccagggacccagcagcccaaacccctcctccctgggccccaagactcagtcccccagccatcttccatcccaggacccaggaatccagggtaccatccctctcctccccctggactcgcaagtctgagccccagccccctcctcc

SEQ ID NO: 37349 - DNA, 918 bp, Artificial sequence
  DNA replication origin
gctggagtgcagtggcacgatcacggctcactgcaacctccacctcccaggttcaaactattctcctgcctcagccccctgagtagctgggattacaggtgcccgccatcacacccagctaatttttgtatttttagcagagacggggtttcaccatgttggtcaggctagtcttgaactcctgaccttgtgatccgcccgcctcggcctcccaaagtgctgggattacaggagtaagccaccgcatccggcctctacttacaatctttactgagccttgttggagcccacttactacttacctgcgtcctggtcctgtgccttcgtctgaccatctaggaatgtcatagatgatctggccccagcccttagccctgacctctccttttagccatgccccttagtgggcaaatacaagccttgaccctgcccctccaggtgtgatgttgcaaactctgatctggtgcaagaactgcaaaaaggaggttcacgcttgtcgaaagtcctacgattgcgggggtgagagaactggacccagcaggaggaattggtgcaggtggggtggggcgagaggagaggcagtctagagagagcctagatgggggtgtgggggcagtagacaagaaaaggtagggtttaggccaggtgcagtggttcacacctatagtctcgcacttcgagaggctgagacgggaggattgggaagccaggagtttgagaccagcctgggcaacatagcgagactctatctctacaaaaaaatttaaaaattagtcaggtgtggtgttgcgttcctgtagtcccagctacttggaaggctgaggcaggaggattgcttggacccaggagttggagactgcagtaagctatgatcataccactgcactccagcccaggcaaaagagtgagaccttgtct

SEQ ID NO: 37350 - DNA, 1225 bp, Artificial sequence
  DNA replication origin
tgtcgggggccgactctaagccctggcaccggaagagagagggcggcggattggacctcccggctccagcattgcaactgggcgctccgtctcctggtccacgcaatgatgctgcggctgctcagaagccaggtagcctgccctgggtgaagccttcgcgcaggtcaatgacggggcggaggggcagggcgcggtcccctgcatccccgatctggggagcggtgggcccaggggccatcgccttagcccctggcgctggggctcggcgccaagtgacgggcggggctccaccttccagccatccgcccggcccgggagggcggacgctgcgagactcccggccgcgccctctccttcctctcctccccaagccctcgctgccagtccggacaggctgcgcggaggggagggctgccgggccggatagccggacgcctggcgttccaggggcggccggatgtggcctgcctttgcggagggtgcgctccggccacgaaaagcggactgtggatctgccacctgcaagcagctcgggtaagtggggactgccccactcagttgttcctgggacccaggaacaactccttcagaaccaggaggtgcacccccaacctcttctccaggtcttcctaaggccctaggaatctccgccacctccccagccattactcctccaggaaccaagatgctccttccgctcctgaccctccagcctctcttgttttacttgaactatcgtttcccatcaccacctctgtggtggattttgcgcctcacagacaggtactcctgagaaacaggctggtggaagagtccagtatcagcggaacttacaggaggggagactcgagattccttcaggaaaggtgtaggaacctggaccactttctttttttttttttttttttttttttaagacagggtccctctctgtcgcgcaagctggagtgcagtcagcggtgctatcgcggctcattgtgagctccggggatcctcccgccttagcatccggtgtagctgagaccacagacatgtgccaccatgccaagctaattttatttatttttttttggagacggagtttcactcttgttgcccaggctggagtgtaatggcatgatctcagctcaccgcaactcccgccccccgggttcaggcgattctcctgcctcagcctcccgagtggctgggattacaggcatgcgccaccatgcccggctaattt

SEQ ID NO: 37351 - DNA, 974 bp, Artificial sequence
  DNA replication origin
gaccatctatgcagatcacgcagaacaagagaaatttctgcgccccatctgaatttctaagtttggggggagggcgtgatctgacactgaggttccttgatcctcagcaaggcggcaattgctgtatgaaagaagcgaccgcatctgagacacaagtatcctgccttggaagcctctcacctggccgtgggccaacctcaacctcatctgtccctgctcagatgctcagaccctggacatcccagcctcctcctccctgatgcaatcctggtgtttctttcaccagagaagccatcccaggcccaggcaggtgctcctgaaataacctggggggaggggtggctgaaagtccctgactggagttggcagccaagccaggccctggagtgggcacccagagggaagacaggttggctaatttcctggagcccctaagggtgcaagggtaggccttctgtgtctgagggaggagggctggggctctggactcctgggtctgagggaggaggggtggggggcctggactcctgggtctgagggaggagggtctgggcctgtactcctggatctgagggaggaggggctggggaacttgggctcctgggtctgagggaggagggagctttggtctggactcctgggtctgagggagtaggggctagggatctggactcgtgggtgtgaggaaggaggggctggggtcctggactcctgggtctgaggaaggaggggcagggggcttggactcctgggtctgaggaaggaggggccgggagcctggactcctaagtctgagggaggagggtctgggggcctggactgctgggtgtgagcagaagggtctgggtgctgggagtcccgagcctggggagatgatggttaaacttctgggaatcaagtcaaactcctgagtctttgacattgatgtatcttgaatgggagggtcagtctgtggggaaggattacccaggtgc

SEQ ID NO: 37352 - DNA, 908 bp, Artificial sequence
  DNA replication origin
gagtctactcacctggacaactggaatctggcaccaattctaaaccactcagcttctccgagctcacaccccggagatcacctgaggacccgagccattgatggactcggacgagaccgggttcgagcactcaggactgtgggtttctgtgctggctggtcttctgctgggagcctgccaggcacaccccatccctgactccagtcctctcctgcaattcgggggccaagtccggcagcggtacctctacacagatgatgcccagcagacagaagcccacctggagatcagggaggatgggacggtggggggcgctgctgaccagagccccgaaagtgagtgtgggccagagcctgggtctgagggaggaggggctgtgggtctggattcctgggtctgagggaggaggggctgggggccttggcccctgggtctgagggaggaggggctggggatctggactcctgggtctgagggaggaggggctggggatctgggcccctgggtctgagggaggaggggctgggtctggacccctgggtctgagggaggaggggctgggggtctggactcttgggtttgaaggaggaagggctggggtcctggactcttgggtctgagttgggagggggctttggcttgggcttctcctgggtctgagggaggaggtaggctgtgggcttggactcccagggctgggacagagccggatggtgggacagagtcgggtggtgggacagtcccgggtgggagaggtcctcgaaccaccttatcgctttcaccccttaggtctcctgcagctgaaagccttgaagccgggagttattcaaatcttgggagtcaagacatccaggttcctgtgccagcggccagatggggccctgtatggatcggtgagtttccaggac

SEQ ID NO: 37353 - DNA, 1459 bp, Artificial sequence
  DNA replication origin
ccagagagagagggggacagagacccagagagagagggagacagagacccagagagagagggggacagagacccagagagagagggggacagagacccagagagagagggggacagagacccagagagggggacagagacccagggaaaaaggaagacagagactcagagagagaaggggacagagacccagagagagagggagagtcccagagagagggagacagagacccagagagaaagggggacaaagacccagagagagagggggacagagacccagagagagaggggaacagagacccagggaaaaaggaagacagagactcagagagagaaggggacagagacccagagagagagggggacagagacccagagagagagggggacagagacccagggaaaaaggaagacagagactcagagagagtaggggacagagacccagagagagagggagagtcccagagagagggagacagagacacagagagaaagggggacaaagacccagagagagggggggacagagacccagagagagagggggacagagacccagagagagagggggatagagacccagagagagagggggacagagacccagagagagggggggcagagacccagggaaaaaggaagacagagactcagagagagggacagagacccagaggaaggggggggacagagacccagagagagagggggacagagacccagagagagagggggacagagacccagagagagagggggacagagacccagagagagaggggaacagagacccacagagaggggggacagagacccagagagaggaggacagagacccagagagagaggggaacagagacccacagagagggggaacagagacccagagagaggaggacagagacccagagagagagggggacagagacccacagagagggggacagagacacagagagagagggacagagacccagagagagagggggacataggcccagagagaggggggacagaggcccagagagagggggacagagacccgggggatgacagaggcccagagagagagggggacagagacccagagagagagggggacagaggcccagagagagggagacagagacccggggagtgggggacagagacccagagagagaggggaacagaggcccagagagagggggacagagacccagagagaggacagagacctagagggaggagaagacccagggaaaagggagacagagacccagagagagaggaacagagatccacagacagagggggacagagacccagagagaggaaaggcaggcagggaagctgagaaatgtgttcaaatggggacacttcactgtacctgaggaccttgaactcccaaccctgttgtacccacttcctgtagaaggagccgctttcctcatctggacagtctggggtcccct

SEQ ID NO: 37354 - DNA, 1505 bp, Artificial sequence
  DNA replication origin
ccggatgaaggctgggtcggccaggagggagaccggggtcacggagcctccagggaagtaggcacccactgggcagagaatgacgaacaggagcgcgcgcgtgggctggctgacacccagcgagggctgcgacgggcaaagggacagcgtcaggagtccaggcccccagtcccttcccgtccccaggcccaggcctccaggaccccacccctgccctgcagaatccaacccccgcagcccagcttcccagccctggagttgggcccacctcgttcccaatgagcacaggccgcacatagaggctggtgccggcggcatcggggacccagtccttgtccacttcgatgagccggcggatgcactccagcaactccagcttgtcgaaactctgggtgggattctgaatgagtcaaggggcccttgctgccccggccccagccctcctccccaccccggtggaccgggacccctcaccggcaggcacaggcgcatggctgagcgcagcatccggtccatgttgagccaggggcggaagaggcgcacctgctggtctttgcctttgaacgccttcatgccctcaaacagctgcggggacacgcgggtggggaggctcagagacttctccagacagtcatgagagacaccaagacagacagagacagatacacaaagacacagacaactgaaagatggaggccaagaggagagcaccggggagatttagcagctgggtcagagagatggagaaaaagagagacagatatagacagggagacaaacaggtagagacacacggagactctagaaagcaaaggacacgaccgggctcagtggctcactgtaatcccagcactttgggaggccgaggcaggaggatcacttgagtgtaggagttcgtgaccagcccaggcattatagcaagaccccatctctaccaaaaaatacgaaaattagccagacgtggtagcacgtgactggagtcccaggtatttggaaggtggtgggaggatcacttgagcctgggagtttgagactgcagtgagccacgatcatgccactgcactccagcctgggacctagttttttttttctggagactctgtccctgatcactgccccatggttccaagtttgcttgttcagcatctgctccactgcagagtggaagagcctggaaggcagggattacccttgacacgtttaccagacagcctctcctgcagtcccatgcaccagggtaggcagcgcttggcacagagtgtttttttgttttgttttgttttgttttgttttgagacagggtctcactctgtcacccaggctggagtgcagtggcgtgatctctgctgattgcaacctccgcctcccaggtccaagtgattcttgtgcctcggcctcctgggtagctgggattacaggcgcccaccaccacgcccagctaatttttgtatttttagttgatccacccgcctcagcctcccaaagtgctaggattacaggggtga

SEQ ID NO: 37355 - DNA, 3454 bp, Artificial sequence
  DNA replication origin
tgcaaggctgagcagtctagatgtcgccacccaaaggcaatctggggacccacgctctgatcaccccggaatccctggagcctcacaccagcaagaccacgctgcaggcccatctcccagcaactcacctagcgacaagtgaccacgcccattcacgtccatcttccagaatcagtgccaactcacccagctcacagggcaggccaggccaggccactctgtctctctcaacctcacgccccaacgcctccccacagggctggggaaagaggccttgtgaggtcaaaggtcaccagagagggcccagcctgctggacacagccagacctgctcttcctactcccctctgggaggacccgcctgagcctcatgcagtgaggactgcagtggctccccaggcccctgtagctgcccctcagccccaggggctgaagggaattggagtcactgccaaaatgggtttgtatttcaggtaatcagagcccagttgatcgaataccttcagagaataagcacctgtactcctgggtctggcggaggaggggctggggaactggactcctgggtctgagggaggaggggtggggcctgtactcctggatgtaagggaggagggtctgaggcctggactccagggtctgagggaggaggggctgggggcccagacttcgggtctgagggaggaggcagctagagtctggactcttacttaggtctgagggaggcgggcctggggtctgcacccctgagctctgggggagcaggacctgtcggtccttggtcttctaaggcctgtcagcacttgggtacccggaggccttcacttacctgtgtgccttccctggttgttttcttgtctgagctgatctccaggctgcgaccaaaggtctctggggtgggaggcgcttgcgtttgactttgccgcagcatggaggagggggcgggagctgactcagctctttccagcgagccctcgtcagggcagggaggggacttggcctccttcaggaccacctgccccgtctagaatggactgaaactgggacagaacaggcaggccagtgggacctccaagtgcaggaggtggcgagcgagctgccagggcccctgctgtgccccactcaccccctctctcacttctttctccacccagatctgggcacgaaagcttctctctgtcccttggcttctgtgtggtcccagaagatatgcctcctccagtttcaaggtgaaaggagggaactcgatgcttggctctgagagaggagggggctggcagctggttttgggcatctccaaaaggtccacagcccagagatggcagtgagtggtggtagcttaacagcctgccattgggccgcagacaagggatgaaactgcatgtcccagaatcctccagggtgacaggtccttcttctctatgggtctgaggcccagggcttcatgggagttgtagtttttcagctgggaggttgtggccagattctaggatacccctgtctttcctcaggctgcagacctgcagctggaaatgacacagaagcctcataagaagcctggccccggcgagcccctggtgtttgggaagacatttaccgaccacatgctgatggtggaatggaatgacaagggctggggccagccccgaatccagcccttccagaacctcacgctgcacccagcctcctccagcctccactactccctgcaggtggcatggcggccggcctctctccctgtccctgtctgcatctcctcctccttgctgtgtctcttgccaggtgtacctctcttggtttgtttgttgtgtgtttctcctttctgtgcattcaccatttgttttctgaggccttccatgctccaggctcatgcttggtgatgctgggttccccgagatgagcagacccggttccttcacttggaaaaccccatgctgtgggcataactcagtatgatctgtgctctgatggaggccctgtggaggccagtagagacccccagcctcacttgaaagaaagcatggcttcttctggcatagagggaagcttagagggggatggtgggagaggtgacagggtgatggtaggaaaggggacagccggggggctggcgggagagggacagccaggatgatcgcgggagaggggacagccattggggggggagatggtgggggagggcacagccagggggatggctggagaggggacagccaggggagggatggcgggagaggggacagtcaggggagggatggcgggagaggggacagccaggggagggatggcgggagaggggacagccaggggagggatggcgggagaggggacagccaggggagggatggcgggagaggggacagccaggggaggcatggtgggagaggggacagccaggggagggatggcgggagacggacagccgggggagggatggcgggagacggacagccgggggagggatggcaggagagggacagccgggggagggatggcgggagagggacagccggggaagtgatggtgggagagggccagccgggggagggatggcaggagaggagacagcccaggggggatggcgggagaggggacagttggagatggcgggaagggggacagtcggtgggggatggcaggagtggagacagccaatccaaaccccaaacgggagtagagcctggtacatttgggagaaattgcggtgttggagcatggttaaggaggctgaaaatgtcagggccatggaggagctgaggggctggggccttgtccaagggtgctgggagccactgagggctctgaggaagggaggggcagggccatgtctgggtatagtaagagccctctcaggccatgtggagggcaagagttgcaggctaggaagccgggctggtgaccaggtagaccttgggcctgtccccacatggggacccaggaggaggagcggctttgtggcacctggtgagcctgagatactgtgaagtttctaggagacagatccaggaggcatttggttttaggacttatagctgcggctgaaagcaaggtcttcagaaggaaactttggttgagacaagatttaagtgagcatcttacagctccagtaactggttagcaggttggctgattttagtcctccagggcacagttctgtggcatgaagacttttattccattcctttctttcctttccctccctccctctgttttttcctttcttccttcctttccagaattttaaggttttgttttttcccctctcccctcccactctggacatctaagcaacaccagtcgattctgtacagagcacacacacctccaatcacagccagacactcctgccagtacataagcgtgatgggcaggattccgcctgctgagcccccaggaagctggttacttggagaccaccacacacttctcccttcagcccagcacagcagttgtcc

SEQ ID NO: 37356 - DNA, 1052 bp, Artificial sequence
  DNA replication origin
caggtaagtgaaggcctccgggtacccaagtgctgacaggccttagaagaccaaggaccgacaggtcctgctcccccagagctcaggggtgcagaccccaggcccgcctccctcagacctaagtaagagtccagactctagctgcctcctccctcagacccgaagtctgggcccccagcccctcctccctcagaccctggagtccaggcctcagaccctcctcccttacatccaggagtacaggccccacccctcctccctcagacccaggagtccagttccccagcccctcctccgccagacccaggagtacaggtgcttattctctgaaggtattcgatcaactgggctctgattacctgaaatacaaacccattttggcagtgactccaattcccttcagcccctggggctgaggggcagctacaggggcctggggagccactgcagtcctcactgcatgaggctcaggcgggtcctcccagaggggagtaggaagagcaggtctggctgtgtccagcaggctgggccctctctggtgacctttgacctcacaaggcctctttccccagccctgtggggaggcgttggggcgtgaggttgagagagacagagtggcctggcctggcctgccctgtgagctgggtgagttggcactgattctggaagatggacgtgaatgggcgtggtcacttgtcgctaggtgagttgctgggagatgggcctgcagcgtggtcttgctggtgtgaggctccagggattccggggtgatcagagcgtgggtccccagattgcctttgggtggcgacatctagactgctcagccttgcagccatgcttctgcccagagggataggacacccacagtatgagagacacaaacacagtgcgacagccagcctgtgggcaggagagctgccctcagagccaagatgaaaaaaagagagtaagagatggaagaggaaggatgagaaaaagaaacacagaaaggggcgcacaaacagaaaaaaaaaaaaacaaaaacagaaattgacgccaagaaacaagagatg

SEQ ID NO: 37357 - DNA, 992 bp, Artificial sequence
  DNA replication origin
agccgctctggggcaggtgggttcgcagccccgcgccggggtctgggaaataaccgggggaggcgcacttccgggaagaccactggcctgcagccggtccgactcggcgccgctcctcccgccctggggttccgctgcagggcgcggaggaggatggcgccctttggaaaggagcacgaggctttaatggggtgagggggagcaggtagacgcggatgaggtggggcaagtaattggcggggaggtaaaaaaaaaaaaaaaaagggaaacatggtggaggaccctgtaatgagggaggcgtgggggtggggaggttgtgatttggggagcggagccctggggtgcggtggggcatcagcctgtgcgggagctggaataaaggggcccagacctccagggccgggtgcaggtgaaggcagagttggacctcaagtctcagctctgggaattggactcaaggtcctattttcttggaatgaaagttgaaaaaaataagagatggggattgctgtgcttcccaaactcctatctgaagctttgcacctggattggaaatcgaggcagcgtctcatggtcaaagtgacagatgctgcaggctggctgagacgatcccttctgactgtgcgatgtcaaacagcagcagcgtttcccagagtctatgatttcagagaacaaggtttctcagtgaggaaggaaacagccaaagaaaggggtcattacaagccttcacagctgcggtgtaaccttgggagaactgtctgttaactttacacctgactttatttgagtctcttatcctagctgatgaatgtcagggcagaatttcacttttttcggctcttagtgactgatagggatagtcctgggatacctggggtatgtgggcaatctgggctttagtggtgacactcctggactgtggtggggcagtactgggctttgacaggtccacttgggactgatgtggaccgtctcatcatggcacagttctg

SEQ ID NO: 37358 - DNA, 779 bp, Artificial sequence
  DNA replication origin
ttttagtagagacggggtttcatcatgttggaccaggctggtctctaactcctgacctcaggtaatccgcccgcttcggcctcccaaagtgctaagattacagacctgagccacttcgcctggcagggaccgtatttcaagtcctgccctcccaccagcgcctgcgccccgcagcagtgtccggctccctgccgacgccctggagctgggacggcctggggcgctggtcggccgccttcccccagaaggaggcgtgagcggggcgtggccggaacgtctctcttcggagccgcgccccgggcgggcacagttacgcgccgcacggatcatggccgcagccgctctggggcaggtgggttcgcagccccgcgccggggtctgggaaataaccgggggaggcgcacttccgggaagaccactggcctgcagccggtccgactcggcgccgctcctcccgccctggggttccgctgcagggcgcggaggaggatggcgccctttggaaaggagcacgaggctttaatggggtgagggggagcaggtagacgcggatgaggtggggcaagtaattggcggggaggtaaaaaaaaaaaaaaaaagggaaacatggtggaggaccctgtaatgagggaggcgtgggggtggggaggttgtgatttggggagcggagccctggggtgcggtggggcatcagcctgtgcgggagctggaataaaggggcccagacctccagggccgggtgcaggtgaaggcagagttggacctcaagtctcagctct

SEQ ID NO: 37359 - DNA, 1086 bp, Artificial sequence
  DNA replication origin
tgcctgatgttgctagccctgtcgctgtcgccaggggctcctgggaagggtagagcggtttggcttcaccagcgcgctaactaaaggcccgcaggggagagtaaattaagcgctaattaggaggtaatggagggggagacgcagaaggccctcttactcttggccctcagggaaaaggagttttcctctcactgcctgtagaataggaaggtggctggcaagaaaagtccaaagggaagagaaagtagggggttgagacatctggatcagagggaggaggggctgaaactcctgggttttggtccgcagggcactgggggacgcagactccccagctggacccagggggggggcagggcccgggtgcgctggcgtcccccaggtgaggggtggagctgcagggctgctgcggattggctgtggccgggggggcgtgtgcaccaaccgctgattggccgcggcgggggcgggagctgtcagtgggccccgaccctacagcccggggctggcgggtggggcaggaggactggggcggagcgcagaaaaacagggcgacgccctgtgagggaagggtcccgcggtttggctgtttgggcctgtggctgttaggggtggcaggatagtgacccggggacaggacttgggggcactgtgggggtagaatttggagacagagtgtcccagggtaggattgccgagacacgatggccgagggatacgattttttttttttttttttaatttgagacggagtctcactctgtcgcccaggctggagtgctgtggtgcaatgtcggctcactgcaacctccgcctcccgggttcaagcgattctcctgcctcagcctcccgaatagctgggattacaggcccccggcaccacgctcgactaatttttgtatttttatgtatttatttttatttatttatttattttgagacggagtctcaccctgtcacccaggctggaaatgcagtggcgcgatctcggctcaccgcaacgtccgcctccagggttcaaatgattctcctgcctcagcctccctagtagctgggattacaggcgcacaccaccacacccggcta

SEQ ID NO: 37360 - DNA, 1979 bp, Artificial sequence
  DNA replication origin
accactcagggcatcagggggcgtggtctggtccccattgcgggcccgggaggggaatggtttctatggccaaagtttggttttctcaacactgtctaaatttggattaaaactttgaacttttagtcaatagctttctttctgtctgtctggggttgtggcactggtgtctctgaggggcagagctggagtcgtggactcctgggtcctgagagaggaagggacagggggcttggacttataggtctctgggaagaagggatagagaacctgatccctcggtctgagagtggagggggctgggccaggattcccgggtctgagggaggaaggggtgggaccctgactcctgggtctgagggaggagggactgggaggctggactcccgggtctgagggaggaggggctgggaccctgactcctgggtctgagggaggaggggctgggaggctggactcccgggtctgagggaggaggggctgggaggctggactcccgagtctgagggaggaggggctgggggcctggactcccgagtctgagggaggagggactgaggcttctggattcctgggtctgtgggaggagggactggggctcctggattcctgggtctgtgggaagagaggagtgtctgagggaggaggggctggggacaaacttccaggtctctagccttcctggcaacgccccccgaggccggacttccaggatccagcctctattgaggatttgatgcgacggcctcacggggctttggaggtgaaagaggcccagagtagagagagagagagaccgacgtacacgggatggctacgggaacgcgctatgccgggaaggtggtggtcgtgaccgggggcgggcgcggcatcggagctgggatcgtgcgcgccttcggtgagccgggtctgactgctgggagctgtggagtgtgagaaaggaaggatgggggcggggtgatgggggcggaaaatagggactccagtactgcagccaggattctgatattataaaagccaatttgcaggctaaagtaagcgtgtggcgctgtaggctagggctgagtctggcagggtctccgaaggcagtggcccctttctctgggtctgttggtgtagctacaaaaccagtggtttgaggaatggctctgtcagtcgtggagtttgctccggaagccacgaacgggggttcaggagcctcagcagaaacaaggcaaggagagtatgtgtcaaggcgtctgccctctgtcctatgggtgatcatgagactggggtcacgaggggagagggagatcagccccaatccaggtggccacaagagggcggcagaggctttaaccaaggctcggagagtaacctgttcccttcctattctcagtgaacagcggggcccgagtggttatctgcgacaaggatggtgagtgacggtccctcagccctcaccttggcccttcctccctcagacccagaggtccagacccctagcacctcctccctcagaccccggagtccaggcccccaggccctacttcctcagacccaggagtccagacctcagcccctcctccctcagacctaggagtccaggcccccagcccctctgccctcagacccaggagtccaggtccccagcccctcctccctcagacccagaagtccaggctccggcacctcctccctcagacccaggaatccaagtccccaacccctcctccttcagacccaggggtccaggctcccagcccctcttccctcagacccaggagtccaggctctggcacctcctccctcagacccaggagtccaggcccccaggccctactttctcagacccaggagtccagacctcagcccctcctccctcagacccaggagtccaggctcccagcccctcctccctcagacccaggagtccaggcccccatcccctcctccctcagacccaggagtccaggcccccagcccctcctccctcagac

SEQ ID NO: 37361 - DNA, 1054 bp, Artificial sequence
  DNA replication origin
gtccaacggtggaataagggaggagctgctgaagaactgagggcctggacgtgtgggccccagtggaggaaggggttcacgaactctcgcgccgatgcgagcccttgccccaggccccacctcacttctgtcttcccatctggttcctgtcccggacacccacctctcccatctccccagcggcggctgtttgaaaagaagcagcgacagaagcgccaggagctcctcatggttcaggccaatcctgacgcttccccgtggctttggcgctcttgtctgcgggaggagcgccttttaggtgacagaggtgaccaaagacccctgggggcgttcgcctggaggggaggggcctgtgggagtctgtgggcggggcctagtggatgaaggggtggagccttagggtggggacttggcagtggatgggggcgggccttggcccaggagagctttagaacagggcctgtgggcgcccaggggagaggcttgtgggggccccccgcggcaggacctgtgagggaggggttcggggcagggctacagagcgcaggggcggggcatggtacaactagcaggggaaaggggcaagagaatgtgatgattgggcttggcagagctcggtggtggagcctgggaaagccgggacccccaccccaaacccgggattgcggagacggggtctaggggtccggggcggggcgcggtctcattacgagagcctggcgcgagattctttacgtgcggagcccgcaacaatccagcggcagggctgtgcttgtttgaggcttaggatgcagtttgggacctgggtctcaaggtttgggcggtccgcgaaacagggtgatttttttttcttttttgagacggagtttagctcttgttgccaaagctggagtacaatggcaggatatcggctcaccgcaacctccgtctcccgggttcaagcgattctcctgcctcagcctcccgagtagctgtgattacaggcatgcgccaccaagcccggctaattttgtgtttttagtagagacggtgtttctccatgttggtcaggctg

SEQ ID NO: 37362 - DNA, 1380 bp, Artificial sequence
  DNA replication origin
aagtcccacccagctacgcatgacgggggtgggactaggaggcctgggacttttgtctgtgttgttcacagtgcctggcatatgataggggcctggtgaatgtttgttgaatgaatgaatgcatgcatgggcgggtgggtagatggatgggcagttggatggatgggcgggtggatggatgggtgggtggatgagtggatggatggatggatgggtggttggatggatgggcgggtggatggatgggcgggtggatggatgggtgggtggatgagtggatggatggatgggtgggtggatggatcgatgggtgggtggatggatggatgagtggatggatgggcgggtggatggatgggtgggtggatgagtggatggatggatggacgggtggttggatggatgggcgggtggatggatgggtgggtggatgagtggatggatggatgggtgggtggatggatggatgggtgggtggatggatggatgagtggatggatgggcgggtggatggatgggtgggtggatgagtggatggatggatggatagatggatggatggatggataggtgggtggatggatgggcaggtggatgagtggatggatggatggatgagtggatggatggatggatggatggatgggtgggtggatggatggatgggtggatggatggatggatgggtgggtgggtggatggatggatgagtggatggatgggtggatggatggatggatgatgggtggatagatgggtgggtaggatgtatgtatggatgggtgggtgggatgtatggatggatgggtgggtggatgcatggatgaatgggtggatgcatggatggatggatggttggatggatggataaaagtatgattcacagcttcccaacaagtcatgtccactctgagcacccactctgggcagtattgggctgggtgttcactgatgtgattttcatttcatctttgctgcatatgtgggaaaaggtaaaaactgagtcccttgtcagctgccccagggagcaggccatagcagtaacaggagtgagggtggggatggggatgggagcaggggctgctatgtctgtccttgttgcctcaggacacaggcctgtactaccaccggtacctccaggaggtcatcgatgtactggagacggatgggcatttccgagagaagctgcaggctgccaatgcggaggacatcaaggtgcggctgggggagtgggggctgtgggaggggtacgtgctgggagggcagagttcaggggaggactggtttctttttttttttttttgagacggagtcttgctctgtcacccaggctggagtgcgatggtgcgatctcagctcactgcacctccaccccgcagg

SEQ ID NO: 37363 - DNA, 1148 bp, Artificial sequence
  DNA replication origin
caccagtgccagaggcaggaagtggtgcgggcgacaagcccgggcctgcccgggggcttggcttccgagatcccctggttctcgagggtccgagagcgccagagaggcagggatcgggacacggggatcagagagccaggaacctccgaggacggaggggactggaggctggcagcgcccgatccgggagtttctgcccctcagtgcttggagatcgcacagccccaggccggtaggaaggatcccggacgggccggcgagggggctcgccctcctcccgcccgtctgcctcccgcctcacccccgcctctgggctgctccccggacccgtccatcaccgccgctcccgccgccgcctctcgccgggtccgcgcgggcggccgcagcgcgcccgggtcacgtgagagccccgctgaacgtgcgtccttcacgtggccgccccgcaaaatggccgctgccccgcagcgccgccgggtcacgtgaccgcacctgcctcgctccctcgggaggtttggtcccgtcacgtgactgtccaatgagcatctcccgataagtgccagcagtggcgccgtccaacagccgtccgtccaatcgcagctctaatgccttcatttatccaggcaccatttttagaagtttcgggcagggtttgagctctccccagcgcagaaggaattagcaagtgcaaaagctcagaggcccaaaatagcatgcttccaggcaggacgttatagatgactaaaaactgagtggttttgttttttgcagagacctggatctagcaatatagcccacgcccaggcttgtctctaacttgtgagcccaagagataaccccgtctcagccttccaaagcgctgggattacaggcatgagctaccgcgccaggcctgcttttctgtttgtttgttttttcctgttttttttttttttttttttgagacagggtctcactgtgttgcccaggctggagtgcagtggcccaatcatggctcactgcagtctggaattcccgggctgaagcctcccacctcagcctcctgagtagctgggactacaccgcccctggttaatttttaaaactttttatgtggagatgaggtctctctatgttgcccaggctggtctctgaactcccagactcaagcg

SEQ ID NO: 37364 - DNA, 1888 bp, Artificial sequence
  DNA replication origin
gtcaaaagatgaggcttggtcctacctcagggcctttgcacttgctgttccctctaccagatgcctcttccccccgatcactatagatcactgcatgcttcttatcattctagctttggctttaatgtcacctgctctttgatgtcacctgcccttagaagtctttcctggcttgttgcggtggctcatgcctgtaatcccagcactttgggaggccaaggcaggtggatcacttgaggtcaggagttcaagaccagcctgaccaacatggtgaaacccgtctctactaaaaatacaaaaaaaaaaaaaaaaaaaaaaaaagccagggataatggtgcacacccataatcccagctactcaggaagctgaggcaggagaatcgcttgaacctgggaggcagaggttgcagtgaaccaagatcatgccattgcactcaagcctgggcaacaagagcaaaactccatctcaaaaaaaaaaaaaaaaaaaatagaaatctttcctgaccactctgctaaatcacactgcccactttacttcacccctgcacgtgaactccctgagagcagggatgtagcctgctttgtacagtgctgtgtcccaggtgccaggtataggcctggcacatagcaggtccagtaaatgcttgttgaatgaataaaagaaggagcagacacccagtgcacagccatctctctccatgccctctgtggtcactgggccactgcagggggttgataccacgatccccaggtcctcacagatctgagggggagcatccctgggctcactgccctgcagctgcccaccttgagcaccagtttgctggcaaagtagaaaagggcgacaacccggccccagttgaagttgccgtcagaaaacatgtcagctgccactcggaaaaagacctctcggggggagtctgtgtccacggcggcaatcatcctgcaggagagaggagaaccagtgccggggagcaggcatcaggctgatggtggaaaattcccgcatccaccgcacactaaagataaggagactgagccccaagccaggctgaaatgaaaagcaacaggccaacgggggacaagggaaggggacaagacagacatttaggaaggtgggaaaaatgactccctgaaggagggttttaagatcctggcagagaggagggctgggagtccggaatgtttgcgctgagttgtggggcccagactcctagttcttaggggaggaggagaatgcggggctgagagtcctgtgtcctgaaggagcccagtggctggacttctgggtcctcaggggcccacacctctgcagctccatgttactgtccagttcgtccccgatgcgcttgagacactcgctcagcttcttggtggacgcatcctgaggcaccgggtccagggccagctcgggtgcctccccccccattcgccctgctcgatcctggatgaaactagagtggggatggagtgagggtgcagaatcagaacggggtgtcactcctcaaatctgtgccacaataatcagacctcaaactcacccctgaagcaaaagggcccctgtcttcatgatctgctcagagctggtgggccctagaggagaaaggaagggaagaggtacctggactcttgggttctaggggatcaggagactgtggagactcacggcccctgagggaggacagagctggggaccctggacttctgggaccctagcagataaagtgacgggggggcccagacaactgagtccctgatggagaaaggccaggaggctgggcctgtatcctacattctccccggggaaagaggctaggggaacgctatatgcatccagacccctggcctgagggggcagaggcgagacccgcccctcccaccagtgcca

SEQ ID NO: 37365 - DNA, 1259 bp, Artificial sequence
  DNA replication origin
taggtggagggagaggaggggctgagagagacaggatctgaagaccatagagaacgtggggtggggagacagaggcccagagaaaaagagactcagacagagaccctgagagagagggggacagagacccagagagaggggaaaacagacccggagacagaggggtacagagaccctgagagagaggggagggggacagacctagagagaggagggcagagacccagagggaggggaaaagagacccagagagagggggggacagaggtggggggggacagaggcagggaggtacagagacccaggggtgggggggatagagacccagagggacccggcgggaggggacagaaatccagagtgggggacagagatccagagagaggtggggacagagatccagagaagggggtacagagacccagagagaggggggacagggactcagagagaaggggacagagactagggaggactgagacctgggggggcggggacagggacccgggggcgggggacagagaccggggagagggaaagagacccagagagaggggaggtacagagacccaagagagagtgacagccagagagaggacagagacccagagagagggagacagaaactcagggtcgggggacagacccagagagagatggggggccagagatccagagggggggacagagacccagagagagggggccagaggtctgggtgccaggggtggaaagaggcccagagaaagagggccaaaggtggggtgggaacagaggctcggaaagcaaagacccagagcatggggacagagacccagagatgggagggggtaaagacccagaggggggtgccagagaccctgtgactgagaacccacatcctctagcccccttgtcttcgctccgcctgtgtctaaggtcactgggcctctgagctcagcaccttcttccggcagttcctctccaggggggccccacccagctgtggggccagaccaggttcctcctcctctgccctgccctccagcctctcagtcgccagccaggtcccttcctctctgtcctcagcccagctcaggaggcctctcccgtgggccctcgccctggtgtcctcagcctgccaccctccagcgacctcaccaccaggctccagagcccttcctgctcctctggtcctcccatccctcctccccccactcccattctccagctcggtaaaggtatggcctcctgaggtcccacgtgtgacacgccaggct

SEQ ID NO: 37366 - DNA, 1117 bp, Artificial sequence
  DNA replication origin
tggagacaactcacagacttcgagaattctccgtggccctgaacagtgtctctgaagttgccctcgtgtcttgcctgacgtgtgctccttcaggcccacaaagagaagccctgcgttgtggacaaacagtctggggacctatggacgagacgtctgtcttcgactaatgcatattttttaagtgggcctggtccacgttgatttctgggagacggagtcggcgcaaaccttgactctacttaagtgccctgatggaggcagcccgtgcgctgggcagggagctgaagccactggggtgtggggtgaggtcaggccctgccctacagaggagctgctccgaacagcccaggcggggcagcccctgaccgaggggatctgcagatgccccgccaggccggtatctggggtccttgttgcaggcagcgactgctgagtcatgctgagctcagcgcgggaaggggcccccgcggggacggatgggggtggggccactcgctgacctcatccccttggcactccccgacttttttggtgggaccctcagaactagacctggctcagacccaaatcgggccccctaccccaaggtccccccttgttggaagccggctgtgtgctttgtctccgtgtctttttggttcccataatttttttttttctgggatcctgcctgtggccatattgtcccctcactctgggtggtggctcagtgtacactcattgatcctctgcccctctctctcccctgacttggggtctctgggaagagtccatggaggaggggcagccgtccaaagcaccccgttgactgtggggcccgagttactcatttaccaaatgtcatacctcagcccagagacctttagtcggccgagaggggccttggggcccataggtggagggagaggaggggctgagagagacaggatctgaagaccatagagaacgtggggtggggagacagaggcccagagaaaaagagactcagacagagaccctgagagagagggggacagagacccagagagaggggaaaacagacccggagacagaggggtacagagaccctgagagagaggggagggggacagacctagagagaggagggcagagaccc

SEQ ID NO: 37367 - DNA, 1173 bp, Artificial sequence
  DNA replication origin
aaaaacggtgctggcaggtcccagaagcaggagatggccgagaagatggtcccggaggttgcaagcggagaggaaatcggagggcggtcggaggctggaagagagtccccggatctgttccgtccaaacactgttgaagcaagagacagacccgcgggaccgccgaactgcgaggggacgtggctagggcggcttcttttatggtgcgccggccctcggaggcagggcgctcggggagggctagcggccaatctgcggtggcaggaggcggggccgaaggccgtgcctgaccaatccggagcacataggagtctcagccccccgccccaaagcaaggggaagtcacgcgcctgtagcgccagcgtgttgtgaaatgggggcttgggggggttggggccctggggctgattctggaaatgcaggggttcgtgggcgggagggtgggggctggggtccctctgggaggctagagttttatgggagcactaacagccctgtgaactgatgaccctggggtcctggggtgcctcgggaaagtaagattctggggtttccgagggcatggatttttctggaaccttgagtggggggaggggcacctcaaaggtgcagggaggacctgtagttgcctgaggtttgcgctgcgagataaggagtctccggatccttgggaagcttggaaggctgtgaggtgttatttctggacccctggagatctctggaagatggagtgttgcggggactggagtcctgggatttacaggggtgggggttcacgatgcaaactctctatattttggagccctccccggggaaatctttaggttcttgaggtgctctgcaagttggaaagggcagttattctggagccgtgggtttcacccagtgcgggaagcccaggaggagcattgtatgaggtagggtgacttctggaaccctggacagccctctggaaccctccaaagatgggctgggactttggggataccttggagctctttcaggggcccaggctttttctgggagtggaaatggggaggaatgaaaagtctgttttgagctttgcggtgtctctgggattgcatttcctggaggctgttttggagacaactcacagacttcgagaattctccgtggccctgaacagtgtctctgaagttgccctcgtgtctt

SEQ ID NO: 37368 - DNA, 831 bp, Artificial sequence
  DNA replication origin
tggcagcatgaacagtaagagaatcattacaggctgggtgcagtagctcacgcctgtaatcccagcactttggtaggctgaggccaggagtttgagaccagcctgggcaacatggtgaaaccctgtccttacaaaaaagttaaaaattagccgggatgtgataccttgtgcctgtggtcccagctacgtgggaagctgcggtggaaggattgcttgagcctgggagatcgaagcttcagtgaaccgtaattgcaccactcccttccaggctggaggacagagcaagaccccgtctctgaaaataaaaaagggcctgctttaggtggctcacacttctaatctcaacactttgggaggctaagcaagaaaactgcttgaacgcaggagttcacgatcagcctgggcaacatagtgagaccccatctccacaaaaaattaaaaaatcagcctggcatggtggcccacgcctgtaggaggtgaggtgggaggattgactgagccagggaggttgaggctatagtgaaccatgttcacaccactgcactccagcctgggcaacagagcgagaccctgtctgaaaacaaaaaagaagcatcccgtggaaggaattagcatcagaaagaaaagacagtgggagatgcagatggttggtaagagaaatgtggcagcaagtacagaaacaaggcagcaggtaggggaaatgatttgcagagtggccagacagggcagtgggggcatagacacaggacatgtgacatatgtggttataagcagagaaaggaggcagcgagtgggagaagggtagcagttacaggaattaaacaggaggct

SEQ ID NO: 37369 - DNA, 1021 bp, Artificial sequence
  DNA replication origin
agaacagctaagaattttgcaatcggcctgagcggggcggtggtggggctgagcaaaaggaggaggagccaggagacattgggaatggacccaggagttccggacgcccgtcttccagcgcagcctcggtgggagggcggggcataaagtcccgccacgcccccacaatatttacatatttatgaggaaccatcgagatctttgaagaaccagctagcctagaggagccagaacatctcgctcctcgcgcgtttccgtttccgctaggactctggcagttggtgagcatcatggcaaccgttgtaagtgtgggtgcatggagggtgaggagcgagctagcagtctcgagtttgagagaggaggatgctggaggccctgactcctgggtctgagggaggggggatctgggggttcagactcctgggtctgaaagaggaggaagctcggccacccagatctgggggagaaggggacatgggggctggacttctggatctgaggcggggagggggctgggatcccagaatctcgggtctggccccatcatgctataggaactccaactttcaaaatcatcttggcgcaacggccggttccgcagtccttggcgccagtgtgtgatgaggagggttgtaggaccttgcgcttcgagccatttgggagccttggattgttagtggtgccaatggcacttgagttccaagctggaagcacaggcaggtacctgttcagtgtgtctgagagcgcgagggcgcctagtgagcctttagtgggaagaaattgtcgaggaacaagagagtcttagtggagaggactgaaggattagggacccagaaatcgggatcttgtcatgctaccgttttggccattttcatatttccagtatttcacacgggctacgtctcagtgtaaatgctcaataaattatcacttgaatatttgaatgaatgaatacatgtgaatgaaggagaggccaggaaacttggcctggcacctgctcaattacctgaataaagaagcg

SEQ ID NO: 37370 - DNA, 973 bp, Artificial sequence
  DNA replication origin
ggcctagcagcctccctcgggctccctctgttcctgagctccgagtgtggcccacctgctccacgctgtttcctgtaactccggcccgtggctgcctctgttctccacctgcaagtccgctccgtccccacccctgctggtgctgtgatgggtgtggccctgccctctcccctcctgtgttctctgcctctgttcctcctctttggggatgtttcaggctcctcatccctccttgctttgctccccttcctccatccctggcatcatccttctctgtcttagccacactctggccctggaacccgcctcctctctggcttccctgatgcaacctgtgcctcccataggtgacacaggggagatcaagtcagaagtccgtgagcagatcaatgccaaggtggctgagtggcgcgaggagggcaaggcggagatcatccctggagtgaggacccaggacatggccggggcgggtggtggggtggaggtgggccggggaagtggggacgcgggtggtgactctcacacacaccccaatccaaggtgctgttcatcgacgaggtccacatgctggacatcgagagcttctccttcctcaaccgggccctggagagtgacatggcgcctgtcctgatcatggccaccaaccgtggcatcacgcggtgagccggctacaggggcctctggggaaaacaggatgctctgggcagtgggtgtggtcagagggtcaatgggagcctgtgttgacaccgggtcagggagggacgcgtgactgcagtgtgcgctctttgcttacaaaaggcgggtgggaggcagctctgcttcccgaggaagcccagagactgtgttcttgctgcctttctgtcttgctgctcctttagcccccaaggctgcagtcttcaaactgcgtgccgaggcaccccagggtgctgcaggaaactcacaggagtgctgtgggatgttttctagtcttgag

SEQ ID NO: 37371 - DNA, 1284 bp, Artificial sequence
  DNA replication origin
acagatggtggtgttgacggtgatgcacactgggcagccctccttctcgacagccaggatggcattgatggggtggcaccatggccgaagcggctccctggatgcccatgccccgcccatgctcagcagcagcaacagcagcagcccctgggacaaggacactgcttcacccaggtctgagaccgcagccccgagtcctggccttcccatcccgcgtggtacaccacccacaaagacccagagacccttcccggcatctcctattcaggacccaccacccggacacctgcctttcagagcccaccccacagcccagaggacctgagatgccccaacatttcagatccccaccctcaggaactgccccacctgaagcttactgggggtcatgcccctccagaaagaggcctccttccacagctcacacgggtctgccccttctcatgccagtgatggcctggaaggaggtggaaggtgcccaggggccctgtagtcttacctggagcatctccatccttggtgcatcccctgcctcgtgtatctggctatatacctcggggttgtgggggcggcaaggccaccaggaggtgataggatgctggggtaacctggacactaatccccccgggggcgagaggtgcacatggccagggaggcgcaggagtggctcagcagagcgccccagccctctcccctcagtggtctagcgccagaggtgaggcagagaccacggtgaagtgacctcagagacccagttgtcgagtgctagggactagtcgagcctggaggcacagggagtagggtgtaggaaggcctgcctctgccaattgtggggtcttgggagccaggaggaggccatgacccgagaaaggtgctggactgaagcctcaaccctccacttgaggctttcctgcaccacagtccaacctaacaggaggggcgctgcttcggacttagcttctgcccagtgagagagggtctccccgtgactgtgctgccagggaagccacttgacccagatgcccccaaggagggattaagcccgagccccacctctcccttagggacctccgcccaccctaccctcaagccaggatgcccggagcgtccccggaagtgggtgtggttcaggtgatttaactcattatttaatacgcccgcagggtgcgtgtcttgcccccggggccacagcctgcaaggacattatctggacttagtcccctctccgtgatgccgcagctgagtgggtgtctgggctagtcccgcccccacgttgccaataga

SEQ ID NO: 37372 - DNA, 1157 bp, Artificial sequence
  DNA replication origin
aactgggctttcgacgaggtcctcagcagatgggagacaacctctggctcggcctacgtgcccaagacccatggcgggccctgcgcccagcccagagccccagagcctgcagaccccacgcggactgtggggatcaaggatttaggagaaaaggtaaagtttggggagtgccggagtccgcaggggacagggcgggggactgcatttgagtcccctgctccttcacgtgagtctctgggtcgcctttccgcagctcagacaccgcggctggcgcctcccactgaccacaaagtaccagagcagcgagacgagggcgcagtacactggctctcccagcggggacccgcgcgccccggaatacttcgggccccagcccccacaactcgcagaccaccaccgcgggggtccttcccaggtgtctgggtggaagccggcgccggcgagacggggcggagctccgggagcctggggcggggccagaaggaatcacggctttggggcgtggctaaagggtctggggcgggatcgcgaggttagaggagccgggggaggggctgggcattaggccaggccagaaggaccagggactacaaactcaccttcagggctcctaagctgctgcggagctagacggcgggctgtgggtggggaggagactagaatattctgagacggggtcaggtgggagttgggagaggtaacttggagttgctgcccaagatgcagctcagctccagtggccacaccaagacggtttaagacagagcggaaccagggaggttgtttttggtggctgggggcttgggtttgagttccttgaacagcagaaggtgcttggatttagggaggtgaggctgggaagggttcgggtatgagaaaggaagctgaagttccctggcgtgggtggcaggaagggctctaaccctggggcggggtgtgagggccgtggccgtcatggctgtcgaggccgaaggagagggattctgaactcgggacccagggcttgggatggggtatgaaatctatgtcttgggtatgcctcctcccccaatcttgctcaggctctaattgcctggacgaagaaccccgagctgtctggccggcctttcacagtatccgaccggggcgtcctggaccgccgccagctctatctgacc

SEQ ID NO: 37373 - DNA, 699 bp, Artificial sequence
  DNA replication origin
accctttagccacgccccaaagccgtgattccttctggccccgccccaggctcccggagctccgccccgtctcgccggcgccggcttccacccagacacctgggaaggacccccgcggtggtggtctgcgagttgtgggggctggggcccgaagtattccggggcgcgcgggtccccgctgggagagccagtgtactgcgccctcgtctcgctgctctggtactttgtggtcagtgggaggcgccagccgcggtgtctgagctgcggaaaggcgacccagagactcacgtgaaggagcaggggactcaaatgcagtcccccgccctgtcccctgcggactccggcactccccaaactttaccttttctcctaaatccttgatccccacagtccgcgtggggtctgcaggctctggggctctgggctgggcgcagggcccgccatgggtcttgggcacgtaggccgagccagaggttgtctcccatctgctgaggacctcgtcgaaagcccagttgtgagaatcctgctttgcaacttggggtagagggtccgcgaccgtggactggagagaaggcgccgcacatcagctagaaagactcaggagtccctatcaccccccaccccaaactctgacctcttccagtcggcccccagccctttcctctgcagtccctggcattcagcttccctggtgcctcc

SEQ ID NO: 37374 - DNA, 1113 bp, Artificial sequence
  DNA replication origin
tgggctttcgacgaggtcctcagcagatgggagacaacctctggctcggcctacgtgcccaagacccatggcgggccctgcgcccagcccagagccccagagcctgcagaccccacgcggactgtggggatcaaggattcaggagaaaaggtaagatttggggagcgccggagtctgcgggggactgcatttgagtcccctgctccttcacatgagtctctgggttgcctttccgcagctcagacaccgcagctgaaccctcctactgaccacaaagtaccagagcagcgagacgagggcgcagtacacttgctctcccggcccggacgcgcgcgcccccaaatacgtcgggccccagcccctcacaactctcggaccaccaccgcggggggccttcccaggtgtctgggtggaagccggcgctggcgagaccagcggagctccgggagcctggggcggggccagaaggaaatcacagctttggggcgtggctaaaggatctggggcgggatcgggaggttagaggagcgggaggaagggctgggcatccacgccaggccagaaggaccaggggctggaaactcgccttcagggctcctaagctgctgcggagctagacggcgggctgtgggtggggaggagactagaatattctgagacgtggtagggtgggagttaggagaggtaacctggagttgttgcccaagatgcagctcagctccagtggccacaccaagaaggcttgagaccgggggcagaaccagggggattttgtggtggctgggggcctgcatttgagttccttgaccagcaggagggcttggatttagggaggtgaggctgggaagggttcgggtatgagaaaggaagctgaagttccctggcgtgggtggcaggaagggctctgaccctggggcggggtgtgagggccgtggccgtcatggctgtcgaggccgaaggagagggattctgaactcgggacccaggacttgggatggggtatgaaatctatgtcttgggtatgcctcctcccccaatcttgctcaggctctaatcgcctgcacgaagaaccccgcgctgtctggcccacccttcacagtatccgaccggggc

SEQ ID NO: 37375 - DNA, 1088 bp, Artificial sequence
  DNA replication origin
tgacagaacccgcccaccccaatccagccaatgaaaggcctgcaggcacatggatggatggagtgattaagagacccagagacagagagacagggactccaagaggggcacagagaaacacggagtgggggatggagagtcagaaagaggcggacagaaggggatggagaagttcaggatttcagagacccagggggtgggggagacagagacacagaaagaaggacagagacctgggggtgtcagagatacagacagagacccctgcactgcccccagcacctcaggacatccatgagaaacacccccctttgctccagggtccagaacctcctggctgcttcctccctctgccaggcctgcccacctcggggtaacgatttccagatgtccccggggctccccaacccttcccgcacgtgctgaaggagtcagcgctggtgtcagctgtcctgcctgcctttgatttggttgaaaacttccacctgggtaggctgggtggggaaagagaaagggatctagagagaagtgcaccggaccatagcgaaaaagatgggctttgatgagtgaggaataaatacaacaagaaaggggagagacagggaggaagaaagagaccacgatggaaagggagctattagtactacccagaggcgacagacactggaagttagagacagagatgaaggtggcaaaaacgaccaaagtcacagatggaaaacaaggagacgtagaaactgaggcagccacgccccaccctgcccaggggcctggtctgtatagatgcggggagaagttgcctatgtcctttgctcaaagctggacctgagagagagagagagagttggtggggcgatgggtaacatgtgaagggctattgtgaaggcctgtggtctgtccctggcttcccttgtcacttcttcactataaacagcttttgatcaccgggcgcagtggctcatgcccgtaatcccagcactttgggaggccgaggcatgcggatcacttgaggtcaggagtttgagaccagcccggccaacatggcgaaaccctgtctctaccaaaaaatacaaaaagtagccgggcgt

SEQ ID NO: 37376 - DNA, 1395 bp, Artificial sequence
  DNA replication origin
ggggttcccaacttctttccccactgaagtttttacccccttctctaatcccagcctccctctttctgtctccaggtgctccgagagatgctccctctcccctcatgctccctccccatcctcctccttttcctcctccccagtgtgccaattgagtcccaacccccaccctcaacattgcccccttttctggcccctgagtgggaccttctctccccccgagtagtcctgtctaggggtgcccctgctgggccccctctgctcttcctgctggaggctggggcctttcgggagtcagcaggtgccccggccaaccgcagccggcgtggggtgagcgaaactgcaccagcgagtcgtcggggtgagctggctgtgtgcgatgcagtcagtggctgggtgacagaccgccggaccgctgtggacttgcgtgggcgcgaggtggaggtgttgggcgaggtgcctgcagctggcggcagtcccctccgccagtacttctttgaaacccgctgcaaggctgataacgctgaggaaggtggcccgggggcaggtggagggggctgccggggagtggacaggaggcactgggtatctgagtgcaaggccaagcagtcctatgtgcgggcattgaccgctgatgcccagggccgtgtgggctggcgatggattcgaattgacactgcctgcgtctgcacactcctcagccggactggccgggcctgagacccatgcccaggaaaataacagagctggatgctgagagacctcagggatggcccagctgatctaaggaccccagtttgggaactcatcaaataatcacaaaatcacaattctctgattttgagctcaatctctgcaggatgggtgaaaccacatggggttttggaggttgaataggagttctcctggagcaacttgagggtaataatgatgatgatataataataatagccactatttactgagtgtttactgtttcttatccctaatacataactcctcagatcaactctcatggatttgatcattggtggcccttggtgttaagttgctgactactcagtctcagaggacaccaccttgctggggagtgggaggggacatttcacgatgtgggtggaggaggagagaaactagaacaggcaagcagatggccaggggaccttgagaacgtggcccacagaaggcctttaagtatctgggagatggggttcaaatgggaaatcttacttggtaagagggggcaaaggttgacttagaatattctgttttgaggtaataagctaccgatcacagaggagtacaagcaaggttgaatgagaagtgatcaggatgctggagagttcagccctcggcagggagctgaagtcaggtttctagccctcttccctgtcc

SEQ ID NO: 37377 - DNA, 1476 bp, Artificial sequence
  DNA replication origin
ggcgcctggggctggggggagaggtggctggggtcgcaagtcctgggtctgagggaggaggggccggatgcctggactcctgggtctgaagggaggaggggctgggggcctggactgctaggtccaaaggaggaggcagctggaaactgggactcctgtgaccaaggcggccgcgttgaacgagccaggcctggcttccaaggtcccggcacgcgagtgcaaggcaggatcccccggcccctcctctgccgcccggcgccgccccgcccccgcccccgacccgggccctgcggagcgtgagcagctagcacccggcgggccagcgagcgtccctgcagccagcgagcaggaggaggagctgctgccgggcggagggcagccgcgggagccgaagagggcgccccaggtaagatctccactcctcctccctcgggattccggcgtcctggtcgccctgccctcgggtggggagggacgggggcggggccgaccggggcggggcttggcggaggaaactgaggcaagagggaagtgtcccagatatgcagccggtttcccctgaggggtctcggagtccggaacccccaacccaaatctggaggatgaggaacccggagtctgcatttcttagtatccgagaaggaggggcctgaattccagaactcctgggtctgagagaggagggcactgggggcctggattcctgggtctgagggagaagggcgctgggggcatggactcctgggtctgaaggaggagggcgctggggacctggactccagggtctgagggagaagggtgctgggggcctgggcctggactcctcctgggtctgagggagaagggtgctgggggcctggacttctgggtctgagagaggagggcgctgggggcctggactactcctgggtctgagggaggagggcgctggggatctgaactcctgggtctgaaggtggaggccctggggtctgcactactcggtctgagggagaaggcggtcctggttgggtcagcctgggctcctttcactctccacccttcccctttcctgtaccgaggagccagggcaggcagccactccaggtatgtgcagaagtcttgggcgggccctggcctgtcctgtgaggagggaacattccaggaagcagcttggggaaccagggcttcttgagtgtgggccctcagggacccgggtgtccaggccagttccgccccatctgggagatgaatgggccgagggggatgtaatctcttccagcctccttcatccactgcctctcccttcccctattctcccttcccctccctccatctgcttcccatcccagccaggagccatcacctgggtagaaaaggggcctctggaaagggggcggggccttgactcttgggtaccctgcacttgaagaggaactctgggaaggggttgttcagggatttggccccttccccacctgcctctataacctgtct

SEQ ID NO: 37378 - DNA, 935 bp, Artificial sequence
  DNA replication origin
cccagcgcccttctccctcagacccaggaatccaggcccccagtgccctcctctctcagacccaggagttctggaattcaggcccctccttctcggatactaagaaatgcagactccgggttcctcatcctccagatttgggttgggggttccggactccgagacccctcaggggaaaccggctgcatatctgggacacttccctcttgcctcagtttcctccgccaagccccgccccggtcggccccgcccccgtccctccccacccgagggcagggcgaccaggacgccggaatcccgagggaggaggagtggagatcttacctggggcgccctcttcggctcccgcggctgccctccgcccggcagcagctcctcctcctgctcgctggctgcagggacgctcgctggcccgccgggtgctagctgctcacgctccgcagggcccgggtcgggggcgggggcggggcggcgccgggcggcagaggaggggccgggggatcctgccttgcactcgcgtgccgggaccttggaagccaggcctggctcgttcaacgcggccgccttggtcacaggagtcccagtttccagctgcctcctcctttggacctagcagtccaggcccccagcccctcctcccttcagacccaggagtccaggcatccggcccctcctccctcagacccaggacttgcgaccccagccacctctccccccagccccaggcgcctgagtactaagcccacagttccccccaccacctcccaaccccgccccgtctcagactcaggagtccagcccccagcctcctcctccattagccccaggagtctgggcctgagattcctttgccgtcttttgccaattgcgtgtcaatcccggggcagattcccaccctctgctctcctccccacttcccaggagctccacgccag

SEQ ID NO: 37379 - DNA, 1997 bp, Artificial sequence
  DNA replication origin
catgtccccatcagcctgctgggacacacgggtcctcctgagtcccgtagcctcatttcttacagacggggaaactgaggctcagagcagcaggtgttacccaaggtcacaaggccgaacattttcagaaatctttcagaactcaaagggcatttagaggaagaaggctgaaatcactaacacatatagggcttcctttggtatcaaagtactttacttgggttaatttattaaaacctatccagtggtttacagactgttgttgttatttttagccatacccaccccttttttgggtcaaataaatcttccttagagacaccagtgggaagcatgggaagggaactggttggaggagaacacgcctcctcttggcaactcaaaatgcagctcaggaattcagtgtggaaacccctggtttcatctgagcaccttttcatacagctaaagagaaggtacagatggtgagaggagtttgataatggttgaaattaatagaagctttaggtagtcacttctctctgaaatggagagaaagccagatttagggacagaatggagacggacctcacagtgacaagagacaggttggactccagcacagagacctaaagaggagacacagacaggaactgaggccaggagggaggagaggcacagagcaaaagagagaaatccaagggcaagggggaagagggcagatggccgggagcgggaacagagacccccacgaggggaaagagaagcagacagtgaccccaagagagaggatgcaagaggctcagcaagaaggagactgggacccagagagggtggacagatatccagagagaagaaaactgggacctagaaagagggggacagagacccagagagaaggggggacagagacctgggggggaacagagacccagagagaggggggacagagatccagagacagagagagagacagagacccagagagtgaaggggacagagacccagagagagagggggacagagacccagagagagagggacagagacccacagacagaaggggacagagacccagagagagagggggacagagacccagagagagagggacagagacccagagagagagggggacagagactcagagagagaaggacagacccagagttggagggagacagaaatccagagggaggggaacagagacctggagatagggggacagagactgtttcccagtcactctgtttggaaacctcatccctactatcccctccaggactagaagctagaagctagaagctagagtcctcctgctatgcggcaggatgtattggctgtttaggaacaggggaagggtggagaagccggagaggtgacctgaatgcacacccaaagcctgggaagtggcccttccccccacccccaataaataactggagcggccttgtgtgttgccttggctgggatggtgaggagcaggaaacaccctaaccggggacaccctcctgccaccttgccatgctatatttaggctgagggggtgtgggatgaccctcgaggcaggtgtcagttttccttctgaaaatagcgcaggcggaggggagcggagtctcagggtagaggtgtggtggggtgaggagccccgctgccctcatgactgtcctgagacactccggctccggtcccatccctgtctttctcagggtctctcaggggctctgtccccttctcgggggggtgggggggtctgccctcacgctctctgggcctctgtcttctctctgggctcctgccctcccccactctctctagtctcggtccccctctttcttttggtctctccccacttttccatgtcttctccctatctctcccttcatgtcaccgcgcaccatttctcaaggtagctgattgttcttaagacacatctgtctatctctggtcctatgataccttgcacgtctcttatctgagctcaggacaagaccttctccccggtccccagccaggaa

SEQ ID NO: 37380 - DNA, 738 bp, Artificial sequence
  DNA replication origin
gttgggttgtgagtctgggatagtgtggtccagctgcattgtgtaggattctgtggtttggtgggtcccctagggccatgttgggtcaagttagatggtcccccatggcattgttgagatcgaatgtgtgtggtgttaagtttcgttgagacatggtggaaattgtgtagctctgtgattcttccaggggcatgttattttaggttctgtgaacttgcgagtcatgtagaaatgtgaagagtccagtggtagaatttgagctttctaggtcacattgggttaagtttgtatgaccaaatgaatcttgtagggttctgttgggcttaactgtgtagaggtgtgtggctggacatttttcgtggccacagcgagttgagttgtgttgaattgtacaaccatatgagccttgtaaggccagttcagttgggtcatgccactgtttgagtctcatagggccatgctgaattgagttccattgagttgtgtcactatgtgagtcctacaggaagttgggttgagttggactgtgcgaacgagttccatagggccacatcgggctgttttgcatttagtggtagcaccaggacccaaaggaaatagcagtggggaagcatcatgtatctgggagcatgcagtggcgagggctctgggaggtgtgccgagctggctccccagctcgctgtagggggcgggactggattctgtatccatgggattgggtgttcatccagaggcgac

SEQ ID NO: 37381 - DNA, 923 bp, Artificial sequence
  DNA replication origin
ccgtctactttgccgaagttgaccgggtggactcccatttcactagcatccctgagtccttctggtgggcggtagtcaccatgactacagttggctatggagacatggcacccgtcactgtgggtggcaagatagtgggctctctgtgtgccattgcgggcgtgctgactatttccctgccagtgcccgtcattgtctccaatttcagctacttttatcaccgggagacagagggcgaagaggctgggatgttcagccatgtggacatgcagccttgtggcccactggagggcaaggccaatggggggctggtggacggggaggtacctgagctaccacctccactctgggcacccccagggaaacacctggtcaccgaagtgtgaggaacagttgaggtctgcaggacctcacacctccctagagggagggagggagggcagggtggagggcaaggctggggggaggggattgggtttaggaagagctaggttaagtcgtaacgagtggggaaacactgagtcttgttgggtcttgggttgtgtggtttggtagctcctgtgggtacctcctgaagcagcagcgaatggcaatgggttgtgttgtgttaatgaagactcaattggttcatattactctgagttgtgcaaagctcatggagccttttggggtagtgttgagataggtttggtcgtatcattttgtgagtttcctaggtcagtgttgggtttggttgggttgtgagtctgggatagtgtggtccagctgcattgtgtaggattctgtggtttggtgggtcccctagggccatgttgggtcaagttagatggtcccccatggcattgttgagatcgaatgtgtgtggtgttaagtttcgttgagacatggtggaaattgtgtagctctgtgattcttccaggggc

SEQ ID NO: 37382 - DNA, 1892 bp, Artificial sequence
  DNA replication origin
tctagggaggtgtgaggtcctgcagacctcaactgttcctcacacttcggtgaccaggtgtttccctgggggtgcccagagtggaggtggtagctcaggtacctccccgtccaccagccccccattggccttgccctccagtgggccacaaggctgcatgtccacatggctgaacatcccagcctcttcgccctctgtctcccggtgataaaagtagctgaaattggagacaatgacgggcactggcagggaaatagtcagcacgcccgcaatggcacacagagagcccactatcttgccacccacagtgacgggtgccatgtctccatagccaactgtagtcatggtgactaccgcccaccagaaggactcagggatgctagtgaaatgggagtccacccggtcaacttcggcaaagtagacggcgctggaaaagaggaccacaccgatgaagaggaaaaagatgaggaggcccagctcacgcatggaggcccgaagcgtctggcccaagatttgcaggccctttgagtgccgggacagcttgaagatgcggaagacacgcaccaatcggatgactctcaggatggccagtgacatggcctgctggcccacccctcgctgccgggccagctcggtgcccagtgccacaaagtagggaaggatagccacaaaatcgatgaggttcatcacgttcttgaagaagatagccttgcttggacagaccaggaggcgtaccagcagctcaaaggagaaccaacaaatacacagcgtctccaccacgaagaacgggtcattgaagggcaggcggggtggatttccaggcatttggctggagccattcagcggagcggggaactgcagggaggaaagtgttcagggagggtcaggctggggctaggacacggggacagccttaatcatcatttaaatacccagctcctctttacacattggtcagtagccgctgcgccaaggccctccgtgacctggttatcccagacttcctcccaggatcccagggatcatccctgggccgctgactttctggttgcctgacctggtgggtggctggagacgtggtccctgccccttcatgcgtgggaactcatgtttgagtagggtgcaacctcttctctctcaaagtcccgcctccagtgttgattttctagatggggagcatccctgccctggccccaccaccttgtgcctagcttttccttgccctccacagtcccagcccagagtataatgcggctgggcgcggtggctcacgtctgtaatcccagcactttgggaagccgaggcgggcggatcacgaggtcaggaaatagagaccatcctggccaacacggtgaaaccccatctctactaaaaatacaaaaattagccgggcgtggtggcctgcacctgtaatcccagctacttgggaggctaaggcaggagaatcgcttgaacccgggaggcagaccttgcagtgagccgagatagcgccattgcactccagcctgggcgacagagcaagactctgtctcacaggaaataaaaaaaaaaagaccttctctgcaagccgagccctaggccccctcctctggcccctcaacctggctttctttccatagattcctcctactgtcgcccctcgggctccagcaccctcagctggagttattcagggcctggctttcaccacccagccgcacagactccggagttttcaggctctccttggcccccctcagctgtgatttttaaggttcctgtcctcctaccccttgcatcaagggccctgccctcttcacgccgggtttctcactgacctcaaccccaccttctgatggggcaggtcctccgacccggatcctcaggccccgcctcccgcccaccctgtcttc

SEQ ID NO: 37383 - DNA, 1498 bp, Artificial sequence
  DNA replication origin
aaactggcaggcggaggttgcagtgagctgagatcacgtccccacactctagcctggacaacaagagggaaactcctctcaagaaaaaaaaaaaaagaaagaaagaaagaagaaaagaagagagaaggaatggaaggaaggaagacaggaagagaaagagtgccaggattagcagggcgttcgaacccttagtacctacctctctccacacccccagcagagggcgaccaggacttctttcctgggagtctcagtgatcaaacccctccacttcccccaagcccatctgatggagctatttttatgcagtgtcaccggacaccagtggctagaaggccaccgtcttgtctctgcgcccttcagttcctgaaaatgaccctgtggcatctccccggcccacacccccaacccccgcccgttccggcaagaccagactccttttgccagagtcatagccgcagctcaggtcctgctaggtctcagaaagtcttgcgaagaatccaggtggagactctggagcgaactctggggagagaatggggcgtgtgtgcacatgctcagtggtttgcagctgccagagtgaccctaggatgggacagccaccgggactgtggcagcacccacatggagtgatggtcagggagagatcaagagatatgactccggagaccctaagtcctctagagaccccaaggggagacccaaaggggagcggccgaggaaccctgagacagagacatggagggctaagagataatgagcaaaaagagacctagagaggagagacaaagagaccaagagagacaagagataaacggagacagaccaagagtcaaaataaaggcggagaccgagacgtagaggctggcagagggacccatacagaggcccccagaacgacgaatctcagaaataaatgacccatagagatactcagagatacatcccaaaagagacagagacccagaggggacagccggacacagacacacaagagagtgagagacaaaggtgcaaacagggcgactccaggccgggcgccgtggctcacgcttgtaaccccagcaattcgggaggccaaggagggcagatcacttgaggtcgggagtaccagacctgcctggccaacatggtgaaaccccttctcaactaaaaaagaaaaaagaaaaaaaattagctgggcttggtggcgcctgtaattccagctactagggaggctgaggcacgagaatcgcttgatcccgggaggtggaggttgttgcagtgagccgagatcgcgccactgcactccagcccgggcgacagagggaaactgtgtctcaaaaaaaaaaaaaaaaaaaaagacagaaagaaagaagaaagagaaaagaaaagaggcgactgcaactgaagcctgattctgacgaaacacacgcacacggaaacttggagagacgcaggacaggatcccggcggcagaaggacggagagaaaggggaccccgggacgggaaaggcgc

SEQ ID NO: 37384 - DNA, 969 bp, Artificial sequence
  DNA replication origin
ccctgaggttcaacgtgtgacacttacctccccaggttcacacacacacacacgttgtgggggatttggtttttgttttttaaaaaacacgtatataaaaaaaaaaaagatacatcagaaacagagggaggaggagaagagacatcgctaatgtcaggtgtggcagggtgggggaggggacagactgggaggggctggggcagcagagaagtgagagcaggtcagagggcagggctcggcgggaggtactcacagtgcatgtctcgctcgtgttcgtactcgatgaaggcatagccacggggctttcctgaccgcttactgtagaccatgtgtatctgtggggcacatggggacaggggtgagtcctgccacagggcggctccgccccaccaaccccacaacagcctgcacaccaggccctgggccggatgaggcctcagaccctctctgtccttcaagagccctgagtgacttatgttctaatggcaggagcagaggacacagaggcggcttcctggagaaaatgacacttaagctaagacctaaagaaagaagagagatgaaggaagacagtgaggtgtcagcctgtcaggtggaatagcagtaactccagaggtccaagggcccgggggcaggagggcaggaggctggggatgcgcttcggcagggctggctcatgtactgatgacagagagtcccaggagatgaagccacaaaggtgggcaggcccggggtcatcaagcgccccaatgccaggccgagaagtgtggtcgctgaggagctgggaagggtgttgagcaaggaagggccaatgtgggtggtctacgtggagtcaggaggacacaaatggaattagggaaacaggagggagttgtgaatgccaatgggacgggaattcttttttttttttttttttttggagacagagtcttgctctgttgcccaggctagagtgcaatggctcaatct

SEQ ID NO: 37385 - DNA, 849 bp, Artificial sequence
  DNA replication origin
agacgactgactctgcctccccccagccctgccccatctcgccctccacacccccggctcaacacgtgctgggagcgcaccccagcctgagcctgccaggaaaggggagtcgtagaggggagacgggggagaggctcactgctgctctcgggcagcgcgtagcagaaggcaagcctgaggccctggcctgtgatcaacgtggggctgtcatgaaggccaaaaagtccccgttcccccacccagccctggcctagggggctgtcctcaaccaaccgtaataccctgccccgccccagcccgctcccccccaaataacaaccagaggaagagaaaaaggtgccatttaccgatgccggccttgcgggtgtccaaaccgagcgggatggggggggctcggcaactcctgggggcctggcgaggaggcgggcttcccgggggggggacacgggaccgcttacctggagcccccaagcttacctgagcacgcgcacagaccccacacccaccaccacggggtcagctaaagctacagggaggggaagtggggggttctagggagccaggagagggagaggaaccacatctcctgtaccacctggagacaggcagaggacgtggtagaccccaaagaaatctcaaggaggccttagagtgggggagacgaggattatcatccaagctgggcgctggaaagccctggactatctcgtgtgaatttacaaagaaggctagggaggcctcagaaacctgtccgccctcaccaatccccgagtcacactgaactaggcacacagcccaccccctccgaggaccaggagtgacttctccacctccaaatccatgctccct

SEQ ID NO: 37386 - DNA, 963 bp, Artificial sequence
  DNA replication origin
ggctggggggaggcagagtcagtcgtctcaggtaaggcagggattttcagtagcaccgcacggctccccatgcttcctccactgcccctctcccctgctgcaggggccccgccaggccccctgggagtgtataacccgcctctctgctccctgccatttcctgaagatttctcccacccccttctggttcattttctgttctgatgtctgttccccccacactcacccccctccaaaaaaaacaaaaacagaaaaaaccggtgtggtctggggtgcggagcgtcccagctgggcctcctgccccggcttggtgtctcagggtgcatgcttggggttgtggaggagccccctcccccacagcagagtccagcgtggagttaaccttcagtttctttgcagcgattttggccgccctggcgggagggggctgttccatcatgtgggagaggaagggccggggagcctagggggtggcgggtgagggtggacgtctcccccgaccaggagtggttggggcgctgagaggaagcagacgctgagatggagcaggcccttcaccggtttgggagagggttggtctggctgtcagttgcctggctgtctgttgggcgtgtgcgtgtgcgtgatgatggggacacggggcggggattctgtagagctgggcctgtcctgactagaggaccctctggggactcctctcccctccccctccccacatctgttacagccgcttacaaacacgcagatggcaagaagattgatggcaggagggtccttgtggacgtggagaggggccgaaccgtgaagggctggaggccccggcggctaggtgagcacatcctgccttcgacgggctctcgggggccctgggcctggtggccttgttctcccttctctgctgctttctgcttctctgtctcctgccggcccacctctcccatcgcgtcctcatctccggcttct

SEQ ID NO: 37387 - DNA, 1133 bp, Artificial sequence
  DNA replication origin
tggcaggtgcctggtccgctgcctgcttctataagaatgtctccctgcagcctcttttctatacagaactcagccctgcctcacggaagcttttccaggcagtgcgagatagaggagcgcttgagaaggcaggttttgcagcagacggcagtgacagcccagttctgcaccttctttgctgagtcactgtgggccagtgacttgatctgagattgtttccccatcagaaccatgaggttatcatctgtgccttggggctgttcatctatctattcacttgacacacacacatccacctttctataccagctgcagcgccacctgctggtaccgtgagcaagagctgggcatgcccacggttccggtgccctgcagtctggtgggagaggcaggtaggggtcgactcaggtagcaaacctgaaactccaggggaaggaagcgtttctgcaactgtgagtacataggactgtgaggagagacttcccgagaaaggatgttcgggctagcgttaagggtgagcgtgagttcaccagagaaggaaggggagaccagtccagggcaaggagaatgcacagacactggcaggaaggtgagcgtggggacactgggaaaggcctgggacacgcagccaagagccgcggctcagacgctagcagggcccgctcttgctgcctctaccaccagttgacgaggagtttggaccttaggctgggggacgccagcaaaggcttctaagcagatcacatttttgggtggaaagatcattggcttcgggtttctgtgagggcgaggatgattggaagggagggttttgaggaggctgtgaagtgcgctatggttaagatgatgcgctttggggccagacatgggttccagtaacggctgttgcctagcgaacgctttgtgtgagttaattagagaagacgtggctgtcttgtgatgggagtgcgcgggatgaactgcacggggggacccggccctgtgaacactaagccaggggctgccttcctgccctttgctcttggagtcggctcatttctgctcctccgggccctgtccctgcccagattcaccctctgtccgtctgccctgccccaggaggaggcctcggtggtaccagaagaggaggggct

SEQ ID NO: 37388 - DNA, 1805 bp, Artificial sequence
  DNA replication origin
cggtgtcctggggtggggggcggtcacggggggagcccagccacacaggtctgcccacctcatccaggcccggcccctccccgcttccgcacagggaccgggaccgggaccgtgagcgggagcgcagagagcggagccgggagcgagacaaggagcgagaacggcgacgctcccgctcccgggaccggcggaggcgctcacggagtcgcgacaaggaggagcggaggcgctccagggagcggagcaaggacaaggaccgggaccggaagcggcgaagcagccggagtcgggagcgggcccggcgggagcgggagcgcaaggaggagctgcgtggcggcggtggcgacatggcggagccctccgaggcgggtgacgcgccccctgatgatgggcctccaggggagctcgggcctgacggccctgacggtccagaggaaaagggccgggatcgtgaccgggagcgacggcggagccaccggagcgagcgcgagcggcgccgggaccgggatcgtgaccgtgaccgtgaccgcgagcacaaacggggggagcggggcagtgagcggggcagggatgaggcccgaggtgggggcggtggccaggacaacgggctggagggtctgggcaacgacagccgagacatgtacatggagtctgagggcggcgacggctacctggctccggagaatgggtatttgatggaggctgcgccggagtgaagaggtcgtcctctccatctgctgtgtttggacgcgttcctgcccagccccttgctgtcatcccctcccccaaccttggccacttgagtttgtcctccaagggtaggtgtctcatttgttctggccccttggatttaaaaataaaattaatttcctgttgatagtgggcacctcggtttcttcctcactgctctgttttccccagaaggttgttcctgacttgatagccctgcttggtttggtttccagggtgtacttaaaacttgagcgttaggacatgaggctggctctgcccagtagccagagctgttgaaagtggggtgaggcggcctctcgggctccttgtctcccttgtgtttttcacccttttttctttttcatctctgccacacattcctcagggctgaccatacccctgtcttggtggggggctgggaattaggagggggcttgattactcaggggaagccgcagttttgaatatgcaagggaagctaccatctgcaagggagagcggcacacagggtgaggaaaggcagaatacactgggcacgggtgagacggggcagagcaggaagggtggacccacatcataataagtagtgacagaggagcaacgagcagaaacacagaagaggttccaccagcaattgagatttcaagcagattcctggacaaaagattaaagacattggtggtgagaacacttcagtctggtgagtgcagggaaggaagcctgtcagccttgcagaaccctagagggccaaggctgcagctccaggagagcaagggtgggaggccagagggagagcggggtacagaacagttggcctccctgttggcactcaggatgcctgggagctgggccgggggtgcctaggcaaacctgcttgtgttcagacctgcttgtgtcttgtagaagcgtctcagcctgaaggcaaacttggcctgataactcagagggtctgtgactgacacgcaggatttcagtctgctttttaatggcttcagtttaaccaacggaggatacccagacatttgaggaaaaacagaccacaagataaatagaaaaactgaccctggaagaaa

SEQ ID NO: 37389 - DNA, 978 bp, Artificial sequence
  DNA replication origin
gacaccccgcagagtccagggtggcgcaggagagactgccaccagcggccctgcggccccgggacccctccacaggccgggttgtaaggcgggcgcccagcgtcccggcccgcgcccagggagcctcccacacctagcgaccgcccggccccggcgcccgccccgcccaccccctccgggtccgctggcccacccgcactggcctgacccgggaagggcggggaccgggggctgggtatgtaggccgcggcccgggtgggcagggccccctggcgcacgcttaccccgctccagccccagcggctccaccagcgcagccatgtcggcgccacagctgccagccgcccgcctgccctggcgccggcgaggagggcggggctgcgcgaggccacgccccgggccacgggcgccccctgcggaggcgcagcctggagagcgcccagctctccctcgcccgactgctccgaccacctgccgcgcgccagccgcgccctgccctccgccccggccagtcggtcctgttggcgacccctcccactgcaggttcggtctgtgtgtacctttcaggatccgtgtctgcctgccctccacacccgtctatcccctgtccatcctttccccacattcattcaacaaactcttgtgaaacatctgagcccaagtcatggacaccgtggtgagcaggacagccaagcccacggcccgaacgaagcttccagtctataggggaggtagacgaccaactacggctgtgatgagagctgagagtggggaggtgatgatctagaaaacgaaggaaatcctagaggagggacattgacatacagtcctgggaggtaagatgaacaagaggtggagcttgggtcacccccaccacccagaaagagcccacgtggctggaagcagagttaggattggttgatgatgaggtgaaaaggtcggcaggatagtttatgcctgggctcctgcgttggcata

SEQ ID NO: 37390 - DNA, 1108 bp, Artificial sequence
  DNA replication origin
agcggacccggagggggtgggcggggcgggcgccggggccgggcggtcgctaggtgtgggaggctccctgggcgcgggccgggacgctgggcgcccgccttacaacccggcctgtggaggggtcccggggccgcagggccgctggtggcagtctctcctgcgccaccctggactctgcggggtgtccgactaggcttcggccgtcctccccggactgtgcgctcggcctcactccgccgctctccttgcttctctgcgtctcggggtctctgacactcggggtttctgcgccccgcccccgccccgcagacgtgtcccgggcggttgagctcctcgagcggctccagcgcagcggggagctgccgccgcagaagctgcaggccctccagcgagttctgcagagccgcttctgctccgctatccgagaggtgaggggcgcgcggcgcaggggcgcgagctggtggccgtcgtcctcctcctcctcctcctgcttgtcccgagcccggagactacgcctcccggcagctcccgaggcggcccgccttggggtgccaacgcttcagctcaggggttcttcgggagttgtagttttctcggccttctgttgcgggggcggggcggatccttgcgtggtagcgggagagggtctagaggcctgaactcctgcgtctagggctggaggagctggcgactccctgatgccgctgcctcctcacccaggtgtatgagcagctttatgacacgctggacatcaccggcagcgccgagatccgagcccatgccacagccaaggtgggccccgcaccccattgctcctggtgtctatttaactgcctagtcgaactcaatatctccttcatgccagtcatttctgtttcctccctcatgatttttgctaaatctatgtgccaccttactattagtaaataatcgcacatttttaacttaaatgtcatactaaggcatctttagcaactgcaaatggaaacagtatggcatggttggtagaagataaccttcaacatctgtacagtgcaaaccaggaaactcatggcgctctgacctctcactgcacaatagttagatgctgctacctcttgctgctgtc

SEQ ID NO: 37391 - DNA, 1319 bp, Artificial sequence
  DNA replication origin
ggtactgtagataaggatactgacttggcatacctctgagctgaaaagaaagggcttagttctgatggaggtctggggcatgcaggtaattaaaatcactgtggttaggctgggtgcggtggctcacacctgtaatcccagcactttgggaggctgaggcacgtggatcacttgaggtcaggagttcaagaccagcctggccaacatggtgaaatcccatctctactaaaaatacaaaaattagccaggtgtggtggcaggcacctgtaatcccagctacttgggagggtgaggcaggagaatcgcttgaacctgggaggcagaggttgcagtgagctgagatagcaccactgcactccagcgtgggtgacagagtgagactccctctcaaaaaaaaaaaaaaaaaacaaaactcactgtggttagagttgagggaagcataactggagagatggctggggtcagccatacaggacctgagtgccagcctgagaagctgggactttgtcccatgggtgctggggagctatgggaggggtgagccagggataaactcagcttgcaggtgcagaaggaccactctgggactctatgggagatgaactgaggggagagattagaagccaggccagggaggaggctggggtaagagtccagagaaaagaggacaaggcctgagctggcccagggctgtggggacaaaaaagagggagtcaaggcgggcggacattagtgggctgtgggcagggaggccacaaagatgggtctggacgtttggccagggactgagggaacacggggctgtccctgacatgggaatcctgggaggttttggaggaggacactgaaccaggagttaatgactcccacgaggaggacatgaggcattgacatctcagggctggcaccaggctcactagcagtgggtcccatctcccagtgggggctggacgagggcagcgggccccaggctcagctgtctgtgttgggccctgcagagcgttgagggtgagcagcatgagaaggcggtggagctgctgaaggcggcccagggctcggtgaagctggttgtccgttacacaccgcgagtgctggaggagatggaggcccggttcgagaagatgcgctctgcccgccggcgccaacagcatcagagctactcgtgagcccctgggtcaccacacccctggggcctccacgggctccctttaaccccaggctcccaaaccaggccagtgcttcctggatcttccagccctggcccctcctctgggatcctgacccttgacccttggcccaggctctcaccccaggctagt

SEQ ID NO: 37392 - DNA, 1299 bp, Artificial sequence
  DNA replication origin
gggacccccctccccctcacgctctcactgccttctacccccaaaatagccccctgcccctgtcaccgatcagcctccccccgcgaggccgcagccgccagatccaggggtgcccaccagcgccccccaaatcccaccttccccccaaaaaaattcctcctccctccccctccccccccacggctcccgggcggtcgtggcccctttaacaggagactgacagacggcgaagagcggccaatgggagagagcgtcggcgccggccggcgactagaccccgcctccacaccggccgggaggggtcgcgcgggcggagagcgagaggcggggcataaggcgcgtcgaccaataggcacgcggcgtgaggcggctggggcgggaggcggagcccggcagggggatgatgtcacctggagcgagtagcgcgcggcgtggaacgcgagtcgcgaccccggctcccggcagtggcgcgcactagccctcgcgccgcacgggacacgagggctgggcgggcagcgggatgaggctaaaggttggatttcaaggcgggggctgcttccggaaagacgcgctgtgtttggaaggtggagtgagcgcccggtgggcgagggcacctcattctgcacccctgcgcccgcctcgggaactgcacgcggcacccccacccgcgactcccacgcagacagtagtgcggcctgcagggttcccccggcggacgaggctaatggttcgctccgccccgcccacacagaggccgcccactggctccggctgcgtttcaggactctggaggaagggacttggccttcgccctcagacgctcttaagggtaggcagcgttgtcctcagttctgccccagcactcagacccagactgggtccctgcctccgccctccgccctcggactagtctcttggaagccggcctgtctccgccttcagacctagggagaggtcttaacctctgttctcagactctggaaaaggcttctcaacggcttggcctgacctcagctcctcgcattccctccacatctcaagacaccaacccagggatgcaggacagacacacagacactcagtgagggtcaaatatctttaaataaagtgccaggaacaataaatactgtacaggaagagagtgcacgtgaacgtccagatctgtggtttcaacctcgagactccaaggacctgcaaggggggtggacaagggacccgggatcagggaggctccgggtagacaagaggggcaggactggggttgcagaggcaagggcccaggtaagtgggctgagggat

SEQ ID NO: 37393 - DNA, 1247 bp, Artificial sequence
  DNA replication origin
cagctcaatgcaacctccgcctccggggttcaaacgactctcctgcctcagcctcctgagtagctgggattacaggcatgtgccaccacgcctggctaattttgtatttttagtagagacagggtttctccatgttggccaggctggtctcaaaatcctgacctcaggtgatccgcccgcttcagcctcccaaagtgctgggattaccggcatgagccaccgcgcctggccaaaaaaatttttttttaattagccaggcctggtggtgagtgcttgtggtcccagctactcaggcggctaaggtgggaagatgacctgagcctaggaggtggaggctgcagtgagctgtgattgtgccagtgcactccagcctgggcaacagagaccttgtctcaaaataaataaataaataaatagaaagaaagaaatttgtatggcagcaggtagcttctagatctccttatgagcccaggccacagaatacatctggaggaggtgatgtgtgttcggctcattggcctgggagagtgtacttggagaaggggaactcatctgagcctcagggggcaatggagtgctagaaacatctcaacaagctgcatcttaggggaaagagtagagagtcctgaagcccgccacctggggtgacatgaggatgagacaggggtttggtagggccacaggagatgtgaagttgatggggcagagtgatgaggctgtgaagacctggttcctaaaagtgagacctgagaaactagatacctgctggggagggcagtggacagagctgggagcctggactcctgaatccttgtggaggtaaatgatgggggattggaaggtgagagcctgaggtcttgtttggagagagggttgaggcagacagcctcagtaaaagctggtgggcagtacggaagctggggtctgaactcctgggtccctgaggggataggagactgggaccaagacatttaggtccccaagtgggagtgtgaacagaagtcagagaactgcattgagaatcacattccgggtcccccaaaggaaaggagtcatggcgcctgagtccctcggggagcagatgctgggtgccaggaggctaagtctgtgtgtctgcagggcacagcggggttctaagcagagcaaacgctggggaacaggattcctaggtgctgacggggtgagggctaccacctggggccagcagaggtgtagacacggacaggcttcccgaacggggtgggagc

SEQ ID NO: 37394 - DNA, 1126 bp, Artificial sequence
  DNA replication origin
cctcagtttctctgttgtgccttgacaaggccggtctgttccttgccctccccgccccgcaggcccgcaccgccgccatgatgtgcgaggtgatgcccaccatcagcgaggatggccggcggggctcggcgctgggcccggacgaggcgggcggggagctggagcgcctcatggtcacgatgctcacggagcgcgagcgcctgctggagacgctgcgcgaggcacaggacgggttggctacagcgcagctgcggctgcgcgagctcggccacgagaaggactcgctgcagcgccagctcagcatcgcgctgccccaggtctgggcgggacaggggcggggcatgagggggcggggcctcggggggaagaaggcggtccggaaggggccgggcttggcgcctggaagggaggagtctgggcgaggcttgccgttaatgggcggggcctgagtggcaagggacagcgggacttagcagggagggcgggaccttcaaacttccagtcccagtgaatgaaggagacagggaaaggattgagccgaatgtccagatcctgccaatgtctggacaggagtttgcagctctgacgaaggagctgaacttatgtcgggagcagctgctggagagggaggaagagattgcagagctgaaggcggaacggaacaacacgcgggtgaggggtgttgagggcggggcctaagtgggggcggggcctcgtggtgttgaagtggggggcggggcctctcagtgttgcagcgtgacctatttttttcccccatctcgcctttctgtcttctcctcttccctgctcccacttcctggctggtctcccactctggtgccactccttcctccctgtctccataacttttctcttttctgtaccaccggttccttgaccccgacctcctctcttttcctgacctgtctcggtgctcctttatatggctccatcttttcctccatgtgtccgccctacctgtcaccctttttctcacatctgccccttttcccttgcctcttttccttgaccccatgccgtgtgcttgcagctgctcctggaacacctggagtgcctggtgtccaggcacgagaggtcactgcgcatgaccgtggtgaagcgccag

SEQ ID NO: 37395 - DNA, 752 bp, Artificial sequence
  DNA replication origin
tggtgttgaagtggggggcggggcctctcagtgttgcagcgtgacctatttttttcccccatctcgcctttctgtcttctcctcttccctgctcccacttcctggctggtctcccactctggtgccactccttcctccctgtctccataacttttctcttttctgtaccaccggttccttgaccccgacctcctctcttttcctgacctgtctcggtgctcctttatatggctccatcttttcctccatgtgtccgccctacctgtcaccctttttctcacatctgccccttttcccttgcctcttttccttgaccccatgccgtgtgcttgcagctgctcctggaacacctggagtgcctggtgtccaggcacgagaggtcactgcgcatgaccgtggtgaagcgccaggcccagtccccgggtggggtctcctcggaggtagaagtgctcaaagctctaaagtctctcttcgagcaccacaaggccctggatgagaaggtatgagaattagaagagcaggggtggagaatggaaacctatagttgactggggctgttctgagtgggagagattctggccgtgattggttggggatgttctgagttggaagaatgttgactgtgattgattgggacaggatacatagactgggacctgactggttgatagcagaaaaataaaccaggatgggggctaacagtggatggggcagattggatagctggttgcggctgcatacccgttatggag

SEQ ID NO: 37396 - DNA, 1419 bp, Artificial sequence
  DNA replication origin
gtggggtctcctcggaggtagaagtgctcaaagctctaaagtctctcttcgagcaccacaaggccctggatgagaaggtatgagaattagaagagcaggggtggagaatggaaacctatagttgactggggctgttctgagtgggagagattctggccgtgattggttggggatgttctgagttggaagaatgttgactgtgattgattgggacaggatacatagactgggacctgactggttgatagcagaaaaataaaccaggatgggggctaacagtggatggggcagattggatagctggttgcggctgcatacccgttatggagacaggagccccaacgctgccctatcggatccgtcccaggggtgttctggaccaggggcaactgtcctaaactggatcttgtctccagctgactgttgccctgccccgatccccaggtccgggagcggctgcggatggcgctggagcgcgtggcagtgctcgaggaggagctggaactgagcaatcaggaggtgtgggtgtggccaagacagggaatttgaatccaaggggaggggctaaggggctgcccacggggcggagccggttgggtgggttccagagagaatctattggggcaggactagggcagacaagctatggggttggactatggagagaaaccagtggggttcctaagtgggcacgcattgcgcagggctacggggagaatctcccagtgagagtgagattaagggtagaaccaggggctggggctcaggctgggactaaggaggaagtgattgaatggggaaaagcggggctaaagcggaaactttgtccaggaggctaaggggaagagtaagggtagacgccctccgtggtggcagctaaggagggatataaggagggagggagcctaagggtaaaccgtggggtaggcatggccccagcacgaccggaggcatctcatatggggccgcctatccccttagagggccaatgccagtgagaactagagctgggggttcagggagcccctgtgctctgattcccctttcacacttccagactctgaaccttcgagaacagctgtctaggcggcggtcagggctggaagagccgggcaaggatggggatgggcaggtgagacatggaagtcccctctccgtgagctccattcaactccctgactttgtgatagtgtttgtaacgtttggtatcatcctcactggccctaagacggctgcacctgtaagagtgtcacagagcttggacctctgattcaggtcacctagcgaacttctgtgacctccttcactgacccccgtggactctgaccagcatgatccttattgatctttgatctactttcagctgattgactttctccttggatttcctctgtgtctccggagacactctgggatctt

SEQ ID NO: 37397 - DNA, 1152 bp, Artificial sequence
  DNA replication origin
agggcactttgtttcccagggaacaagggggttccccgtcctctcccccaggggctcgcagtccacggggccctttgctacctccgcaggcgctggcgcagcgggaagatatggaggagcggattacaacactggagaagcgctacctgagcgcccagcgggaggccacgtctctgcacgacgccaacgacaaactggagaacgagttagctagcaaggagtcgttgtatcggcaggtgggggcgcggccgggaggggcgatgggggcggtgccggggcccaagtgacccagcccgtcccctccccctgcctctccctcccccagagtgaagagaagagccgtcagctggccgagtggttggacgacgccaagcagaagctgcagcagacgctgcagaaagcggagaccttgcccgagatagaggcgcagctggcgcagcgcgtggcggcgctcaacaaggtgcggggaggactcgggtcggggccttgcgtggggaaggggtggggcctagaggaggcggggccgtgaatctggaggggtaggagcgaggtcagaaccccggatttgggggaaagggtggggcctaggggctgggaaagggacaggacttggaatggggagggcctggaggtttgcgcgggggacggatgggagcggggttctctagcctggactgaaaggaccggtggcctggaacctgagagggaaggaacaggtcctgaaaaagtggactaggcgcaggggcggggcctgactcaaaggtgcaggggaggagcctggcgctgtgggggcggagcctggcgctcagccttggaggaggtggggctgggagcctgactgatcctggaagggtaagtcacacgccatgggttccatctcctaggccgaggaacgtcatgggaattttgaggagcggcttcggcagctggaggcccagctggaagagaagaatcaagagctgcagcgggtgagggggcggaagactgcacagagggtggggcttcgaggctggggcggagcttaataaggaggctgggctgggcccgggggtggggcttagaggaagggccgtggtctgggcagggtgggcttaacaacccgccccgctctgctttgcgcaggcccggcagcgggagaagatgaacgatgac

SEQ ID NO: 37398 - DNA, 800 bp, Artificial sequence
  DNA replication origin
tggtatatttgccgaaggctcatggggagtacattataagagaattgctgaatatggccattgctggtgaatcagggtagactttacatcactgggggcttcttaataagttggggacttttttttttttttttttttttttttttttgacacggagtctcgctctgtagcccaggctggagtgcatggcactatctcggctcactgcaagctccgcctcccgggttcatgccattctcctgcctcagcctcctgagtagctgggactacgggcgcctgccaccatgcctggctaattttttgcatttttagtagagacaggttttcaccatgttagccaggatggtctctatctcctgacctcatgacctcatgatccgctggcctcagcctcccaaagtgctgggattacaggcgtgagccactgtgcccagcctggagttgaagtttttgattagcatgttaggatgagattcttggtgtttgaggttgggaaccttgtgttgtcttgagattcctagggtagtgggagactctgggcactggttatgtgaaaccacaaaatcgatggcgtaatggaagattcttgatgcatcaagaggaactgggctatttggggatgcaggctttggtgtgttggggaatggtgagtactggctggggggtatatgtgtaggtagcacatagaagacttctgagtgtatcctaggggatgcctggacagcggagtgagtgttgggctggaagaattccttgtggatggtgtaagaggagacggactcaggctttcaggcctccag

SEQ ID NO: 37399 - DNA, 1056 bp, Artificial sequence
  DNA replication origin
caaagaaagcttcttagaggtggtgacatttgagtgggacagcaaatgccgaggagagggagagagtcagggaaggaggtggcctgggcccctcctggagtaccacagggacggaccacaggccaagttaggagtggaggggaggctgaggggggtaaaagccaatgagaagcagggtcgtgggacaggggagtgagcaggcccaggattggctagactgagggcaagaggcggggctctgaggaagcgaaggctggaattggccgccggacactcacagtgcgggaggaggcgggggctgagggcgaggtgagcgagaccatctcctggatggcgaggcgtagcttgagtcggtgcagcgggttgctgatgccgatctcgcgctggatctccgtgtctgacaggttggccatgatggcaccgctcttgacattggcccggcaggcggccacataccaggcaggcatgcccacccacagctgcagcggagggacagagggacagaggggacagagggacagaggaggagaaaatcggagagatgggggaacagggaggtggggaaaggcaagggggtggggagcgaaacagagacgtgggaaagttcgcaaggagaagaaacaggacaaggaaaagagacgtggacgagatgagggagagtccgagggagacaaatagggagagaaacggggggcggggggcgggtgggggaagagggagagggagagagaaagagagagagagagaaagaaatagagagagagaaatagagggtggggagagacaggaagccggagacagggagacatcggcagggcgatcggagacatgaggagaaatatggggaatgacaaaagcgtggtcagagatgggaatggtgccgaaaaatagagacagagaatccagaaagagagagtagagagaacgacaggagaccatgacccaggtgggcaaggccagagtggcaggggcagaaggagaaggagaaagaaactgtttaggtgaacaggaagcccgagccctcctgggtcctcacctgccaggcccatggccacc

SEQ ID NO: 37400 - DNA, 817 bp, Artificial sequence
  DNA replication origin
tgtggcccagggccttcaggaggacaccctccttcctctcccccacgcgaagccctctcccaccatccattaacactccctgcccctcagtccacaggaaacgtgtggatgacacacgaggagatggagtcccttacggccacgaccaagcccgtgagtgccccctgccggccgccttgggggtggcactaaccttctttgggggtgggggcggggaccgagtctgtggccatccctaagtccgctccttgcgtcctcctctgcctgccccttaactcaccccttctctcccctcttcctactaacgggtcaggagaccaaggagatcagctgggagcaggtagggggcgcggggcggggcgtgagcgcatgaacaggctgtgcacgacgcatggatgcccctcctccgagccctgcccctgccttcaccagaacatgccatcatccccatgggggggcgctgcgccaagcttggctctggactgttccattatggcttggcggtggggagggtagaggggatgcgatgtggaagcccagactgttgcatagtcagccttatgcatggaccatttcatcatcgtgggttgtgggggctctaaggggcttcaattctgtagctcaggagagactgagcagccggtgtccctatagtggagggggcgggggctacagtggactgctcagtgtaccagggccaaggaggacacactggctgtggtggtggtgaggcagccaggctgaatgagaagttggggaggaggagctacactttgttctcaagaaacaagaggcggccgggcgcagtggctcacgc

SEQ ID NO: 37401 - DNA, 775 bp, Artificial sequence
  DNA replication origin
tgtggtggctcacgcctgtaatctcagcactttaagaggccagggtgggcggaacacgaggtcaggagatcgagaccatcctggctaacacggtgaaaccccatttctactaaaaaatacaaaaaaattagccgggcgtggtggcacgcacctgtaatcccagctactcaggaggccgaggcaggagaatcgcttgaacccgggagacggaggttgcagtgagctgaggttgcgccactgcactccagcctgggcgacagagagagactccgcctcaagaaaaaaaaggaaaaaaagggaaaggaaggaaaccaggggcaggggaggggaggggaggctggtttggggggcagatacagagctcagtgttagagataaagagggtagagtctggggaagcgtccagggtgcaggggtgggccaggggcgggtacctcccaagtggcgttagagtttccatctaaccaggctcccccggtccccagcgatgcactgaatgtgagagctgtcactgtgatgaggagaacatgggtgagcactgcgaccagtgccaggtgagacctcacctcacactcaaggctccactgggcctcaggatgcaccgggaccctctgaggacccccagccctaaatcctggcctctgacccaaccccttacccctgatgcaaccttgactccacaagcgatcctgactccaaccttaacctagacctagcctctggtccgggtctggtcccggccccatcctaactccgcccccggccacgccccacg

SEQ ID NO: 37402 - DNA, 733 bp, Artificial sequence
  DNA replication origin
ggaggaagaagacgaggagaggagggaagagagggctgaggttggggccccactgagcccagaccacagcgaggaggaagaggaggaggaggaggggctggaggaagatgagccccgcttcaccatcatccccaacccactggacaggagagaggaggctggaggtgcctccagcgaggaggaaagcggtgaggacacaggtaagtggcctgggctggtgtgggtgggaaggaaccgagtcagcctgggtcactgctgccctcctgtccccgcaggtccacaggatgctcaggagtatgggaactaccagccagggtccctgtgtggctactgctccttctgcaatgtatgtccccagcccagatccacccaccaaggtgtccccagaatctgtcccaggggccctggggtggtgctgtgggagggctcagagcaagggcaggccagggtcagttctgaaagaaaagagatccttctgcaggcatgtgaggtgaggacagactgaaggctgggaggctggggcagtggtccaggaaggagaggacaagacccaagctgcatcttggggtgtggggacagagacaggggtctgtggcaaagagagtcgggggaaggagggatggcacaggggctgataggctagggggagaataggcagagagcgggtggagagagcacctgagcccaccctgacagggagacatggggtcgccctgagatagaaaaccagggg

SEQ ID NO: 37403 - DNA, 2432 bp, Artificial sequence
  DNA replication origin
tggaagtggggtgagagggcacccagttctgtcctatgggacacagagccacccaccccgtgcgctccccacggacacaggagtccgggcccccagcgccctcccgctccagactcaggagtctcgacccccatgccctggaccctggaacctggaccctcccatccccctcctccgtctgacccaggaatctgggtgtccagcgccctcctctctgggagcctggaggcgaggtccccagctccgcgctcccgcagaccctggtccggcgctcacctgctccttctccggcaccaccatgctgccgcggccgccgcaacctcctgcagcccagggccccggcgctccctccgccggctctgcttccagacccgcccagagcaaaccggatcctccactttccagcctagcctggggcggggcgaggtctggggggcggggagtcttggagacgccaaagcgggaggcggggagagggcgggtcccaggccgcgataaggggacagagggacagcgacctggggggtgcagaggtccgggccggggggagagagacacacaggggagactccaagggcaagcgcgagatgggaacagaaggagttgggggccagtggcggagagggaacagactcagaaaggaggatgccagacagggaggggacaatttaacccaaagagggggagacaaagacttaggggacagagaatcagaaggtggggcagcagggacccagggatagacagagagagagggggacagagacccacagagagagggggacagagacccagggagaggggacagagacccagagagagtgggacagagacccagagagagtgggacagagacccacagagagagggggacagagacccagggagaggaggacagagacccagagagggggggacagagacccagagagggggggacagagacccagggagggggggacagagacccagggagaggggacagagacccacggagagggggacagagacccagggagaggggacagagacccagagagagggggacagagacccagagagagggggacagagacccagagagacggggacagagacccagagagagggggacagagacccagagagaggggaacagagacccagagagagaggaggacagagacccagagagagggggacagagacccagagagacggggacagagacccagagagagggggacagagacccagagagaggggaacagagacccagagagagaggaggacagagacccagagagagggggacagagacccagagagggggggacagagacccagggatggggggacagagacccagggagaggggacagagacccacggagaggggtacagagacccagggagaggggacagagacccagagagagggggacagagactctgagacagagggggacagagaccctgagagagggggacagagacccagagagaggggaacagagacccagagagagagggggacagagacccacagagagaggggaacagagacccagagagagggggacagagatccacagagagagggggacagagacccacagagagaggggaacagagacccagagagagggggacagagatccacagagagagggggacagagacccagggagagggggacagagacccagagagagggggacagagacccagggagaggtggacagagactctgagacagagggggacagagactctgagagagagtggggacagagacccagagaggtggatgccagagatggggaggagacaccttgactgaggcaaggggcagagggggatgcaaaaaccaaagaattgggggaagggcaggaactcagaaaggaggggccagagatttaggggagagagagggacacagacttgggggaggactgacactaagataagagtgggacagaagcccagagtgagagggagaggcaatcccatggaggagggacagggaccctgagagagcagatgacagaattgaagagagaggaggacccgtgaacaggaaaggagaccctagtgggggcagtcatgaagggtgaggagtaggaaatactgacacacagagacgggcaaggccacttgtctcctgccagccctctgtgatggggacagctgtggcctccgtaacctgagtccccctacccctcccagctgtatttatagccctggcctagcccagtccctgcccccagatctgagttccagggacaggaggtcatgggcacgtgtgttgggggccatgttcctttccccccattctagggcctcaatactgacatcactctctcaccagcacgtatcattccagctggaaacaccccgcaatcgaacccccagtccttccgtcccaggagtctctcccctctgataagtct

SEQ ID NO: 37404 - DNA, 1064 bp, Artificial sequence
  DNA replication origin
tggctcacgcctgtcatcccaacaatctgggaggccgaggcgggtggatcacctaagtcaggagttcgagaccagcttggctaacatggtgcaaccctatctctactaaaaatacaaaaattaactgggcgtattggcgcatgcctgtaatcccagctactcaggaggcaggagaatcacttaaacctgggagacggaggctactatgagcagagatcacgtcactgcactccagcctgggtgacagagcaagactccatctcaaaaaaaaaaaaaaaaagaaagaaagaaagaaaaaagtgatttgaacagcatgtgcaaagtccttgctaaggaccatatggtttggcttgaatatgaatcaaagttcagggtgcagggagcactgtcatgagagaagaggctgcagaggagggcagggccagagcttgcagggtgtcagaggccaccctaaggggctgggatcttgtccttgggagctggggcatcaccgcagcagtggggttggctctgggtgtggaaaaactttctggggctgggagaggatgaacaggagctcgggaggaggctgtagagagcgtctgagcgggaggggtagtggcctgagccaggtcagggctttcgggacacagagaggagggcatggggcaaagactcagggggcaggaaggcagagcttggggcttgatgagggtgatgagggagagagggggtgccgccatcggtggatggctccgggacgtatgctctgctgactgggacacagtggggctgtccctgagatggagagctcaggagggcaagcaggtttgggaaatgtcgctgagtgcaatgtgggaatctgtgcatatgagcggcctagggggaccgaggggcatgtggggactgagattgggaaaggtctggactaatgtccagaatctgagaggtccgagttgtagctggtaattgaaactggaagtaggtaagacgtcacagggaaaacaacgtgtaaagtcaggggagttgcaaactggcaattctatagccaattgtgtgcgtgtgtttgtgtgtgtgtgtgttta

SEQ ID NO: 37405 - DNA, 1224 bp, Artificial sequence
  DNA replication origin
gggacagagacccagagagagagggggacagagacccagagagagagggacacggagacagagggagacagagacaaagagacgcagagagaacgggaccccctcagagagaagataggtggggcggaggggacaaagagagccaagacagggatgggcggaggggccagggttcagggcgggcgtcccggctccactctggagccccgagcatgcagccccctggtgcccgggccccgcccacagaggcccgcctcacattgctgtgcttgcggccggcccccgtgaagtccagctctccgtaggcatcggtgggcttctccgtggtgtgtgcatcgctgtcccacacggtcaccacggctgccccgaaggcatcctccatggccactgcggggtgggcggtccgggggcgcccacactggcacaaggtccctctgggggtgcgagggcggagcgtgaacccagggctgccccccgaccccagcaccctgtcagcgtgttcatgctcctgtagagggggctgtcgacactgagtccacacccacagaggcaggcagagtccacgctgcccctggccctggctctgacggcctcggggagagactggagccgaggacggtcccctttccccacgggaaggaagccagtgagtccagaaagcctgagcaggaagaagcaggtcactgtcacctgaggagcctcaagtgggaaggcagagggccactgggggtatccttgctgtgccctgtgcccccatccaaacacatgacgttcaacacgagaaagaacatccagcgggtaactcagggagagcccgcatgctcggggctgacgcggctgtgtgactttgggcgagcggcttcacctctctgagcctaaatttcctcctctaatgaaaagacaataatagcgcggcctactccacggagctatgaggagccagggaaagaacgccgtgtttcctgaaatgaggctcgcataccagtcccagccagaggcaacgcgacacgaacttcacacggagcttaaaataaccttgaataacgcagtgagaaagtcattcctttttcagttctcctgacgactgtcaaggagagaggctcagccgggtgctagaatatttttgaatgcctaaccctttgctactcttttgaacaagaaaagcaggcctcgggctcaaaaaatggagctggcaacagccatctagcgagtagggaaacacct

SEQ ID NO: 37406 - DNA, 2150 bp, Artificial sequence
  DNA replication origin
ccccttttccaagtccctgggtcacaccttggggttgatgagggtgtctctattccggaccacaccccagggggccacacccatggccaccaccttggtgcccccagtgctggccatctgatggtcccgtacagccacaccaacatgccggccgatgcccgtgtgcagacccccagtgacaatccaggctcctacacagacgccgaggaacatgcagaggcagggggagagaaacaaagaataagacagagacacacacacacactgggcggcgggggaggccacccacagtcgtgggggagatggcaggcaggccgaggcccaggagacagcccccacccaccctcggtcacctgtgctctgggcagcccgcaccagcccacgacgcagcaggtcctgcagccaggtctggaggacggggccccccgatccccccagcactgacaccaccaggttcggggcacggaagccccatgtgcgtgtgaccagactataaactgcagctggatccgttcggtcagagagccggaggaactgtggacacatgggagcggggcacacagggagggggacagagacccagagagacggggacagagacccagagagacggggacagagacccagagagacggggacagagacccagagagagagggacagagacccagagagatggggacagagacccagagagagagggacagagacccagagagagagggacagagacccagagagatggggacagagacccagagagagagggacagagacccagagacatgggacagagacccagagagagagggacagagacccagagacatgggacagagacccagagagatgggacagagacccagagagagagggacagagacccagagagacggggacagagacccagagagacggggacaaagacccagagagagagggacagagacccagagagagagggacagagacccagagagatggcgacagagacccagagagagagggacagagacccagagagatggggacagaaacccagagtaaaggggaaacagagacccggagagacggggacagagacccagagagagagggacagagacccagagagatggggacagaaacccagagtaaaggggaaacagagacccggagagacggggacagagacccagagagagagggacagagacccagagagagagggacagagacccagagagagagggacagagacccagagagagagggacagagacccagagacatgggacagagacccagagagatggcgacagagacccagagagagagggacagagacccagagagagagggacagagacccagagagagagggacagagacccagagagatggggacagaaacccagagtaaaggggaaacagagacccggagagacggggacagagacccggagaaacagggacagagacccagagagacaaggacagagacccagagaaaaggggaaacagagacccggagagacagggacggagacccggagaaacagacagagacccagagagatggggacagagacccagagagagggggaaacagacccagagagaggaagacagagacccagagagacggggacagagacacagagaaaaggggaaacagaggcccagagagacagagacagagacccagagagacagagacagagacccagagagacggggacagagacacagagaaaagcggaaacacagacccaaagagatgaggacagtgacccacagaaaaggggaaacagagacccggagagacggggacagagacccagagagagagggggacagagacccagagagagagggggacagagacccagagagagagggggacagagacccagagagagagggggacagagacccagagagagagggggacagagacccagagagagagggggacagagacccagagagagagggggacagagacccagagagagagggggacagagacccagagagagagggacacggagacagagggagacagagacaaagagacgcagagagaacgggaccccctcagagagaagataggtggggcggaggggacaaagagagccaagacagggatgggcggaggggccagggtt

SEQ ID NO: 37407 - DNA, 1145 bp, Artificial sequence
  DNA replication origin
ccctctctctctgggtctctgtccccatctctctgggtctctgtccctctctctctgggtctctgtccctctctctctgggtctctgtccccatctctctgggtctctgtccctctctctctgggtctctgtccccgtctctctgggtctctgtccccgtctctctgggtctctgtccccgtctctctgggtctctgtccccctccctgtgtgccccgctcccatgtgtccacagttcctccggctctctgaccgaacggatccagctgcagtttatagtctggtcacacgcacatggggcttccgtgccccgaacctggtggtgtcagtgctggggggatcggggggccccgtcctccagacctggctgcaggacctgctgcgtcgtgggctggtgcgggctgcccagagcacaggtgaccgagggtgggtgggggctgtctcctgggcctcggcctgcctgccatctcccccacgactgtgggtggcctcccccgccgcccagtgtgtgtgtgtgtctctgtcttattctttgtttctctccccctgcctctgcatgttcctcggcgtctgtgtaggagcctggattgtcactgggggtctgcacacgggcatcggccggcatgttggtgtggctgtacgggaccatcagatggccagcactgggggcaccaaggtggtggccatgggtgtggccccctggggtgtggtccggaatagagacaccctcatcaaccccaaggtgtgacccagggacttggaaaagggggctggaggcctggactcctgggtctgagggaggaggaggggctcgtgtttgtccttctggccccgatgaggagacgccctggtctggccatttttcccctagggctcgttccctgcgaggtaccggtggcgcggtgacccggaggacggggtccagtttcccctggactacaactactcggccttcttcctggtggacgacggcacacacggctgcctggggggcgagaaccgcttccgcttgcgcctggagtcctacatctcacagcagaagacgggcgtgggaggtgagtggtcgaacccatgacccacaacccacgacccacaacctgcaaccccagcgctcaggatcccagtagtttggtctggtcgagatt

SEQ ID NO: 37408 - DNA, 1081 bp, Artificial sequence
  DNA replication origin
gcacagtccctttgtcagtatgcccaacccccaggccctgacccctcacccgccattggatgtccccccgaaagagttcactctgggcaatgtccacgcggttccaagccacagccaaacgcagctcatccaggtaggctgaggcctccgagctcccacaggctggaaggattagagggagaggggacaagaagtcaggggaggagggacatctgctgaatgtctattttgcctctattttgcatgtctgacttttaaactctgcataaaggggttgctactgggcagagtgtgggggtcttaaagcagtcaggctatcataggcataaggtcatttggctcagggccagagcacagaccactggtttacagcccccaagaagaaacaaaaggaatcacttattcatttaatatttattgaggtatgttatggaccaagcagtgggagggatggagagagaaatcagatacagttcctaccctgaagaagctggttctattgggggaaatatgtccccccaacacataactaccctcagggtgcttggtgccctcagaggtaggcatataatatgattaggatggatggatggacagatagaaggatggatggatgggatggataaatggatggatgaaaggataaagagatggatgaatgaacggatggatggatagatggatgtacagggtggatagatggatagatggacagacggatggatggggagagaggaaacaagatggggcagacggacaatcagagatggatgggcgattaaagggaaggctggacaggccataatggaaggcagggtggaggggtgtctaaggaggcatctataggcatataatatgattagggcccagaggaggatatggtcacagaggtatagagtggcccaagagagctcccagagaatgggtgttgaggtagcactttgaaagaccaccaggactgggaggtatgcccctaaggtgcgaaaagggcgttcaaagcagcaggcacagcagaagcaaaggcccgggtgcaacacacacacacacacacacacacacacacacacacacacacacacac

SEQ ID NO: 37409 - DNA, 1381 bp, Artificial sequence
  DNA replication origin
tccagggggcctgcccgaggccagcatccagcgagagcggcgaggtggccttgtccgagagcagatacatctgccagcaaaaggaggggtggtgaggaccagcccctccccaacactggccaccaccagccctgcctctggtttggccacgccccatccctgatgtaatcccgcccccaggtccttcccgcgcgggggggccccccagctttgcccggtccttacgctctccccgaagccctggcctgggtgagggtcccaggcgcccccggaggggtacctcggcgcgcacatcttccccagcagcatcctcagcacatgccccacgtcagggggccggagctccgcagctcccccttttagggctggggctttggtgcctgcgctgtgggacgcctggtccaaaaggttgcggatgagcgagttggagggcgccgcgctgtagagttgggccaggcgcatcggggtcaggaagtggcccaggctgaggccgtgggaaatgagcaagcgcacgaactcaggccggtcattcagcagggcgtccatgagggaagcttcgagatggaaggactggcagggtgggatgaataggggaagagattagctcaaaggttaaggacaagagatgggcaagggtatgagggacggatggatggatggatggatggatggatggatggatggatggatggatgggtggatggatggatgaatggataggtagatggatggatggacagatggatggatgggcagatggatggatggatggatggatggatggatggatggacagagggatggatggatggacagagggatggatggatggacagagggatggatggatgaacggataggtagatggatggatggacagatgaatggatggacagatggatggatggatagatggatggatggatggatgaatggataggtagatggatggatgtatggatgaatggataggtagatggatggatggacagatgaatggatggatggatgaatggacagatggatggatggatggatggatggatggatggacagatggatggatggatggatggatggatggatggataaatggatggatggacaaatggatggatggatggataagtagatggatgaatgaatggatgaatggatagatggaggtacagggtggatggatggatagacagatggatgggtggggagagaggaaacaagatggggcagatggacagagatggatggacaattaagggaaggctggacaggccataatggaaggcagggttgaggggcgtctaagaaggcagagaggccgggtgcggtggctcatgcctgtaaccccagcactttgggagcctgaggcgggcggatcaca

SEQ ID NO: 37410 - DNA, 1536 bp, Artificial sequence
  DNA replication origin
gagtacaccaagaagcactgaattgtataccttaagtaagtgaacggtatgatatgtggattacagctcaataaagctgccatttaaaaaaaaagaaaaaaaagtgaggctgggcgtggtagctcaagcctgaaatcccagcactttgggaggccaaggtgagcagattgcttgagcccaggagttcaacaccagcctgggcaacatggtgaaaccccatctctacagaaaaaaaaaaaaaaattagccaggtgtgtttatacctgcagtcccagctactcaggaggctgaggcaggagaatcacttgacactgggaggttgaggctgcagtgagccaagatcaagctactatacttcagcggaggcaacagagtgagaccttgtctcagaagggaggaaggaagggttggggggagggagagagggagggagggaaggagatagagaaagaaagaaaagagagggaggaaggaaggaagaaaagaaggaaggaagggagggagggacagagagagaaagagagagagaaagaaagggaaggaaagaaaggaaggaaggaaagaaaaggaaaggaaaggaaggaaggaaagaaggaaggaaggaggaaggaaggaaataagtgaggccaagcgcagtggtgtatgcctgtaatcccagcactttgggaagccgaggtgggaagatcacttaagccttcgaatttgagaccagcctgggcaacatggcgaaaccccatctctacaaaacatataaaaattagccgagcatagcatgcatctgtagctacttgagaggctgaggtgggaggatggcttagcctgggaggttgagggtgcagtaagccatgatcgcgccactgctctccagcctgagtgacagatcaagatcctgtctcaaagaagaagaaaggagaaggagaaggaggatgaagagaaggcagaggagcaggaggaggaggagcaggagaaggaggatgaggagaaggcggagaagcaggagcaggaggaggaggatgaagaggaggaagaggagaaggaggatgaagaggagaagtaggatgaggagaaggcggaggagcaggagcaggaggaggatgaagaggagaagtaggatgaggagaaggcggaggagcaggagcaggaggaggatgaggaggaggaagagaaagaggatgaggagaaggaggaagaggaggaggatgagtaggaagaggaggagaaggaggaggaggatgaagaggaggaggagaaggaggatgacgaggaggaggagaaggaggatgacaaggaggaggacaaggaggagaaggaggaggagaaggaggagaatagtgaaagctacagaaactaagaactcctagagaaagaaggtcagatgcagagaggacagcaagctccctactgatagagaaaaccatcatggtatttcacagttctcctgcagaatcctggtaagaagggagagcggtgggtcagaaagcttcccccacatctgccatcttgaatcacctccagccaggccacaggcaggttcct

SEQ ID NO: 37411 - DNA, 990 bp, Artificial sequence
  DNA replication origin
gcggggaagccgggagtggagaccccgggagtgggcaggaaggatgagaggtggccaggggccagggttccaaggccccggggcactcaccggcagcccacgcccaggaggaagcaggtgagagccactaggtcgcactggttccagctgtcggcgaggtagaggcgcaggcgctggctcagtgaggcatggccaggcccggggcccccgctggcgaggctgcccccgcctccgctcaggccctggcgcagttcctcgcacagcagcgtgaaagcccagaaatagagcagcagctccagggagccgggcggcgccggctggaaatccacgagcagcacccgcgagaaaagcagcaggaacagcaggtagctgaccacgttgcccatgaagatggtcaccggcgcgccccagaagtggaaccagcggcgtaggcaccggcgccccccgcagcggcccccgcagcaacccggacggcccgactggcgcgggacccccagcggcgtcttctcggctgggtccgccgtcctgtgggggaagagaagagaagggaggaggcctcactctgacctctgagtcctgatctccaccatcatcgagacttttggcttggcacatctcaccctgcctgacccgaaactcagtctgcccagagctaatttcttgggttttgactcttgtatctaacctctgacctctgaaatctccggtcaagaggtggattgatcgcttgagccgaggagttggagaccagcctggccaacatggcaaaacctcatctctacaaaaaatattttaaaaatatacccggatcgggcgcggtggctcacgcctgtaatcgcagcactttgggagttaaggcgggcagatcacctgaggtagggagttcgagaccagcctggccaacatggtgaaaccctgtctctactaaaaatacaaaaattagccgggtctggtggcgcatgccagtagtcccacatactcgggaggctg

SEQ ID NO: 37412 - DNA, 925 bp, Artificial sequence
  DNA replication origin
gttagccaggctggtctcgaactcctgacctgaggtgatccgcccactccggcctcccaaagtgctgggactacaggcgtgaccaaacgcccttggctctaacctgacttctaatcgcatcctgtaacctctgactttagtgatcttgacttctgtctgctgctatagactgaacaattattgcctggcatctaaccttcgtccttgcccctggctgggccctgacctcaagtgacctttgacctctggcctttgcagttacacattcggcaaagtacagggcaacagcgatctctactggaaggcgcagcgttaccgcctcatccgggaattccactctcggcccgcgctggccccgccctttatcgtcatctcccacttgcgcctcctgctcaggcaattgtgcaggcgaccccggagcccccagccgtcctccccggccctcgagcatttccgtaagaacagagcttggcttaaaaaggagaaatataggggaccgggagcctggaaggcgaggggaagggggcatgccccaaatgactaacgggcgtggcttaggtagcgaggggcggggtttaagcaacaaggggcggagcttaagcactgaggggcagtgcttacgggtgaggggcggggcatgttctcgaatcaccaggggctgggtctgggatagcgtgcgtgttctgagggtgtcggaaggggcagctgggattgggaaggggcgtggcctgagccctttgactccgcccgcccctgcaggggtttacctttctaaggaagccgagcggaagctgctaacgtgggaatcggtgcataaggagaactttctgctggcacgcgctagggacaagcgggagagcgactccgagcgtctgaagcgcacgtcccagaagtgagagcggggcctggtcggggatggggcttc

SEQ ID NO: 37413 - DNA, 975 bp, Artificial sequence
  DNA replication origin
agtttgagaccagcctgcccaacatggtgaaaccctgtctctactaaaaatacaaaacttagccaggcatattggcgggcacttgtaatcccagctattcaggaggctgaggcaggagaatcgcttgaacctg[450 bp omitted]ggagtgggctggagggaacaagtgaaggctgggaggccaggagggaggctgggttgatggtctaggcaggagaggatgaggtatgaataagctggggtccgggtgtggagacgaagaaggtggaattgggcagagaaagtcagggggcagcagggatggggctgggggctgatgggctgtggggaggtgaaggggaggaaaggagagaggaaggtgcctggggtgtggcctggtgactgggtagacagtggctccactcctgagaggtacagaatctgggagaatggggtctgggaggcagatgctgagtgtgagagactgtggggagaggaggtgggccaagaagcatttcaacttaattaaaaaattctgcacataacattttatgatga

SEQ ID NO: 37414 - DNA, 1390 bp, Artificial sequence
  DNA replication origin
ttaaaatgatgtctttgaatttgcttattctttcttctgcttttctagtcagctgttgaagccatctattgtattttttgtttattgttattcttcagctcaaaaatgtttgtttggttctttttcatattttcagtgcctttgtttagcctcttctttcgttgttctattgttttcctgattttgttaaattgttttctctgttcttttataattgactgagattctttagaaccattattgtgaattctttgtcaggcaattagtggatctgctattctttggagtcagctaatggaagtttattgttttcctttggtgttatcatgattctccaattcttcatgatttttatagtcttgagaaaagcatttgaagaagcattaacttcaaatgctttttttggggagaagagtggtgctctctggcactgggtccagtggcacagagtgccaactgtgggtgggggtgcgtgtggtgggtccaggttggagggacacagagtcttgttagcacaggcagctgggggctgtgatgttgatacctgcatggtccttggtggcaacagctgtgggaggtccacagtggctgtgaacctcccacagagttttctgggacctcagctgtgcctcttgcctagcatctaggggccaggactcgcagcagtggaggctggggtcagtggtgtgcacacactctgctgcagaggctggctgtaggcacaagcatggcagcagaggctagttgcaggctcattaatggtggcaaggggtggagtcagaggcaggggctggggttgactaagggcatgcatgtggcagtggggcctgacagcttgtgcctaactgcaggggcctgctgcagtctggccacagaggtcagtccatctgcatgtacgtgggcagttgcagggctgagctggaggcgtgtgtgcacatgcagccgcggggcctagctgagggtgcaaacgtgatgctggagttagaacctggggatggggaggcatggctgtgtgcaggcacatgcatggtagctgtgctgggtccttggctcagagcacttgtagaggcagcagctggggtgactccatagaggaggggtattggcttaggcacccagagaatgcgatggccactggggtgagtccctgggtctggtctgggtgaccatggtattgaacagcttaggtggtttcagggacagaggaaggagaaattagagggccaggcacctggagactgtgaaggtggaaaaaactacagggcttttgctgctgcagtgctggcagttggtttcctcagctgtgaaagctgcttggttcctctgcagaaaatggtgctggcatcagccattggtaacaccaaggtgtccttggtggtgaaaactgtgg

SEQ ID NO: 37415 - DNA, 1333 bp, Artificial sequence
  DNA replication origin
acccgctcccctagtcaccagggcactctagtctccttactagtgcaccctcgcttcaccttttccaagcctggcccctccctagacatctgtattccagagccagcccagccttttctttaggccctgcccttcctgcagaccccgcccccttcagagggccccgcccctcctgccgtacctttccttttctcgtagaccccgccctttctcaggccgctactcactgacagccctccccctcccgcaggccccgccccattcgacaggtttatgctccgaacccctgcccacctcgcggtagatgtggctctctgcagggacagcgcagatgtctgcactgtgtctggaccgcgccaggtgtccaagcctgctgagctggggcaagatcaccttatctaggattgtggagtcgttggtcgccgacaagttgtagcaggagcagggcacgcggtgcgcctccgacccgttacctctcaggatgaggacttggaaccagtcctgcgggtagtgccagccgcagcagcgcagctgggagagggatacgagtcagagggaccgggactggagacatatgatgttggggatcaggggacaaggtgatgggtatgaggtcaggtcggggagcaggggactaagtggtgggtgtggagtgggggacagtgggctggggtcacgatggggccggagccaggggacattacgggaacatggggctgggaaagacgagtcacggggtgacctggggctggggaaggagctgcagggtcgcgctgtggactagagattgggtgggtggtgcaattgagcctctgatacccgacaggtgaataggagtgcgagaccatgtgagtctcatcgggggcggggtccggtggaagccagagtcactacggggtaggaagccgtgtctcgctagggtcttgggactaggggcctgacaacctctggtcggggcgggggcgggggcggagtctctcgaggtagatggcgaagccacgccagggtctgggtactgggagaccaggcgacgccggggacagttgtgtcatctggggagtggggagcgtcgggcctgggagggattggggtgtgttaggatcgtagagctgggggtcgggcccacgttggggtggagtctcctccaagcacagggctgaggcgggtcagtccgggagggaactggaggaggggggcttacctggaactgcacatagtcccagctctcctcggccgcggtctcctcggggttggtgccgtacttttggatggttttctctacgacgtcccgcaagcttcgctccagctgagaggccaccagtgaggctgggcc

SEQ ID NO: 37416 - DNA, 963 bp, Artificial sequence
  DNA replication origin
gtgactcgtctttcccagccccatgttcccgtaatgtcccctggctccggccccatcgtgaccccagcccactgtcccccactccacacccaccacttagtcccctgctccccgacctgacctcatacccatcaccttgtcccctgatccccaacatcatatgtctccagtcccggtccctctgactcgtatccctctcccagctgcgctgctgcggctggcactacccgcaggactggttccaagtcctcatcctgagaggtaacgggtcggaggcgcaccgcgtgccctgctcctgctacaacttgtcggcgaccaacgactccacaatcctagataaggtgatcttgccccagctcagcaggcttggacacctggcgcggtccagacacagtgcagacatctgcgctgtccctgcagagagccacatctaccgcgaggtgggcaggggttcggagcataaacctgtcgaatggggcggggcctgcgggagggggagggctgtcagtgagtagcggcctgagaaagggcggggtctacgagaaaaggaaaggtacggcaggaggggcggggccctctgaagggggcggggtctgcaggaagggcagggcctaaagaaaaggctgggctggctctggaatacagatgtctagggaggggccaggcttggaaaaggtgaagcgagggtgcactagtaaggagactagagtgccctggtgactaggggagcgggtagatgcctgaagacggtgagggttggcctgaaaagaacgctgggcctgggcttgagagtcccagaaagaatccctttaacttttccctacaccccccagggctgcgcgcagggcctccagaagtggctgcacaacaaccttatttccatagtgggcatttgcctgggcgtcggcctactcgaggtgatctggccccgcccccacccgcgatcggccctaaatccctaga

SEQ ID NO: 37417 - DNA, 973 bp, Artificial sequence
  DNA replication origin
agatgaaccctttctgtgcaggagcagagccaggtgggccctggacattttttttttttttaatataacgagatatttataagtgggtgctagggtcttgactttatctccgctgcacaagcagtgtgttgaactttctaatctcatccctctcctaagtgagccctgagctagacggtttccttcctcccctctcaaagtttgtttgtttgtgttctgacagaggataaagctattttaccaaaaacgcaggggatttatttgaggtttgggtgaaaaataatcttgtgggtggtggtaggccgacagatggggacaggaagctgtggacgaaagccccaggtcccgtgggagaggtgacagcagcaggggcacgcagccacgtgggtccccaggggaatgtgaaggcggagggctccaggcgaactggggattaaacaaatatttacaggcagcagggaagtgcccagcgcacgtgacgggggcggggcgggactttggggagggcggggcctaacggtatcgagcgagccggttgtagacgtggtccaggtttctgcacaggaatatcgagagcgtcatgaacccgagctatagagaaaggagatgaggtcagagaagtcgaaggggtgctggcgagacgggggtgatgcccacccgggcgagaaaggtcaggggtggggccgtgaattgggcgggaaggggctggagaaggggataggtagaaaagggcggggctcgacgggaactgccgcagggctggctgatgaggcgggaatagctgctacaagtgggggtagaggctgagaaggagtaaggtcggaagcaagcccagggtcctttattttggaggctcatctgtcttccccctctgcctcagcctctaattgtgcctcctctaattctgcgcccgcacttccagtgtcaggctggtcctcgtcttgaacccacagcggccagagccccagggcca

SEQ ID NO: 37418 - DNA, 959 bp, Artificial sequence
  DNA replication origin
tggctaattttttgatttttgtagagacgggggtcttgctatgttgcccaggttggtcttgaactcctgggctcaagtgatccccctgcctggacctcccaaagtgctgggattacaggcgtgagccaccgtggcgggctaggggtgtatttctcagcccagagaggaactgatggatccaggctaggcattggttgggtagtgtggctgcaggacggtgaggcaggagtgttgacggtattgtcagagaaagagtgtagtgagggccgagtgtggtggctcacgcctgtaatcccagcactttgggaggctgaggcgggtggatcacgaggtcaggagatcgagaccattctggccaacatggtgaaaccccgtctctactaaaaacaccaaaaaaaaaaaaacaaaaaacaattagctgggcgtggtggcaggcacctgtagtcccagctactcaggagggtgaggcaggagaatcacttgaacccaggaggcagaggttgcattgagccaagattgtgccactgtactccagcctgggcaatagagcgagactccagctcaaaaaaaaaaaaaagagtgcagtgacaggctgtgtgggatctagactggaagagaaggaaggtcactggggagctgctgctgaatggggatacgggaagcatcagatcaagtacctgggggctgagggttttgcaggggggttgcttagctggaaggtagggggctgggcaggcactgccctgacgctggggtttccgctttcatggagctgttagtcaaatgggggaaatgagcgttcatcaaatcatcacctgcataaacagaaaatcgaagaatgtgtgaggtgctgtgaagaaccacagcaggttctggggtggaggagaaagttctaggggtttctctgagaagataacattgaaggccgggtaggacttagccaggtgaagaatgggagt

SEQ ID NO: 37419 - DNA, 1465 bp, Artificial sequence
  DNA replication origin
gctaattttttgtatgtttagtagaagtagggtatcgccatgctgggcaggctggtctcgaactcctgacctcaggtgatccacccgcctcggcctcccaaagtgctgggattacagctgagccactgagcccagccctaatttttgtgtttttagtagagacagggtttcaccatgttggccaggctggtcttgaactcctgacctccagtgatctgcccatctaggcctcccaaagtgttgggattacaggcgtgagccaccacacctggcctaaacaaccagatcttgtgtgaactgagtgagaagtcactcatcatcaaggagatggtgcaaagccattcatgaggggttcacctccatgatccaatacctcccaccaggcctcacctccaacactggagatggcatttcaatatgaaatttggaagggacgaatgtccgaactgtatcagcatgtctgttcgtgtgctctcactgtgcctgtttggggatagtttttctagtggttgtgttagacccagagtagccacagagagagcatggtggaggggaaggaggcctggatgggatgggtcccgggagggtccgtggtgttcacgagctcctttatggacatctgtgttcgggtgctcccgagatggctctcatcttcagtgtgtttttcacctttcatggtccagcagctcagtgaggcacctggagggagagaaggggtagtgaacacaggggcggtggctgtggcctgaatctgcttctccgttgatccttccaggtttctagtcacatccaggttttggcccgaaggaaatcaagggaaatccagtccaagttgaaggtagggaccaatgcagacatcctgagagggggacagagactgggggtgggggaccgagacccagaaagagagggacagagacccagggagagggggacagagacttagagcggggaggactgagacccagagagaaagggacagagacccagggagagggggacagagacttgggggaggggaccaagacccagagagagagggacagagacccagaaagagaggaggacagagacccagagagagagggacagagacccatagacagagggggacagagacccagagacagagggagacagagacccagagacagagggggacagagacctcaggtgagggacctctgtggtcagggcggggggtgcagtcatccagggtggggagtcagtggcccacaaagggagatgcatagggatggtggtgcggttgctgagaccctgggcagggagcgatggcatggaggaggctgaaggttttgctcaggacagcaggaaggatgggccgtcggtcccctcccttgaccactgttcctgtccccctcccttccctctgctcctgtccctcctttccctcttcctggcggtctcatatcttccccctcttgtgctgtgaaggcctcctctt

SEQ ID NO: 37420 - DNA, 2657 bp, Artificial sequence
  DNA replication origin
gaccataagcaaatcacttaacctagctgtgcctcagtttcctcatctgtgcaaatggtgatgctagctcctacttcagagtgctccataaaccttggttactgtcattattcatcagtgggggccagggcaaaagacagaagtagactcaccatacatcttgccttcatcagacaaaattattttccggcggccgcagggtggatagatggccagggcctcctggaagctctgctcaatgtctgggctccacaccccctctgcatccgggcccccgtcacccccagccccctcactgccgccggtaccctcctcactgccttcctcactgcccgtccagccgctgccatcgtccagggcggccccagcccggggttcccccatctgggcctggaggaacacagaactcagcaagcttcccccaaaccccaccctcaagggacttgaagctgagagggctgggactctggaccactgggtctgagggaggaggggctggggacctggactcctgggtctgagggaagaggagctggggggtattcctgggtctgagggaggaggatctggggcctgaactcctgagtctgagggaggaggggctggggcccggactcctaggactgagggaggaggatctggggcctggactcctgggtctgagggagcgggggctggaggcctggactcctgggtgtgagggagaaggggctggggtctggactcctgagtctgagggaggagaaggagctggatttcttggaaagctgaggatgggagtgttctcagagtttccagaggaactcaattgtgatgaagtcacaatgattaccctagagtaatgccgagggccatgaaggctaaaggttcgggtatgaattacgggttttaaagaagacaggaggcaaaagttagtggtggggaaggaaggtgtgggtgaaacttcccctgtcccaccccaagaacaggtggtaagatgtgagcagcagctgccagaaaagaagaggggccaagcaagactgaggggaggtctagagagagggggacagagacccagagagggagggggacagagacccagagaggggatggggacagagaccagcaagggggggggacagagacccagagagagaaggggacagagaccagagagagagggggacagagaccagtgaggtggggatagagacccagagacagagggggacagagaccagagagagaaggggacagagacccagtgaagggggggacagagaccagtgacggaggggacagagacccagagagagagggggacagagaccagagggagggggggacagagaccagagggagggggggacagagaccagagagggggacagagacccagagagagggacagagacccaaaaagagagggagacagagacccagggagagggggagacagagaccagaaagagggggacagagaccgggggggggggacagggaccagagagaggggtccagaggcccagagagggagacagagacccagagagagagggtgacagagacccagagagagggggacagagacccagagagagagggacagagacccagagagagaggggaccagagacccagagagagggggacacagactcagagagagggggacagaggctcagagagagggcaacagagacccagagaaagggagacggagacctagaaagggcagggacagagactcagggcagcagctgaggccgagaccaggagagacccacagaaccacaagctgggggacaggggcgccctgccatcagaagagccagaacaaagggcccaggcgtcccctcccccagcttcccacaacccccatcaggggaggggcttgccggccagggcgactcccctccggcaccgggccccgcccctcccctcccccgtgcgccgtgggctctgatccaactcaagttcccagtgactttccggaggccgggaacagggaaaactttttccaatacagtcagatcccgcctccccggaggctccatgtcctccacagctttcccaggaccccagagtccaggcccctattcccctcctcccgccgaccatagcagacaaagaccccagccaagcccagtggcgctgcggcgttcaggacccccgtaggccaaaatcccagcccagcccttccccatgtggccagacaaagggacggtggagccgggtaagaaaggtccccctaatttcccgccccagaccctaaacctccaaagaggcaagacttaagatccagaaagccccgtaacctcccctcggccaccccagaggccctcccttctccgtaagaaggaccaaatgccccccagattacacaaggggtccttctcactccaaagtgacaccgccgcagacgcacgccccacaccccgccagcgcccttggcccgcacccgctcctgcgcgcacgcccaaactcagacccagccgcaggcaccctaactccggccagagttcccactcctcactgaggctcggtcacgggagcaaattcgggcccccgggcaaaaagagggctgcgaaccattcagagacggtcccgcaaacgcacgcctcacctcctaagaagcaactccccaccccaactcacacaccccaaagcaggatccc

SEQ ID NO: 37421 - DNA, 1849 bp, Artificial sequence
  DNA replication origin
cccctcggccaccccagaggccctcccttctccgtaagaaggaccaaatgccccccagattacacaaggggtccttctcactccaaagtgacaccgccgcagacgcacgccccacaccccgccagcgcccttggcccgcacccgctcctgcgcgcacgcccaaactcagacccagccgcaggcaccctaactccggccagagttcccactcctcactgaggctcggtcacgggagcaaattcgggcccccgggcaaaaagagggctgcgaaccattcagagacggtcccgcaaacgcacgcctcacctcctaagaagcaactccccaccccaactcacacaccccaaagcaggatccccgactcccgccggcgccttcctacctcccggcctggggctggggagccgcgggcgggcggggcgctgcgagggagaaagttgccgggagctttgtttgggaaaagtgggagggaccggaggggggggcgggcccggccggcggacagcgggaagggggatccgacggtgacagtttggggaaggatttttgctttgggagagattagtctatctcggggctggtaggaactcaggatttgggtgcttgggaaaggagggggattgggggttcggactccaagtcggagggaaaaggctgataggagccagaaacccctgatctgagggaggagaggctgggggctgggactcctgggtctgggggctgggactcctgggtctgggagaggaagcggctggagagagatatgggctcctaggtctgagaggggacggggctaggcgcctggaatcccggctaccctcgtgtttgtgtattgggggtgcggaagtgatacgaatacaaagagtctttactgttaagccctgaggttttttttctttttttctgtttggtttttggtttttttgttttttgttttttttgtttttttttttttttgaggattggggtctggggatgggttttgactgattcctatgacgacctggtttccttgtgacctcaccacagttaagagtcgtgggcaggaccaccgggagtttattggaggcccacgtaggtgcagattcctcatctacaggcgctagtggactggagacggctggcggctgtcccgggacggggaagagagctttggtgcctgagggaagatggcttagggcccggtcccttaagggtgaaaggctgcgtgttcaaaattacgggactagagggggcgggagtccggacctgaggtcctcagggaaaaggaagtctgattctgggttccttggaagatgaaatataagactggatttagggtttccggagacaacgggactttttagtggagcgggagcgggaaaaccagaagggacacggagaaaaggttccgaaacagatacacaattagagtgagagctaaaagggatgcttgtactccggtgtctccagtaggaggagcctaggactggaacttggggtgatgagggcaagatctgggacgcaggggcgtggtccagtgcaggggcgtggcccagtgcaggggcgtggctttcagccaaggggcgtggccattgcgattgggcgggactccgaaacgagggccgcaatcagagaacaccgccaggacttccaggacttggtctccaggactgaggtcaactgacgtgggcgtggtctgactgtgtgggcgtggccagggaatgaactcacggctctggcttaaggggtgtggtgaacgaaggatggggcgtggctgtgtcaccaagggcgtggtcatggagtagaggcccgggctcctgggtgaggccggcaagtttggagcgtggtcagacaataggggcgt

SEQ ID NO: 37422 - DNA, 1153 bp, Artificial sequence
  DNA replication origin
agttctcctgccccagcctcctgagtagctgggattataggcgcgtgccactacgcctggctaattttttgtatttttagtagagacggggtttcacttccccgggatggtctctatcttctgacctcgtgatccgcccgcctcggcctcccaagtggtcaggatctggggggccctgacgcaggggtatctctcccacaatatgggggggcttcgctaggatttcggtaggggctgggaagggccattctgggaacctcgccgcggggcagggcgcacctggagccacgtcctagtctcgggacacaacggacatccacgaacgacgaacggcagttgagttgggggaggtgcgcgtgagcttttcccgccagaaaaagcaaaaggaggcgaggggtcgcgagtgcgcgtgcgcagcgtctgagccccgcccctccccgcccggactcctcttaagacgcaggtgcaaaccggcggccgacgcgtgtcacgcatgcgcgctggcggtgtgggctgtggccacggagtttgtctggtggtggaaggagggggtggctgcgcccgccatgctggggctcgtgtttttctcttccgcttcaggctttggtgaaatgggctgaggaagggggaattgaactgagagactccttgtccgtcccccatttctttcttttttttttttttttgagatggagtctcgctctgtcgcccaggctggagtgcagtgggacaattttagctcactgcaacctccgcctcccgggttcaagcaattctcctgcctcagcctcccgagtagctgggattacatgcgcccgccaccacacctggctaatttttgtatttttagtagagacggggtttcaccacgttggccaggccggtaccgaactcccaacctcaggcgatccacccgcctcggcctcccaaagtgctgggattacaggcgtgagacacagcgcctggcctgtcctttttatgtattgccatattttcttttcttttcttttctgtgagatccctgttgagttttgttaacaaggctatgctgatataatgtgtggagaagtgttctctctttttctattctttgaaagtgctagtgtaggattgatgttatttattttttatgtgtttggaagaagtcaccagc

SEQ ID NO: 37423 - DNA, 1328 bp, Artificial sequence
  DNA replication origin
tctcctcatcatggccccaaacctgctgctcccctgggttccaactcaggatgtacatggtcccccaagcccaggccacctcctcctcatccctgccagccccacttgcagctgctctgggcagtccctgcagcagtgacaggagtttggggggccccatcctgcctccattccacccaggccgacccaaaaccttagtggccgcactctgggggctagagagagacctgggcgctgctatcatcacagcgggcacgggcgccccttggggccaccagtcgagcctgggctcgcctgtcctcacccagctcccccagtgcctgctctccccaagccacgtgagcccgctgccaccgttctggaaacacgggtctttgaagagaggcccttccagggtctggaacaccctgcagggtgcaaaggggggcgatggccttggctgggccctggcgcacggagtgggttcgggatggagtcctgagggaccccgggggtgttggttgatctcgggggtctgacgggactgagacggggacactgaagcaggatggggccctggcaggagctctgggtggtgtgggccttggcgggctttcaagggctctgacaggattttgggggggtctctgactggatttctggggagtgtctggctggattttggagattttgatttctgtgggggtctctgactggatttcaggggtctctggctggatttcgggggtcttgatttctgcgggggtctgattggatttctgggggttctctgactggattttgggggtcttgatttattcggggtctctggattttgggggtcttgatttatgcgggggtctctggatttctgggggtctctggctggattttgggggtcttgatttctgcaggggtctgactggatttctgggggtctctggctggatttggagggtcttgatttctgcgggggtctctgagtgcatttcggggtctccgtttctggggtgtctttgatggacttctgtgctctctgacggaatctgaggtccgactgggtttgggaggggacctgccaggatttctggggatctctgacacgagtctaggtggctctgctgatctggggagagtaataggattttggggaaagtttctggcaggctctgagggagaagtctgacaatttctagacgattctgacaggatttcgggggtcaactataagatttcctggtggactcctttcagtatatctgaggggatgtggtcaggatttttttttttttttttgagacggagtctcactcttgtcacccaggctggagtgcagtggcgcgatctca

SEQ ID NO: 37424 - DNA, 787 bp, Artificial sequence
  DNA replication origin
ggtgggggatgggcctgtgggagcccagagaaggggtatctgtgtcaggtcagagattggggaagatattgaaggaaaactgatacttgagtggaaggaaggaaggaaggaaggatggaaggagggagggagggaaggagggaaggaaggaaggaaggaaggaaggaaggaaggaaggaaggaaggaaggaaggaaagaaggaagccagcctttgaggcactagcacagcctgtgcaaggccttggcataaaatcacgatatgcttgaggagtagagggtaactaggggtgactagtgagagatgaggccagggccagatcatgaaaggaaatctctgacaagctaacagattgtacttttcttcataaagccacaagaagggtggggtcagctccgggcttaaaaagatccctctggaaccatgtgagggacctactggaggcagggaggaggctggagcaatggtgatgaagcctgagccaggccagggccctagggatggaggaaaagggacagacagacataattggggtggagggacagagcaggggtcagacgggatgtgggtgatggggagggaggaaaggaggcaagacttggaacttgtgaccttgtgaggtgaaatcttgagggatgtctgggggctgcctggaagagttgggtgcaccatcctggagctcgaggattgcgtttagaaaacaatggcaagttggttgctgaggtcaagggcaatgccaatatgtctctggagaaaccgagaggtacttgggtcctgagggagagcag

SEQ ID NO: 37425 - DNA, 1134 bp, Artificial sequence
  DNA replication origin
gcgcagcttacatacagataggcagacaaatcttaagtatcagctggataaacttttgtgtacgtatatacccatgaaaatcacagcccaggtcaagagagtagacagtttcagcaccccagatgcttccttggagagttttgagcaagggagggacagaatcggacctatttaaagacagatggaggtagctgcaggtcctgtgagagtccagaaaaggcaactgattcggcttggaggttacaggattctttccagacaagtgacatttgtgtttagtcttgaaagatgggtaaggtttgggttacagtcagcaggggcccagggagggtgtcatagaggtgggaaagagaccagtgtgtctggagagccataggcggcatcctgttgctggatttaaaaaaaaaatttttttttaaagatttggagcctgggagggattgaaggctacagagtggtgggaaataagagaggtaggcaagagcccatgaagggatttgaacaccagcttgaactttattccctagtgccggtaaaagggttgtgagcaagggaaggcagaactctgggtaggaagaagagcattcagggcctgtggaggagatgaatgaatgaaggggatgagaatggaggccagcaggtggggaggagtctggggctgtggtccaggttggagagaatgaggcctgaggcagggcatgtgggtggagaggagggaagagcagagccagggcagggtgggagggaccgggctggagactgacaagctgtgaaggatggcgaaaggggcaggacaaggacaacccctgggacctggcccagtgactagtagacagtggagccattcccaagatagggaacccatgataaggagtgagttcagagaaagactcagttcatttaggggctggagtcctgagccctgagctcccaggctggagaagggggtctgggtgttgtcagctgtgggtggtggcagaagctgtggggactgctgaatttgcttgagagtagagtggggagggaggaggctccagacaccattttgagcaaaacctcaaatgttctgatacggatcgggaagaaaatagagtgtgggaagagaccaggccagtacccagctaccaggcccgc

SEQ ID NO: 37426 - DNA, 1060 bp, Artificial sequence
  DNA replication origin
ccgcccccacagtccaagggccaattagggctcggtccgcctcccgaaaatgcaaattttgggacgccttgccaaacacgcgcggcggccccgcttcccgcgcagcagacgcggccggctccactctcttctttaaaccaatgagagcgcggtccgcacgaacggcgccccaggcgcgctgatctagccctctgcggaccaccgggttgccatggttaccacgaggggcggagctgaagggcaggctggacctccggggagagagacagatttcgattggctcttttctcgcttcacctgcagcccaggtatcttcccgccctttccctgtcctttttggagcctgacgcctgctcctttctcttctcctgccccagcctggcgccccgaaggtctctagagaaggagacccgaagtcagaaaaccctgaaaaaaattgctggacgctgctgtgagaagaggaaacccttttcaaataaaagcgttttgctacgtaacgggcgctgtactgaagtcttatgaagtatatcttattggatcctcgtaacagatgaagaaaaggagacacagagactgacgtcaagaaggctttctcagtactacgcagctagatttggaggaccctgggtttggatgctagggctgcctcacaccagagcccgcgatctttccactgtgcctggggagaagtctggaagtgatgggagggaggaacagcgaaattcaaagatgagagctgatggagagacagatagaaacctaacggaggaaagaaaaggaagatatgaaggagtcaggcagaggaaaaaggaaaaaagaaagtgatggagaagggaaggaagagtttcagaggcagaaggagaatagagagaggaggcagagattcccagaagaccagaaagccaaaagggtgaaaggggagataaccacaaggacccagggagacggggacacatacccagagaggaaagagacccagagaaagggacagagacggaggaggacagagaccttggagattacagagaaccagagagaaggggacagagatgggggtagg

SEQ ID NO: 37427 - DNA, 1021 bp, Artificial sequence
  DNA replication origin
ctctgacacaccccctgtgtccacctctctgtctgtctgtctctccccctccctcgtctcaggtccagcttctggtcccaattagttggtggcggccaaggcagcggcaggtcccccacccccggctcctcattaccgctggcggctcctaatgagcctggggagggggtgaccccgcgtccccggccccccggcctgcgtcactgcccggtgcgggggctgcggaggcgatataagggggctgccaccatcgctgccccagcccactgcacggtaggggactgtgcgggaagctgggggtggatgcatggtggggcccggggttctgggccgggatgcagccctactgagcccctttctggttctccacaggtgatggagacccgccaggtgtccaggagccctcgggttcggctgctgctgctgctgctgctgctgctggtggtgccctggggcgtccgcactgcctcgggagtcgccctgcccccggtcggggtcctcaggtaggtgccagtcccagaactcccagggaggggtgggaacttggagaagtgggaagagaaccaaagagaaaggggacggaagatccagaaagcggaacagaagcccaaagagagggcgaccgagacccagcgagaagacagagactaggggtgggggaaggcgggaggagggtttggtggtagtggtggtgcgggaaatggacagaaaatcagcaagggaaagagacacagaaagatagatcccgagaaaggcgtggagaggctcgaaaggagtcgttgcagaaacggattcattctttgagcaacgtttattgggttcttggtgtgcgcctggccatgcgctgagcgctgtgggcggacaagtgcatcagactcggtctcagtacctggggagtttcgaacctggtgagcagagagacagagacccacacagagaacgagagagacagggggagccggaccgagccactccacggactgggcagtaacggggcttcgagttagaccgcggggaggac

SEQ ID NO: 37428 - DNA, 1302 bp, Artificial sequence
  DNA replication origin
tctcttcccacttctccaagttcccacccctccctgggagttctgggactggcacctacctgaggaccccgaccgggggcagggcgactcccgaggcagtgcggacgccccagggcaccaccagcagcagcagcagcagcagcagcagccgaacccgagggctcctggacacctggcgggtctccatcacctgtggagaaccagaaaggggctcagtagggctgcatcccggcccagaaccccgggccccaccatgcatccacccccagcttcccgcacagtcccctaccgtgcagtgggctggggcagcgatggtggcagcccccttatatcgcctccgcagcccccgcaccgggcagtgacgcaggccggggggccggggacgcggggtcaccccctccccaggctcattaggagccgccagcggtaatgaggagccgggggtgggggacctgccgctgccttggccgccaccaactaattgggaccagaagctggacctgagacgagggagggggagagacagacagacagagaggtggacacagggggtgtgtcagagggctaaaaatagagactggcggaaggaccgtcagaggaacagagacacaaagagaaggacaaagacagagtggccgaggaagaaatagagagaaagaatgggaacgacagaaaaagaaaggaaaaggaagaaaacaagaaaagagagcgaaggagatggaaacgaacagtcagatggagatggaggagggaaagaaaaggctctcagaaagacagacggaaatggaaggacgtcctggtctggaaggagctgcccagagataaatacagcagcgagaggcccagaaagatcgagggtgaggtagggaggggggaaaggcaagaaatggcaaagggtacgtgtggcaggggtgtgaggacaggaaaagtgacagaccacatcagaaaaacctcagagagtgagaagaggggaaaacagacagggctcctgagctgccctaaggatgtgtctaagcccttatctgggaggagtttgggggtgctgtgaagattaaagcccagtcctcctcacactgactctttttgtgtgtgtgtgtttgtctgtttgagatggagtcttgctcttgttgcccaggctggagtgcaatggcactatctcggctcactgcaacctccacctcccaggttcaagccattgtcctgcctcagcctcccgagtagctgggattacaggtgcccaccatcacgcccagctaatttttgtatttttagtagagatagggtttcgccaaactgttggcc

SEQ ID NO: 37429 - DNA, 1656 bp, Artificial sequence
  DNA replication origin
tctcaggagactctgggtgcggggtttctcggaggtcagggttgaggggctcagtgaagtcaagtgggaaggtttccagggaaaccgtatgaggtagcttggaaggctcagggtaaggagtcccaggaaattctgggttaaggcgatctcgtttggaattttcagaagcacccttcagaggggaagtctcagaggggtgggccatgtccggaaagccacagcccaaaggcagaggggctgagggagcggccttggacctcaggccggcgaggaggaagacgaggaagaggatccggctgaatgatttcatagctctggcagatacctatagctgcgggggagagcgggaaggaaggggttaaggccgaaggctcccaggagccccgcccactcccggaggccacgcccactggaacacaggtggaccacgtctgtccggggcccagcttggcgccagggatgggaagagaacccaatcgcaagtcccttggaggcttgtggggcgatggcccaggtagccaagagagactgaggcgcggggctacttgggagtcgtagttaatttccttatctgtttcagcgaggggtcctagaaaaattgggaaagaacgacacttctccaggcctcagatctcctcgacttcgactttagggagtgtcagggcttcgaggggacgtgggatctccttcctctccgaggtcccccgggacaccttgactcaacagttgtttacactacaggaggctcctaacggctgagggctggactcatggatttgagggaggagggagacatttgggctctgggttaagaaggttgctgggggttcagactcctgcgtcttgcagggtgagggggctgaggttcctggctcctggttctttagagaggagaaggctggaagttcaggtgcctagaattttgagggagcaaggtttgggggctggattgcaggggtgaaaggagataagaggccttgagctcttggttcctgagttagaaaggaattgggagctctgagtcctccagaaatagggtctggggtctgggctctgcagagtagaggggtagggacttgaagaagagagctttggggcaggactctcaagtctgttattgaagatggagctaggatttcggcatctccggggccagtctgggcagagaagcataggtctgtgttcaggtggaggtggaggcggccgacacatcgatgggacaggcttacttgaggtcctggggtctcttacctgctctggtgtccaaggtaacagcagataagcagagctggatgcagagaacggtgaatgttgcagaacagatctgggcagggcggtgggaggtagggtctcaggggcacacaggtgacgcacctcaccccctcccaggggatcctgggagcctagcgacagacttagactcttaaagggacagaagtaaaggacattttctctggggtggggaagggagttagaaactggattgatctagtggagatgtggcccaaattatttttttgaaaccagtggtcctggccctctaccctctcctacctgaaaacccaggggtctagttccctggtaccttcctatttcaagtcccctaagttgtatcccccagctccctccccccagactcagaactccagtcctcta

SEQ ID NO: 37430 - DNA, 1351 bp, Artificial sequence
  DNA replication origin
agctcctagcccctcctccctcagatccaggaattcctgttcccaaacccttctccctcagacccaggagtccagaccccagccggtcctccctcgcacccaggagtccaggcccccagcccctcctccctcggacccaggagtccaggcccccagcccctcctccctcgcacccaggagtccaggcccccagcccctcctccctcggacccaggagtccaggcccccagcccctccctcagactcaggagtccggctcctgcccctcaccggtctccttcactcgctccaccacgatgatggtgttgactccctcacctcggctgtgcctctggggtgcccgcagagtggcaggggccaactgactggggcgccctggaagagcagggggacctgcaatccgggctgagggaggagggacgttggactccttagggccagagttctggggggccttcagctcaaccattcctggagaatctgaagtgggcaattttggggagtcgggctggatggctgcaggtgttcctggtttgggattcagggacagctcatttagagcagtggcgtcatccttgaagggcacaggtgtttctgggtagagactagtggagatttgagggtcggaggtcctgggtacatctgttgcattttggtagtaggttgtggggaattctgtttgggaaatttcggtggggctgggattgtgggtcacatgggattctgggtggggggttttagaagggtcaggatggagagcttggagaaattcagagtttggggtctcagtggagttgaggtcatgcttttctggggatttggggtcaggggtcttggtagggttagtgtttgaggtctcggggagttctgcctgtgagacttcagtggcattaagctgcagaatctctggggattcttggggtgtagtttgcataaggtcagtgtttggggtctcaggaaattctgggcgtgaagttttggagaagttaggtttgggggtctcaggggatcctgggtgtggcatttcagttgggccaggtgtgggggtctcagaagactctgggtgtgccattttggagaggttagttttgggcatgtccagggattctgatattgaggttgtgagtgagtcagctttgggggtctcaggagactctgggtgcggggtttctcggaggtcagggttgaggggctcagtgaagtcaagtgggaaggtttccagggaaaccgtatgaggtagcttggaaggctcagggtaaggagtcccaggaaattctgggttaaggcgatctcgtttggaattttcagaagcacccttcagaggggaagtctcagaggggtgggccatgtc

SEQ ID NO: 37431 - DNA, 1319 bp, Artificial sequence
  DNA replication origin
gcccgcagcgtctggaggccctgtcccccgccacgctccccaacaacttcgtgtgagccccaccgagttctgccggacctgcacatccccacagtgaaggaaaaccctgcgcttctggtatgcttagctagagtagtgccccggataaagggtctaatatacagagatgcttgcgctgtgatcagagaacaaggtctgagaccgaataaatatcatgttcccatggctagacccctcctctggcctgagccctggggtgggaggggctggagtctgagaccgctgaaacttggggaggagaggctggggtctggacccctgggtctgagggaggaggggctggggcctggactcctggtctgagggaggagggacgggggtctggactcctgggtctgagggaggaggggctggggcctggactcctgggtccgggagaggaggggctggggcctggactcctgggtccgggagaggaggggctgggggcctgaaaccctgggtctgagggaggaggggctggggcctggatccctggaactgaggaaggaggagctaggggcctgaactcctcggtctgagggaggacggggctggggaccaggatgcctgtgacctccacagccaagaacaactgagcctatacaccaaagcttttattgggagtggggcagggcaggatttacagtcacagagacagagacacaaagacacaaccctgcactgggaaaaaacacccctggctcctgccccattccctttcatgggattctgtgacttctctataggttccccaaattctaagctgaaagaggggtgtctgagaggggaaggatcccagattttgagtcattaagcccctgagggacacaacaaatggccactgagaaacagggtagttcgaaaccacccaggagaataaagtgcgaggaattggggagggggcatcatgaaaccaccatgggggagttcaatggtggtagcttcaaacctttgagttcatggactggagcagccactatttagacctgaaaaccatgtcagaaaaagtgcacgggggtagagaggcatattgttaaaattgcgattttggttgtttccccagacattatgctaagctagggagaagagggtcttgagaaatttggtgctttcgcagaatctgctggtaggggagatgtgaagtgggcacggaatcggggacttgaaaccgccattttccatcagaaacgctggtgagaatcaatccctggaatggcggggacgagtaattggttaaaccaatctggaagatgcagaacagagttgggagagatttg

SEQ ID NO: 37432 - DNA, 791 bp, Artificial sequence
  DNA replication origin
gggttggtagaggtaaatccccgcctgatatgaccctgccctcgctcggaccctgcctcttctcagtgaccttggttttctcctctttagggggtcacataccccgcctgccatgggatctggagcaaatgggccccacccttagaacggagtcgcctggcgacgacagccttttgtggtgagaggaagagggatcctcactcctgaatctgagggaggaggggttggggcctggactgttgggtctgagcggggaggggctgggggggctgaactcctgtgtctgagggaggaggaggagactctggacctggactcccaggtctgagggaagaggggctggggctggactcctgggtctgagagaggaggggctgggggcctggactcttgggtctgagggaggagggactggaggcccgcactcctgggtctgagaggaggagctgggggcctgcactcctgtgtctgagagaggaggggttgggcctggactcctgggtctgagggaggaggagctgggggcctggactcctgggtctgggggaggaggagctgggggcctggattcctgggtccgagcgaggaggggctaggcctggattcctgggtctaagggaggaggggctgtggcctgtaattcagtgtctggaaagggggaagcggtgggggtccgcactccttgatctgagggaagatgggcctgttctctcccccgcatcctcccccttaggttcctatgctggggcggtggtcgcgatgcccctcgccggggtccttgtgcagtactc

SEQ ID NO: 37433 - DNA, 785 bp, Artificial sequence
  DNA replication origin
gccattgctctgtcgcccaagctggagtgcagtggcaccatcactgcagcctcgaactcctgggctcaagtgactctcctgcctcagccttctgagcagctgggactacaggcgtgcgccggcatacccagctaacatttttatttttatctttgtagagacaaggtctcactatgttgcccaggctggtctcggactcctgggctcaagcgatcctcctgccttggcctcccagtcctgggagtacaggcgtgagccaccgtgccctgtcctttctcctattttaatttcagcataggccttgcccctgcatcagaaaagagtcctgatttgtgcctttgtcctacctgaagttcctccccttgctcccttccaatctggtccgcccccttggctgcttcgtgtccccgcctggaccctgtgcaggtcactccgcaaacgctcataagctggatataagtggagagagtcatcatcatacatgggcccctaggctttcatggaggcaaggaagcaggcaaagcaaggcgtctaggtggtgatggactctgttgttaaggcagcataggccctagcaacgtggaagagcggagtttgtagactttaattgacagaaagatagtgtgagctttgattggcaggcttttggaggtgggaggggttcctcgttgctgataggtcgagacgctaagtctgtgggtgctgattggtggagcggcagagcctggacagggcggctgatttaatgtacattttggcccgcagaaagcccagttcagctggga

SEQ ID NO: 37434 - DNA, 1926 bp, Artificial sequence
  DNA replication origin
ccccctccttcttcacattgacggtcttcagtccccctctcccagctctgtcaaatccttcaactcaggagacttagaccccagacaaccctttgggattcaagagcctgtgcccccactccgaggcccaaagactctccagccgcctctcccggataagagtctattcgaggaagcaaaaggtgctaaggagatgcttcagcaaaggtgtcaaaagaacagatgcttctcagccacgtttgctagggggtggggagatgtccaggaccctgggaatccagcagcccgtcccaggcatccctagggaaccttgagtccaggctgccagcctagggggtagggagggggagtggcgggtggtgtcctggcaggggacagatggccctggtagggggattggctcattccccagcgtgactctcgcccccgcccgttctggatccagaatcaagtctgtgatgacgaagagggtatttggagggctgcctcaaacccagagagaggctgcagagagagagaggtgccttcagacaggtggagaaagacccaaaaagagggtgacagagatggggggagttgtacagaggcccagagagagggggtcacagacagaagaagggagagagatccagtgaaagggggacagagatctagagaggaagagacagagacccagagagagggagagagaataacaagggagcagagacccagagagagaaggggacagagacccagagatacagggggacagagacccagagacatagtgggacagagacccagaaagagggggacagagacccagagagaaagggagacagagacccagagagagaggaacagagacccagatagagagggggacagagacccagagagagggagagagaataacaggggagcagagacccagagagagagggggacagagacccagagatacagcgggacagagacccagagacatagcgggccagagacccagaaagagggggacagagacccagagagaaagggagacagagacccagagagagaggaacagagacccagatagagagggggacagagacccagagatggaggggtcagagacacagaggatgacagagacccagagagagggagacagagacccagagagagggggagagagacctagaaatagggggacagagacccagagagggaagagatggaaacctagagaaggaagcagacagagtcccaaagagaggcggggacagaaacccaggagatagaacatagatgcagagagatgagaacagagatccagaatgcaagagaaagatggagagcctgggagacggaggatagacaggctggggacgtgatttgtgaggtgcagcccctctctgaggtgggtaggcagccaggggatcgggctggatcccaggaaggggctggaacagatggaggcgagggagactgggacgggggaggaaggaacagccagacggtccagggggagggaggtggaagagctgtgagaacacagcaacccctccccatcctagaacttaaggaggtggggaggggcagttaagaaacaggggtgggagaagccagggagtggacagaacccagaaggagtaggaatgagaccccaagaggaagaagacagagagccagagataggggggattgaagccactaggacgaatagtacaggatggcagtaactccccccacccatcagaacccatcacccaaagagattagactgacccaggttgacatcggatgatatttgaccctgaaactcaagatgtgattgcagcccctgatgtgagattccttgttaatatgaggagatgtcagatctctaatcaaggctgtctaaacagggggtctcagtatcccacatctataaaatgggacaagggcaaaaatgcaagagaa

SEQ ID NO: 37435 - DNA, 1841 bp, Artificial sequence
  DNA replication origin
ggggagagaaatgatggggatgagaactcaggagaggagagaaaatctgggtaggagccaggggtgatggaacagggatagggggagtagcctggggaaggaacagaattggggggcgtgaactcggaggcgtgagttcagaacccacaggcgtggtcttggaaggctcaggaggggacaggacgaggatgaaagggctgcgagagggggcgggtctgacagacgaggggaggggcctggtggggccggggcggggcctcccgcgccccgcccccggcgctgagtcctgtgacagcccccgggccgcctgcacttgcagcctccttccccccgagcggagctgcggggccggccgggccggggctggaccccgggaacccggacgcggccgcccgggcccgcgggcggggggatcggcgggggggacccgcggggtgaccggcggcaggagccgccaccatggagttccgccaggaggagtttcggaagctagcgggtcgtgctctcgggaagctgcaccggtgagcctggcgggggtcccgggagaagagtgggaggatctgaggaggatgctaattcccacctgggcgcagactgacagatgaacgggcgataccccggcatgggggtccacccatctgtccagttttctgccgtgggctccgacggcgctgttctccctggtcgagccttgtccattatcctgttcctttttctgcaccccaccccacccggctccactctctctggtgctgtaaatgcctctctcccgggtctctggctcctcccccaccacttctgggtctctgtccccgtctctttctggatgtctctgccccttttctctctgggtctccgtctccctctttttccagatctcggctcccttctctctgggcccctccttctccctagatctctgcctccgcttctttgcgtctctgtgcccctctctctggttctctggccattgctctcactggatctctatcaactcctgactcagagtctctgtccccctctttctgggtctctcctcttccctggatctctggtccccacttctctgggtccctgtccccgtctctgtgttttaattctcccaccatgggtctctccgtctctctgtgtctttttccgtttctgtctggcatggagtttaatctgcagctaaagcggattggggctcatagcccgttgtccttgagggggtgaggctgggtggaagaagtcacagcaccctgggtccctgggagagaaaggagttagaggccaaaaatttcggctcctggggtaggacagccttcccaaaggatacaggctggggctgacagggactccctcccaaccaggttgatgaccccagtgaaccgagtgtccctcaggataatctggacacctccccacaggctctcacccccaaccccagctttggctctaagtcagataaattactcagctgcggaaaagcctaaaaatatatctggccacagtgcacgaaggagatggcctcatcagcaccatgcccctgccgccgtgccctcaggccctgtccccttggcccacagccctgaccctgtgtttcgctgagcttcagtccacctcgctaggccatgggggtcctttgctaagtctaacatcagtcttgcttgctgcagatcacctcttagctccaaagttaccccaccctctagtaacatgagagacaagaataaggctggacagaagtggggggaggtgggcaggaggatggtgcagtgacggaggttggtggtggaggggaagctgagataacctcaccccttctttttccaattttccagcccctccccacccttttt

SEQ ID NO: 37436 - DNA, 2010 bp, Artificial sequence
  DNA replication origin
cgcttcccactccctcctcttcaccatctgctccaccctcacacctggccccaagccgcaaccaccgcctccgcacccgggccggggactctgcagccactgggtggcgcgtgtgagcggctcccgcgctgctacttcagccccacgagtcccagttcctacctccctcctgcctcagacccgcagcgtcctccgttctggggtcccaggggtttctcaaagctgtgagacccagagacacagccagtcaaggctggaagcgagaggctgcggcggtcagtggcttcccggccaccccgtccttggcgcccgcccgacgcgccgtctgctcctcccaccccaccgcgggccgcatcatgaaaatttaataccaaatgcatttgcggcccgacgcggggaggtagtggggaaaggatcaccctcctggggcctggatctggaggtggactcagcgccgggagatgggctggtctgaggacaggagcggggcgggaccctgtctgcgggcccaggacagggaagggccgggctctacccaacggggcggcgctggaattccggcgtggagacagagttcggtgggcggggacagattccgggggtgggagcaggactgggagggcagggacagatcccagaggcggaggcggtgggcgggggacagatcccatggggcaggggcaagactgggagggcggggacagatctcaggggcggaggccagagctcggtgggcggggtcagattccgggggcggaggcaggactgggaggtcgaggacagatcccagtggcgagggtcagaagtcggagggcggggacagatcccatggggccggggcaagactgggagggtagggagagatccagggggcggggagaactgggtgggcggggacagatcccatggggcaggggtagaacacagagggcggggacagatcccagggacggaggccagaactcggtgggtggggacagattccagggggcagagatagatcctgtggggaaggggtagaactcagatggcaggaacagattccagggggcaaggacagaactgagagggcgggaacagagccagggacagatcctaggagaaggggacacaactccaacggtggggagagaactcagagggcgggggcagaactcaggtcagcgacagatcctaggggaggagacaaattcagagggcgggtgaggatgccagggggtgcggatcacaatttagggggcgggacagatctcagggggtggagacagaactcaaatagaggaatggatcccccggagctagggaagaactcagagcgcggacagatcccagaggagcagagaaataacacaatggggagactatggggtcgcagctggcactggcggggtgtgtgaaatataactgtggggggcggaagccagagggaagaaaatcggggttagggaatgaaactcagggagagaagcaacagggaggagagagacgccggagggagaatagagctggaggagtatgggattcaaaggggaaagatggaaactaaggaggagatggagctcaagggtgaagaacccgggtggcgaaagggactagagggggacgacaggtggatcgaagtaggcgttggacttgaggggaaagaatttcccttgaatgagaaaacaaagaactccctggatgagactattggaactggggacgaggtgggatggggatggaattgcggggtgggggcggggaggagtgaaggaactggaggatgaacgcagagggaaagtcagagaagacaggattgtaagggacgcaattagggggaacagaagtcggggagagaaatgatggggatgagaactcaggagaggagagaaaatctgggtaggagccaggggtgatggaacagggatagggggagtagcctggggaaggaacagaattggggggcgtgaactcggaggcgtgagttcagaacccacaggcgtggtcttggaaggctcaggaggggacagg

SEQ ID NO: 37437 - DNA, 1005 bp, Artificial sequence
  DNA replication origin
tgtctccacgccggaattccagcgccgccccgttgggtagagcccggcccttccctgtcctgggcccgcagacagggtcccgccccgctcctgtcctcagaccagcccatctcccggcgctgagtccacctccagatccaggccccaggagggtgatcctttccccactacctccccgcgtcgggccgcaaatgcatttggtattaaattttcatgatgcggcccgcggtggggtgggaggagcagacggcgcgtcgggcgggcgccaaggacggggtggccgggaagccactgaccgccgcagcctctcgcttccagccttgactggctgtgtctctgggtctcacagctttgagaaacccctgggaccccagaacggaggacgctgcgggtctgaggcaggagggaggtaggaactgggactcgtggggctgaagtagcagcgcgggagccgctcacacgcgccacccagtggctgcagagtccccggcccgggtgcggaggcggtggttgcggcttggggccaggtgtgagggtggagcagatggtgaagaggagggagtgggaagcgggccccgccgctgccaaaacttgggcctttgccgaaaccatcgccatggaaaccgaggaaggaggaaaggactcagccgcacactttttcaggacctgggaatgagttactcggccccctccagcggctcaccgtcccaaccacaagtcccagcggcctctgagcctcagcgctcgtttgagaagggccgcgcactccgagggccgctgggagatgtagttctctgagacgatgggcagggaaaggttgcgccctctggtggacacggcgcccacgttcgctcatccgttccgcggccggaaagaccctacctgaagtcactcccaccctgacctcttccccgtcttttctccccctccctcacaattcaccccattgcagacacattgtgcttgcctgcctgccttttctttccttccttcctcttctttctc

SEQ ID NO: 37438 - DNA, 1212 bp, Artificial sequence
  DNA replication origin
tttgttttttttttttttgagatggagtttcgctctttgttgcccaggctggagtgcagtggtgcgatctcggctcactggaacctccgcctcccgtgttcaagtgattctcctgcctcagcctcccgagtagctgggactacaggcatgcaccaccacgcctggctaattttgtgtttttagtggagatggggtttttccatgttggtcaggctggtctcgaacttcccacctcaggtgatccgcccacctcgacctcccaaagtgctgagattacaggcgtgagccaccacacccggccatttttttttttttttcctaatgtagccatggggtcttgccatgtggcccaggctggacttaaacacctagcctcaagggatcctcttgcctcatttttttcttgcaggagtaattggcctcatcctgccacccacattctccttccttgagatgatgtggaggatttgccctgccctggctgtgggtaaatgatggcctggggggtcctgactcttgggtctgagaaaggaggggatcgtggggcccaaactccagagtctgagagacaagggggctggaggcctggactctgtggaaggagtctgtgggaggaggggctgcgggtctgaactcctaggtctgagggaggaggagctggagtctggactcctgagtctgagggaggaggagctggagtctggactcctgagtctgagggaggaggggctggagtctggactcctgggtctgagggaggaggggctggggtctggattcctgggtctgagggaggaggggctggggtctggactcctgggtgtgagggaggaggggctggggtctggactcctgggtctgagggaggaggggctgggacctggactcctgggtctgagggaggaggggctgggacctggactcctgggtctgagggaggaggggctggagtctggactcctgggtctgagggaggaggggctggagtctggactcctgggtctgagggaggaggggctgggcctggactccggggtctgagggaggaggggctgggggcctggactcctgagtctgagggaggaggggctggagtctggactcctgggtctgagggaggaggggctgggggtccagattcctgggtctgagggaggaggggctgggcctggactcctgggcctttgagctgccccacttccccaggctgca

SEQ ID NO: 37439 - DNA, 899 bp, Artificial sequence
  DNA replication origin
cctcccgagtagctgggattacaggcgggcaccaccatgcctggctaatttatgtatttttagtagagacggggtttcaccatgttggccaggctggtctcgaactcctgacctcaggtgatccgcccacctcggcctcccaaagtgctgggactgcaggtgtgagccaccgcatccggcctctctgttctttaggactctgttgatttatctgagtgtccatgtccctagttttccagcctctgtcttcactcttcagatcaccaacttgctagagtgcaatggtgtgatctcctgatgccccttttcctcacagggtggcctcaggctcctcatccaggagtctgtgtgggatgaagccatgagacggctgcaggagcggatggggcggcttcggagtggccgagggctggatggggccgtggacatgggggcccggggggctgccgcatgtgacctggtccagcgctttgtgcgtgaggcccagagccagggtgcacaggtgaggcagggggtagagacttgagggtgtcaggggaggaggggcctggagacccagctcctgggtccaagggaggagggagctgggcgtggacaactgggtccgaggaaggaggggctgggagcctggactcctgggtctgaaggaggaggggctgggcctggactcctgggtctgagggaggaggtgctggggcctggattcctgggtctgagggaggaggggctggggcctggactcctgggtctgagggaggaggggctgggcctggactcctgggtctgagggaggaggtgctggggcccggattcctgggtctgagggaggaggggctggggcccggattcctgggtctgagggaggaggggctgggggtccagactcctgggtctgaggg

SEQ ID NO: 37440 - DNA, 1371 bp, Artificial sequence
  DNA replication origin
agcgctttgtgcgtgaggcccagagccagggtgcacaggtgaggcagggggtagagacttgagggtgtcaggggaggaggggcctggagacccagctcctgggtccaagggaggagggagctgggcgtggacaactgggtccgaggaaggaggggctgggagcctggactcctgggtctgaaggaggaggggctgggcctggactcctgggtctgagggaggaggtgctggggcctggattcctgggtctgagggaggaggggctggggcctggactcctgggtctgagggaggaggggctgggcctggactcctgggtctgagggaggaggtgctggggcccggattcctgggtctgagggaggaggggctggggcccggattcctgggtctgagggaggaggggctgggggtccagactcctgggtctgagggaggaggggctggcggcctggactcctgggtctgagggaggagaggctgggggtccagactcctgggtctgagggaggaggggctgggggcctggactcctgggtctgagggaggaggggctgggcctggactcctgggtctgagggaggaggtgctggggcctggattcctgggtctgagggaggaggggctggggcctggactcctgggtctgagggaggaggggctgggggtccagattcctgggtctgagggaggaggggctgggggcctggactcctgggtctgagggaggagaggctgggggtccagactcctgggtctgagggaggaggggctgggggcctggactcctgggtctgagggaggaggggctgggcctggactcctgggtctgagggaggaggtgctggggcctggattcctgggtctgagggaggaggggctggggcctggactcctgggtctgagggaggaggggctgggggtccagactcctgggtctgagggaggaggggctgggggcctggactcctgggtctgagggaggagaggctgggggtccagactcctgggtctgagggaggaggggctgggggcctggactcctgggtctgagggaggaggggctggggtcctgcagtcctcggtctcagcaggaagggaccagaagtcgacttctagatcatttctctccctaggtgttccaggctggtgatgtgccttcggaacgcccattctatcccccaaccttggtctccaacctgcccccagcctccccatgtgcccaggtggaggtgagacccttaaggctgcagagctcctacccaccgccagccaagggcagcagctctgtgcctggggaagcccttggggtaaccatgtgacctgggcgtgggggctgctgcctgctctaggctccttccctggtgggtg

SEQ ID NO: 37441 - DNA, 1241 bp, Artificial sequence
  DNA replication origin
agtttctgctcccatgagcctctgggggaccccaaacccctgttcccactagcctctgggtaccctaaactcctgctcccatgagcctctgggggaccctaaactcctactcccatgagcctctggcagaccctaaactgctctcataagcctgtggggcaccccaaattcctgttcccatgagccccggaggacccaaagcttctgctcccatgagcctctggaggaccctaagttcctgctccatgagcctctgggggaccctaagctcctgctcccatgagcctctggtagaccctaaactgctcccttgagtctctggggggacctcaaactcctgctcccatgagcctctggaggaccccaagtttctgctcccatgagcctctgggggaccccaagctcctgctcccatgagcctctgagggaccccaagcttctgctccagtgaacctctgggggaccccaagctcctagacccatgagtttctgggagagtacagacattcatggggcagagctgagagtctcggcaggcctggggtagggaaagtgtgaggccacaacgtggtactcagcaggactaagagatggtttggatggacctcgcgccagccctccagtccacggggaaacaggcatcaattcccctctccccgttcacactcccagaccactggcccccaacgactcacctgggccctatttcaggcccagccggcagggttgagggaacagcgaggccaaaggtgtcatagttcaggttcttggagaggcaggacagccgggcaggggtccctgagggccgcagatactcatacagcccctgtgagagggacggtgtcaagaggatgcaaggggcacgcgaggccggatgcgagtgtcaagggcatggggcggcgggggggctggtgacggggaggggatgtactcacgtctgggcccccgtgccaggaacacccactctccttgcagccgcctgtgggcaccgaagggtctctgaggccgtgggcgttgatccagacagtgcccacctggagcctgtggggaagatgaaggtgtccaacagaggaaaacagacggtggcaggccgggagaggggtgagttaaaggcgcggggagcgacccagggagaagggagatgaagatggaagaatgaggagaggagtgagcgcccgggccacgcagactgacccatagcccagctccagcgcctgccccagcctctcgctccacacact

SEQ ID NO: 37442 - DNA, 1062 bp, Artificial sequence
  DNA replication origin
tgacagggtgaggttctgtctcaaaatagaaaaacaaagcgtagactgtgggcctccaaatctagggtgtggtccttagcaacgggctgtcccctgagacgaggtctttgggctaggcagctctcaggcccctgttgctaaggacagcctcttccttagtaacttgagtcctaagggcggggcctcaaaaccttcttgtcaaggagtttctccccttaccaacaggagttctaagagggcggggctgtgtttccagaaaaggaggagcctgtttgaagtttgagatgctgaagatggcaaaacagaacaaagagcacctgggctgatccgaaataccacatggcctggacgtcttggtgcaaggccaggcagcgggtcagatggtcccggtctcctgtcaccacgttggccaggcctgctgggaacacggtggccatgtcctaggggatagagagagtgaaaggttggggaggccgtgggggcagggcaaggagtgggcattcagggggtgcccatgggagggaaggggatggggggtcatggaggagaaagccccaggcctagggtgaagaatgggcactgggtccccaaggagtgaaggtttgggtgctggggctgggggcagcatgggtaccacggagggtggggtaagagacaagctcctgccgactttggggcgcctttttctgctgccctgaggctacggggaggagaggcaggaaggcagggggctatacctggcagacctccagggccagcagaggacaggccgcactgggcaccatgaccacagtgttgccgtaggccagggcgggagccagcagggacacgaaggcaagcaggggccactcgtccggacacaccacagccagcacacccagcggctcccgcaggcgcagcacagggcctctcagcccggctacctgcagggacaggtgggtcacgtgtggggcaggggagccccgcccgcagtaaatgagagatccagttcctctacattctccccaacacttggtgttggcccaaaccgcaccattgtggaagcccctgccatttcgcaga

SEQ ID NO: 37443 - DNA, 1923 bp, Artificial sequence
  DNA replication origin
ggcgacacctgccaggcccaatgtgacaagatgcatcctgagtcctgtgtgccaagccttggcggggcaaagttggggcccggaggacggtaagacacagcaactgcgagttcccagagacagatccgggttccagccccagctcaccatgcactgggcgtgccacccagggagtcagccccactgcagcccccgctgcggggcgtccggagaacgcgccatctgcggcgtgagcggccgcctctcaccaccagggggcgcgctccgcctgggcccagattccaccccttgactgtctccccccaaaaatttcctttcactttcggtctctggctgtcacccggcttggccccttccacacccaactggggcaagcctggtgcgtgaggagacttggactctaggtccccaaggggcggagccagggtccccactcctggggcagggggagcagagggtggggggctgggttcccgggtccctaacctggggagggttctggggaccagacgtcgaggttcttagaagtggagatgaagagttttcaccgtaactggggcagacgcaggaagcctgggggaggaaggggcggaaactcagccacatcaatgggacgcgggaggggcggggaggcaaaggggcgggcagggcaggggctggggcatgagggtccgagacttgttcttctgtcccttccaagacccggcgacaggaggcatgaggggcccccggccgaaatgacagtgctggcgccagcctggagcccaacagtgcgtaaaccccagggacaagatcaggggagaggggaggcacaatgtcaggatggggcagagatgaggggagatggacgggagaacagatggacagatgacgaggaaataggaggggagatggacagatgtgaggggagatggataggagaggagacggacagaggagggggagatggacagaggatggggagatggacagaggagggggagatagaggagagggagatagagaggagtgggagatggacaggagcggggagatggacagaggagggggagatggacagaggagagggcagatgaacagaggagagggagataaagaggagggaggtggacaggaggagggagatggacagagaagggggagatggacagaggtgggggagatggacaggagggaagatggagaggagggggtatggacagaggagaggggagatggacaggagggggagatggacagaggagagggagatgaagaggagggggaggtggacaggaggagggagacggacagaggagaggaagagagacagaggaggggggagatggacagaggagggggagatggacagaaaaggggggagatggacagaggagagggaaggtggacagagccaagaacaaatgaagaggacgtggaccaagatcaagagagaagcaggcaacagtggtgtagaaggcagagggagggacagagctggaggaacccgggcgaggaaaccagacgtgaagatgaggtggttggagagagaccagcagagtgggggagatggggagagagaggggtggggcagagggggatgcaaactggacagcattggaccagaggcagagagaaaccgggaaagacaggcagagatggggccatgtctccagaaagtgtggaagaggcagaaggacacccagggaaggaggagcggggaagacagaacagtacaggtgggaagcccggaggagggggctgtgtgtggaacagcagagggctcccccagcacccgctcccctgcagacctatctcctcctgctgctgctgctgagctcgggactcagtgggacccaggactgctccttccaacacagccccatctcctccgacttcgctgtcaaaatccgtgagctggtgagcggcgctgccccggacccc

SEQ ID NO: 37444 - DNA, 866 bp, Artificial sequence
  DNA replication origin
cccctcagtggcacccttcatcatggcctaggaaaccggggccccagaatgggaccagactgctccccatcaccggtgcctggggacgtgttgttctgtaggaacagggctctgcagggtggcgcttctcgctctaccttcgttgggtggctatggtccaaatcgccaataaggcctagtggagctttacttctaattcgtaggaaggcatctccctcccctcacttgtcccctaagttgagggctgacctgaaaggcacatttggtgacaaagtgtatctccgtgttcacgcgctccagcaagccttgcatcttggacccagcgacagtcttgagccgctccatccagcgctgtgccaggaccagccgccagaggcccccgcagagctcctcctagaggggagaacccacgggtctgagggaggagctgggcacggggctgctgggtctgagggaggaggggctgggccggggctcctgggtctgagggaggaggggctgaggactctgattcctgggtttggggaggggagggcctggttatccactcgcctcggtggagcatcttgagtctgtggtccccacctccatcccaggtccctcccaacatgacttacgtcctgcaggttggaggccacggtgactgggtaatcttgaagcaggtagtcagactgcgggagaaaacaggatcaggcctggctgaaaacagcgagaaacagaactgtggggacccagaggtggcagcagagatccagagagagagggacaagaccaagagagggggagcccagaagaagccacagaaccttgcccttaaaaagggatgacacccctaagcacagtggctcacgcctgtaattccagca

SEQ ID NO: 37445 - DNA, 890 bp, Artificial sequence
  DNA replication origin
gattacctggcgttgcgctgtccccccgccccctccggtctctggggaggaagtgagtgacggcggaggcccctgggtcctccaggccctggtctgtctctttcctgaccacctcgggtggggaggggaagaagctgcagcccccccctgctgtgggcatgggctcacccaggtagagtgggatgtgctgaggccctgttgtctggctgtgaagtgtaaaggtcttggctttagcctgggcctcctatccctccttacagccaaggatgggggccccatgcacgcaccacacacgcctagttgggcaccaggcctatctgcagatgaggaaactcatctgggagaggccaagccctccacctgaagtcccagtgagtagctgagttacaggtctcagattctagaaacttcctctgcgccagctgcctcaaaatcgcagtaaggaaattggtggtgtgggcaagtggcatcatgaggctcccctggagcctgttcagtggtaccggggcccaggctgctgggaaggaagtgggcaggaagcgtccggagacggcccaacacacacaggccgcagagatgggggccttgagaggaacaggacaggacacacggtggcccagggttgtggcacatggggaggaggggttttgcagagctggggagagcacagaccaccgcgagaggcaggtacaatagaaacaggtgtactttgcgcatcacacagaggtggggacgacaggcatggggtgggggcggtgaggcaggagcgcaccagaggatatgtgggacccgaaggggagagacgcataaaagccgcagcagagatgggagtacagggaggggaggtcccaatgcccgctcacctcaccccttggggcctgccggtgccg

SEQ ID NO: 37446 - DNA, 1379 bp, Artificial sequence
  DNA replication origin
gacaggacacacggtggcccagggttgtggcacatggggaggaggggttttgcagagctggggagagcacagaccaccgcgagaggcaggtacaatagaaacaggtgtactttgcgcatcacacagaggtggggacgacaggcatggggtgggggcggtgaggcaggagcgcaccagaggatatgtgggacccgaaggggagagacgcataaaagccgcagcagagatgggagtacagggaggggaggtcccaatgcccgctcacctcaccccttggggcctgccggtgccggggtccccaggtccctgtcccccaggcctgtaccagggtctgagcccagcactggtacaagggttgggagacagggccatggggagaggagccgccgctgccgctgctgcctcggggacgctgcctccccgtgggcccagtccctgccttatacccaggtccagggagggcgggggttcctgccagaggaagtggggccgcatcaaagagggcaggaaggggcagggacaggttggggggacgccaccctgagtcgcagaaactgcacacccactccaccctatgctgggggcagtagagaaccagcaaggggcaaagagggagtgtggactccagagggaggggacggagacccagaggggaataggaggttgcggccccctcccctcagccgcaggtgtttccgttcgggtggggctgctgtgtttacaacaacagcccggctccccggtttcctccctgattgttggggcgtctccttggcaccccatcacgtcaggtggtgtgctgaggtcagagtgtgtgctggggaaggacctctgctgggcctgctggattgcaaagagcaagtttaaaagaccccctcggacctcttgacaggccttccacctgaagagtggggataaggaccataggttctttttatttttttatttttattttattttattttatttttgaggcagattcttgctctgtcgcccaggctggagtgcaatggcgcgatcttggttcaccgcaaccttcgcctcccaagttaaagcgaatctcctgcctctgtctcctaagtagttgggattacaggcatgcaccaccacacccagctaattttttaatttttagtagagacggggtttcaccatgttggccaggctggtcacgaactcctgacctcatgatccacccatattggcctcccaaagtgctgggattttacaggcgtgagccactgcaccctgcccacaggttatttgataacccaaggagatacagttcctaggtcagcgggttcccctgtctcccctcccacctgctctccctctcactcagccccacacccccagcacccaccagacctgctgttcct

SEQ ID NO: 37447 - DNA, 1521 bp, Artificial sequence
  DNA replication origin
gacagttgcacagcactgtaaatgtgttaaatgacagtaagggtaaatattttgaatattttaccacaatgaaataagtgtatgggaagctttgtagcaggagtgtgggcgggggctggtgcctggaggggccttcgagtgaggcagcattgtatggggaccatgtggtcactgaagtcctagcagaaggatgtggtttttttttttttttgagacggagtctcgctctgttgccagtctggagtgcagtggtgcaatctcggctcactgcgacctccacctcccgggttcaagcaattctcctgtctcagcctcccgagtagctgggaccacaggcccaccaccacgctcagctaatttttgtattattagtagagacgggggtgtcaccatattggccaggctggtctcgaactcctgacctcgtgatccgcccgccttggcctcccaaagtgctgggattacaggcgtgagtcactgcgcccggcccgcagaaggatattaaagagcacctgcaggaattttttaaggggatgccgggggaagggcttgaaggaggaactaaggaggcttccagaagattttgattaacagcgagcgctagggaaggccacggggatacagaggggtaggaggaggatccagagacctccaagttgtggactccggaggcatcgagttcctttcccagttttgtcaagaattccctgagcggcagacaccctcaaagtaaaaaacgggaaccacagagaaggaaaaagaagaaccacaagcgttttgagaaacaaacaggctgggcctagggcctggggtgtgccctgcaactggggggtggggctggatgttcttggagtcagggagcagcagcctcccacaggatgtgagagaggaactggggtctccagtcacgggagccaggagccggccagggccgcaggcaggaagggagcgaggctgaagggaacgtgagccgaccagggcccgactgagggaggaggggctgggggcctggaaccctgggtctgagggaggagtggctgggggtctcgacactgggtctgagggaggaggggtgggggcctggattcctgggtctgagagaggagggactgggggtctggacgctgggtctgagggaggagggaggaggggccgggggggcctggactcctgggtccgagggaggaggggttgggggcccggactcctgggtccgagggtagagcggttgggggcccggactcctgggtccgagggtagagcggttgggggcccggactcctgggtccgagggaagagcggttgggggcctggactccggggtctgagggaggaggggctggggcctgaggggggcggaaggggcgtggcggagctcggggccgggactctcagcctatcaagtgtctgtaattaattaaccaactgagatccagttcaggggtgaaagttcttcaggtacgaggagggcattgttgtcagtctggaccgagcccgcagagcccctcctcggcgtcctgg

SEQ ID NO: 37448 - DNA, 1278 bp, Artificial sequence
  DNA replication origin
gccagttatggtggtatgcacctgtaatctcagctactcaggagaccaaagcaggagaatcgctggagcctaggagttcaagaccagcctgggcaacatagtgagacaccgtgtctacaaaatataaagttagccaggtgtgatgatgctgggctgtggtcccagctacttggttggctgaggtgggaggactgcttgagcctgggaggttcaggctgcagtgagccgagatggtgccaccacattccagcctggggtgacagagcgagaatctgtctcaaaaaaaaaaaaaaggggggagccaggagcagtagctcatgcctgtaatcccagcactttgggaggctgaggtgggcggatcacctgaggtcaggggtttgagaccagcctgaccaacatgaagaaaccccgtctctactaaaaatacaaaattagccgggcatggtggtgcatgcctgtaatcccagccactcgggaggctgaggcaggagatcacttgaacccgggaggcggaggttgtggtgagccgagatcgcgccattacactccagcctgggcaacaagagcgaaactccgtctcacaaaaaaaaaaaaaaaaagaaggcaaggaaggaagccaggagtttgtcctggggggcgctggggagccatgggagggctgagtgtagaaggacccctgaggaatgggggggcagagcgtgggctgcagtgggaggctgatggagggtcctggcaggggaactgaggcaggtgggcatgacgggagagaggacagaacagcctgcggctgcagatccggctcacccttccactccaggtttccgcggcccctctccaggtgctcccgcaggcggtgcgggcaggagaatagcaggaaggtgagctccttgttggccgccttgtcctgctgctgccaccgctgactgatagccagggcctcgggccagtccccaccccaggtgccctgcttgaggtcgaaattcatgaactcctcgccgttcagggcgaacttggcggtgggcaccgaggtgttgtcagggcccagttcacagcccagcaggccctgcagagtgtagggacctggggcgcccaaacacaggtaagcggggccccggagcatggacccggccccttgcccctccagaccggaatctcaccttttccccccaaagctttgaaagcttccagaaagagcttctccttgatcctcagatctgtggtctctttctcccaataccaggacacctggttttcccagacccaagctccacagggctc

SEQ ID NO: 37449 - DNA, 1037 bp, Artificial sequence
  DNA replication origin
agtggggatctgggggcctccggggaggaaacagtgaactctgccctacagagctgaggaaaggcttctcagaggaagtgatatccagccctgaccttgaagaataaggagggctggagtatatgcagagagggggaagggtggaacagagaggtgccaggggaaactggatgagcaaatgcccagagggaggagattgcttatgttgggtggctggagcgtagactctgatggctgcgtagagacaagtgctgctgcgtgggtctgatgaggacattaaggcaaggaaggccaagcacagtggctcacacctgtcatcccagcaccctgggaggccaaagtgagagaatcacttgaggccaggagtttgagtctggcctgggcagcatagtgagatgccacctctacaacaaattttaaaaattagccaggtatggccagacgcggtagctcactcctgtaatcccagcactttgggaggcggaggtgggtggatcacttgaggtcaagagtttgagaccagcctagctaccatgacgaaaccccatctctactaaaagtataaaaattagccagacatggtggatgtgcctatagtgccagctactcatgaggctgaagcagcggaatcccttaaacccaggaggcggaggttgcagcgagctgagatcaccctgcttcacactagcctgggcaacagagattgtgcggaaaaaaaaaaattagccagttatggtggtatgcacctgtaatctcagctactcaggagaccaaagcaggagaatcgctggagcctaggagttcaagaccagcctgggcaacatagtgagacaccgtgtctacaaaatataaagttagccaggtgtgatgatgctgggctgtggtcccagctacttggttggctgaggtgggaggactgcttgagcctgggaggttcaggctgcagtgagccgagatggtgccaccacattccagcctggggtgacagagcgagaatctgtctcaaaaaaaaaaaaaaggggggagccaggagcagt

SEQ ID NO: 37450 - DNA, 942 bp, Artificial sequence
  DNA replication origin
ccccctctctctgcacctctgttctcccatctctgggtttctgtctccacctctctctgatctctgtcccccctctctgggtctctgtcctcccaggtctgtgtgcccctctcttggggtctctgtccctctctcagaggctcttcctcccgctgccccccacctggcagcccactcctcatccttctccacaacagagctcctcctacagccgctgccgtgagtagcaagacaccgatgacgattcccaccacgagcacggaggacttggctggagattctgcagccagagaacgctgtgagatgtggagcagcccctccaccccacccagtcaggacacagaactggggcgctcccagtccctcccagcctcggagattccagcaccaagtgtctgatgggcagaggcgaggccaggcaggcgatctgggcagactgcccccaggttggacgtaagaaccagctacagcacgagcggccgcggtcacaccggcaatggatcagcagcggcaaggcggggctgtgccagtgcagtggggagaggcaggcagagcagtgggaagtcagtctcatgggcccgggcagtagcaaagcagcaggcagtcagtcttggtgaggacgggcatagcagacaacgaatggtcagattccaggaagacccgcagcagcagcagcagcagcagcaggatggaagatggtcagactcagggaggactggccatggtagttaacagctcttcagactcagtgaggccagaagcagcaggagacggaaggcagttggccttgggaaggacaagccatcaggttttgggggcactgacaggcgtgaggttcaaggcagtcagattcaaggaggtggcagcagtggggaggaaggtcagactcaggaaggaccggcgcagcagtgagacaaggcaacgggaaaccaggagcatcac

SEQ ID NO: 37451 - DNA, 1567 bp, Artificial sequence
  DNA replication origin
agtcctccctgagtctgaccatcttccatcctgctgctgctgctgctgctgctgcgggtcttcctggaatctgaccattcgttgtctgctatgcccgtcctcaccaagactgactgcctgctgctttgctactgcccgggcccatgagactgacttcccactgctctgcctgcctctccccactgcactggcacagccccgccttgccgctgctgatccattgccggtgtgaccgcggccgctcgtgctgtagctggttcttacgtccaacctgggggcagtctgcccagatcgcctgcctggcctcgcctctgcccatcagacacttggtgctggaatctccgaggctgggagggactgggagcgccccagttctgtgtcctgactgggtggggtggaggggctgctccacatctcacagcgttctctggctgcagaatctccagccaagtcctccgtgctcgtggtgggaatcgtcatcggtgtcttgctactcacggcagcggctgtaggaggagctctgttgtggagaaggatgaggagtgggctgccaggtggggggcagcgggaggaagagcctctgagagagggacagagaccccaagagaggggcacacagacctgggaggacagagacccagagaggggggacagagatcagagagaggtggagacagaaacccagagatgggagaacagaggtgcagagagagggggacggagacagagacccagagacgggggaacagagacccagaggggacagagagaggtgcggacagagggagggggagacagacccagaggagggaggcaaagatgtagaaagaggggggacggaaaattgggagaaggggagacaaaggcccagaaggaaggggatagagactgaggaagagtgtgtgagacacacacacaaatgggggacgccagtcagacccagagcgcctcagagattctgatgacctctccctctctctctctcctcagccccttggatctcccttcgtggagacgacaccggggtcctcctgcccaccccaggggaggcccaggatgctgatttgaaggatgtaaatgtgattccagccaccgcctgaccatccgccattccgactgctaaaagcgaatgtagtcaggcccctttcatgctgtgagacctcctggaacactggcatctctgagcctccagaaggggttctgggcctagttgtcctccctctggagccccgtcctgtggtctgcctcagtttcccctcctaatacatatggctgttttccacctcgataatataacacgagtttgggcccgaatcagtgtgttctcatcatttttcaggcaggggaggtaagggaataagtcgggggactgaatggcggctgggcctcggatctctcctacaggtaacatgctgccacaggggaacctgccagttttatacatcaggtcatgtattttctttttctttttcttttttctttttttttagacggagtcttgctctgttgctcagtccggagtcctgtggcgcgatctcggctcactgtaagctccgcctccctgggt

SEQ ID NO: 37452 - DNA, 982 bp, Artificial sequence
  DNA replication origin
tggtctcgaactcccgacctcaggcgatccgcccgcctcggcctcccaaagttctgggattacaggcgtgagccaccgcgcccggccttttttcttttctttcgttctttttgtttatttttgttttgttttgttttgtttggtatagaagtgttggaacgtacacctctttcttaaaccatcctgacaaagggaaagggaaaaatacatttcccgtgaggcgttgtgactagaacagctggaggtggacggcagagtgccgcgacgactgccaggagttgtagttctccccggccgcgtcactgcggtgtcgcccacccttcttccccgggcaggccgcggtttcctttgtggacgtggcgaggagtgcccgcggcaccccgtgcactcattggccccgccccgtgagacgctcgtgcgagctcattgggcggggggcggggctctgcgctgccagaggcggggcctgactggagagcggccgaattgggcacatttgcgggaacgcagagcggagcgtggagagcggagcgaagctggataacagggtaaagggagtgggtggggggcctctgtccagggagggcggctcgggtcgaggaccagggtccggactgggagcaatgacggggagcctgcctgacctctcgctggccacaactatgccctgcaccttgcgtgggatgtgcgccacgtctgtctctgtaattccccctggcaggtctgggacccccctgagactccgtcagaagattcggtcctccccataggtggctttacctctaagcatcccgccctcttttcccccatcgcccgccctttttgagcccgaaagcttgcagccaacttccaactccctgtcctgtcctaggtaacccctccaccccgccattctcctatcccgtgtctgtccccatccctgtgacccctgacccctggcctttgccactccccagggaccgatgatgtggcgaccatcagt

SEQ ID NO: 37453 - DNA, 1577 bp, Artificial sequence
  DNA replication origin
tttttgtatttttagtagagacggggtttcaccatgttagccaggatggtctcgatctcctgaccttgtgatccgccctcctcggcctccaaagtgttttttgtttgtttgtttgtttttgagacaaggtcttactctgttgcccaggctggagtgcagtggcacgatctcggctcactgcaacctacgcctcctgggttcaagcaattctcctgcctcagcctcccgagtagtggatattacaggcatccaccactgtgcccggctactttttgtatttttagtagagacggtttcaccatgttggccaggctggtctggaactcctcacctcaggtgatctgcccacttcggcctcccaaagtgctgggattacaggcgtgagccaccgtgcccggcctattattgttattattatttgagacggagtctcgctctgttgcccaggctggagtgcagtggtactatctcggctcactgcaacctccacctcccagattcaaccaattctcccgcgtcagcctccagagtagctgggatttcaggtgcgtgccaccatgccctgctaatttttgtatttttagtagagacaaggtttcaccatgtggaccaggctggtctggaacgtctgatctcaagtgattcgcctgtcttggcttcccaaagtgctgggattacaggcgtgagccaccgcgcctgtcctgtcctaagtgctttacatggcctaactcatttattccccacaaccgcccttttggggtaggtaccgttttttcttcctccgttttacagaggggtaactgagacacagagaggttaagtcacttgcccacagtcacacagccagtaagaggaagtggctggatttggacctaaaatgtctggctgtggagcccaagcgcttaacaacaccaggaacctcagagaagggtgtgattccggggacagagtggggccctagacagactggagcagagaccgcctggtgcgggaggtggggcggtgactcaggcaggcctggagagggctctgctgtctcggattttcgactttagggagggggccgcgggggcctagggacggtgacagggaggagggctccaggtagtctctgttaattagagattgggagaggaccggcctggcaaggcgtcaccaagggagaggagaggggcccgagagctgataggcgtggcccaagagaaggggagagatggaacctaaagtggcttgacatgcgacagggaggggcacaggagcccggaggagcatggggaggggcagagggagactgagcccccggggttgcgggtgatggtcctcaggcagtgcctgattcagccgggagcaggcaggggaaagccacggggctcagcacagggcagggctggagggagaggagcctgaaattgacacgcgcagcctggtaagggggaggggcatggggcgggtcggggcctgagacagcgggggatcgggggtgtggccgtggctgtctgggttcagagtcaatcttgcaacagggcccccttggcaagggtcacagtgcgacgccgcgctccccttcaccaccccag

SEQ ID NO: 37454 - DNA, 1180 bp, Artificial sequence
  DNA replication origin
acaggcgtgagccatggcacccaggctatgtaacatattatatccacccaataaattagctaacttgtgagagattatatgctaagctctttatgcacaatattgcatttaatcatcacaaaaaagcacatacagtgggtttttccatgtattctactttctgaatgcaaaaattgattctcagagagaagaaataactgatccaagcgtgtggagacaggaatggcccactatgagttgacagtgggccttttggccccagactaaggctgtgatggggtagcttacagggactgagatggcttgactgagaggaggggacgggcattgtaactggagggaacaatatgggcagaaggtagaggtttgaagagtgtggtgagttcaggaaaaccacagaaaatccatttggtgcagaaaatgcagaaaaacaaagccacaggaggaaacgtcccggctggggagtgggaccgtctcctgggggcccaggagggggagggaggggcagagtcagtgctgggcatgaagaaccccgcccccggagccctgtggaggacagactggacggggaggctggggccagggacagagaggagaggagggagagaatgagggctgtgtgtgtggcagggtgtggggcactgaggctgggacttgggacagaaaggagggatctgagagtcaggggctgagtaactggctttggggttctcaggatgagaggtcacagaagttaggggtcaggatgacaaggcatggaaagtaggtgtccttggccagggatctcaagtaccctagtcatattgtcacagaggtggtgagtcccagaatgaaagccctgaagggaacctgggtagcttagttggtagagcattggacttttaatttgagggcccaggtttcaagtccctgtttgggtgcgttcagtggcttttagcacctaattgtgacttcatgtttgaaaaaaagatcgtttttagcatgcagctaaataccagaaaaataagcagacgaaaaacaaaaaagagaagccagaggtgagaaactgaagatctcacagttatgggctcctaaaagtgggtagagcctggttaggggccagggactccgggtaaatgggttcagggttctcagaatgaggcggtccagaaggtcagggtcacggtgtatggggagcagg

SEQ ID NO: 37455 - DNA, 1184 bp, Artificial sequence
  DNA replication origin
ggaccaggcatttgaaggaggggtgctgggtgttggagggattggagggcgttcctcagtataaaacaaacaaacaaaaaaaattgggccaggcccggtggctcacgcctgtaagcccagcaatttgggaggctgaggcgggtagatcacgaggtcgggggtcctagaccagcctggccaacatggtgaaaccccgtctctactagaaatacaaaaattaaccaggcctggtgatgggcacctataatcccagctactctggaggctgaagcagaatcgcttgaacccgggaggtggaggttgtcgtgagccgaaatggcgccactgcactccagcctgggtgacagagggagactctgtctcaaaaaaaaaagggaaaaaaagcctggactctgcagcgcacaaaccagacaggaagccctgccctctcagagctccagttctgtaaggaagagacacagcgacctaaaatatggcacggcgcaacagatgctgtgaagcaggggaagcgtgtagcagtgtggcaatgttctgatgactgagaggctgggaaaggtctcaatggtaaatggagtgaaggagggagccacggagagatctggagggagagcattccagggagagagaagagcaagtaaaatggccctgaggcaggagtgggcctggtgtggcagcatcagcaaggaggctagagtggctggaagggaatgagccagtggaagagggtcagagctgagagcagatggggcaagtggccagactgtgcaggcccctgcaggcaggtcatggtggtccctgtttggtggcacaagacagggatggacagagacccagagagaaggggtggggagtcagagagagagggacagagacccagagagagaggggaacagagacccagagagagagggacagagacccagagagagaggggaacagagacccagagagagaggggaacagagacccagagagagagaggggaacagagacccagagagagggagacagaaactcagagagagggaaacagagacccagagagtgggggacagagatccaaagagaatggggatagagacccagagagacacagaatttattctgagtgacatgagagtcgctggagtgtcatgagcagaggagggattataaactgctttgagttatttaagagtcgggtt

SEQ ID NO: 37456 - DNA, 834 bp, Artificial sequence
  DNA replication origin
gttgcccaggctgaagtgcaatggtgcgatcttggctcactgcaacctccgcctcctgggttcaagcgattctcctgcctcagcctctggagtagctgggaatacaagtgcgcaccaccatgcccggctaatttttgtatttttagtagagacaaggtttcaccatgttggccaggctggtctcgaactcctgacctcaagtgatacgctagcctcggcctccgaaagtgctgggattacaggcgtgagccaccgtgcctggccagattttgttcttaatgtgagaccacattcaatatgcttagcccgctctttcaaactccagcgtgcgctgtaggagcactgtttgcacggccctgcatcctcgcctgccctgtccccggggcgcccacgccgcgaatgaaggcgccacgtcgttgcgcacccaagccggtttatttggtctcccgcacacactcaggcctgcatcaccggccgtgatttctccgcttgcagcttcactccggagcccgcgaagccggtaccgccctgggggaggtagagagaaggacgaggtagaggccggcccgggggtgaccagtggggctccaggtggtagtggggattcctaagcgggtcaaggtgaagcgggttgctggctaaggagtaggagttggggagggggcgaggcgaccgcagtgggtacggatggacagggcgcagggcgcagagaagagggtagagagtggcaggggaggagccttgggagggagcgtgtggagggggtggagccgtggagggctggaggcagggaaggggcggggccttgaaaaggaaggaggaggcggggcctag

SEQ ID NO: 37457 - DNA, 742 bp, Artificial sequence
  DNA replication origin
gcagcttcactccggagcccgcgaagccggtaccgccctgggggaggtagagagaaggacgaggtagaggccggcccgggggtgaccagtggggctccaggtggtagtggggattcctaagcgggtcaaggtgaagcgggttgctggctaaggagtaggagttggggagggggcgaggcgaccgcagtgggtacggatggacagggcgcagggcgcagagaagagggtagagagtggcaggggaggagccttgggagggagcgtgtggagggggtggagccgtggagggctggaggcagggaaggggcggggccttgaaaaggaaggaggaggcggggcctaggagagcggagggggggaagggcggggccttgcaggagaaagcggggggggggggcggccttacagagcagagaagaaggcggggccttggagagttgggggaaggggaggggacgaagccttggagggggtgaaggggaggggcggggccttggagtgctgggggaaggggaggggtgggactcttacccgctgcagcacgatgatgtcgcggtctgtgagtttgtctccagtcacagggtccaccatgtccttccgaatcagcttctccacgcattcgagggtgaccacagccccactacggtgaggccgaaggcgggagactctgatcaggggccttcctggggacctactggccccaaagccggaccgccccgcaggttcccgagtggtcccttcc

SEQ ID NO: 37458 - DNA, 918 bp, Artificial sequence
  DNA replication origin
ggaaggaggaggcggggcctaggagagcggagggggggaagggcggggccttgcaggagaaagcggggggggggggcggccttacagagcagagaagaaggcggggccttggagagttgggggaaggggaggggacgaagccttggagggggtgaaggggaggggcggggccttggagtgctgggggaaggggaggggtgggactcttacccgctgcagcacgatgatgtcgcggtctgtgagtttgtctccagtcacagggtccaccatgtccttccgaatcagcttctccacgcattcgagggtgaccacagccccactacggtgaggccgaaggcgggagactctgatcaggggccttcctggggacctactggccccaaagccggaccgccccgcaggttcccgagtggtcccttccctcccctcccaggtgactcacgagggccgcagcacagcgcagggggtggcgttgctcaggctgtcgcgggtcacggcacacacgtagcgctcgctgcgggtgatgagccccacgcggtccacggagctgtctagcggtgtgaagtgcacgggcgtcaggtccgacatgcgcaggggcttccctgacatggggcaggtcaccgtgcgggactgcaaggggcagagagaggcgggctcagtaggcagggctggcgcaggtggagagcgcgtggtccctgtgcgtgaggaggacggtggggaaccctggcgccctggcaccgtgcgtgccggggcgctgtgggggctcaccggcttctccagcttggtggccttggcttcgggcgtcagcgacgggatccagaagctgggcagcactttgtccttgtccttacttggaggacccacactgggcccaggttggacatcatctgtgggggaaggaagggactcagatgccgc

SEQ ID NO: 37459 - DNA, 1556 bp, Artificial sequence
  DNA replication origin
gtagcgctcgctgcgggtgatgagccccacgcggtccacggagctgtctagcggtgtgaagtgcacgggcgtcaggtccgacatgcgcaggggcttccctgacatggggcaggtcaccgtgcgggactgcaaggggcagagagaggcgggctcagtaggcagggctggcgcaggtggagagcgcgtggtccctgtgcgtgaggaggacggtggggaaccctggcgccctggcaccgtgcgtgccggggcgctgtgggggctcaccggcttctccagcttggtggccttggcttcgggcgtcagcgacgggatccagaagctgggcagcactttgtccttgtccttacttggaggacccacactgggcccaggttggacatcatctgtgggggaaggaagggactcagatgccgccccctgggcccgcccagcccgcggcgccccgccccccaacccacaagaagcccaacctgagtcacctgggctggtgcccgagagggccttggctgtgaaagggttgaggggccggctcacgatagccgactccttctccaggaagccccgcacatggtcctgcgaggccgcccgctgaagctccttctgctcctcgcgccgggtgccccgctgcttctcgtaggcctgcgtcggggaaagtgggctgagcatctgcccgtggggctgggggtatcttcctcccatttcacaggtaggtaaactgaggcccacaaaggggaccctctgatggaggcactatgtggcagagggtggtaactgccaccctgggtgggtgtgaaccttactgcgttgtatagccagactgccagggctcaaagcccatctctgtcactctgtggcctaagtgagcactatgacctctcctggcctcagtttcttcatctgtaaaacagcctaacagtggttacccacctcagcggctcactgaagggttacataaggtgagtgtttacagcatggagagcctcacctggcactcagctaagcatttaattaatgtcacctgctggccaattaagttttctatacagtgcatgccccagcccgtgtttgggacgggggatgtagacttcagatctaagggaatgctgaggagcccatgtctatggacggacagtgagtgaggacgggagaagtgaagccatgacctgagctcagccctgcctggcgcacagcagttgcctgggcggtgctgcagttccagaccaccctgggccacccagctgagtgaggaggtaacagtgacagtgatggatgctcatgagggcctccgacatgaccaccaggctgtgtggaggacatgggcacagggggagccacctgcttgggacaaaaagcccaataagcatgtgacctgtagtgtttcctgagcgccagcaaccaggcaggggaagagggggacagacccactgtgcctcaaacagggcccctcctacccatcaaatggctttgtccatggaaggccaggccgggttcccagtaacacgccttgagaatgctcatctgcgtgtacctcccaggtgccctgctgtgtcctctga

SEQ ID NO: 37460 - DNA, 1460 bp, Artificial sequence
  DNA replication origin
gcacctgttaagcctttgccctaccatcagaggtaggtcatgggaagtgtccaaaggtgagctgctccgatggcctcggcaatgctctgagagccctacaccccattagaagtatgttcctttccatatgttccacactatgaaacagatgctaggatcatgcccatgtcccatgtgagaatacagaggctctgaggataaactgctcatccagggttccctggctgtgcaggtggccagacccacgcacacagcctcctcctggcggttcccttgctctccccacccagacctacccatccctgttcccagctcacgtgacaacaggatcgtggcaaggctgcagggagagacaacagcagtcgaagtccttcacggcatcccggctcagtcgaatgttctgggtcccatagcccgaggccgctggggacagagatgggcagagtgatggaggggcggagcaacaggagacatgtccgtctccaaagccccagagagaggcacagagacaacgcggtggtgggggtgggggactcagagagaaacaggcagttgggagccgctgcctgtgtgctggggccacgggctgaacccacagggagttgtcaaccctggagggtgagaggcagacaggcctggtcactgagtggcagcttggtggaggggctgacggctgactcccctccacccttctgactgtgaccaagctcaagtgcctgtccctctttgggcctcagtttcttcctctggaacatggggtaacaagagcaccctccctgacactctgttgggaggagtgagttcatgcgcagaaggcagagaacacagtgccgggccacatggggtcatgggatcacccagctgttgtttacatggtcatggccatcagtgtatatcgggggcgggagagagacagggacagaggaagcaaaacctggggcacgaggggagagggtgactccaagacacagccatgtcccgcctcttcccaccccagccctgcacctgtgtccttcttcttctcgtggtaggtgtagacggcccctgcggtgcagttcttgccatgccgcgtcatcctagggaggaagggacagtggcaggactgtggttaccggaggcaggcagcacagggaagacctctgcagccctcagagctgatctgccccccttgatgggaaagcggaggcggagaaggggggtgaggtggaagagagggagggcatgtggtcgccaggcctcctccaggaagtcctccttccagactcacctagactcatttatatgtgaaaatagcacctttaacaacaaaactctttgtttggaggtaagagggtgagagaccagagttcaaattctagccactacttcagattagctagggtggtggctgtgccatttaatggaggggaaaaaaaaagacaccaagggggccactattgttgatgaatccactccacctt

SEQ ID NO: 37461 - DNA, 931 bp, Artificial sequence
  DNA replication origin
gtcttgagctcctgacctcaaacgatccacctgcctaggcctcccaagtgctgggattacaggcatgagccactacatccagcctaatctcattaggtttttacagtggggtaggggttatggttcccattttacagaactggcagtggagggtcagagaaaggaatgaggtgaatttcctgaggtcacagggctaggaagggaccccagctctgcctgcttccgggtccattctcttccctcagtgggaaggaattttgatgttggggtgggtggcagtccccgagacagtgtctccccttccctactttcctgcagggcgtggacgagtggatgtggccagcctggctgtggggctgacaggtggcatcctgctcattgtcctggccggcctgggagccttttggtatctgcgctggcgacagcaccgaggccagcagccctgtccccaagagtaagggggcttcagcgaggagggggtggtggtggagagcaggggagggaggaagcattgacctaaagggatgtgctaaggattgggggcaggcaggcactgatgaaagacctaaggacacagtcatttggagagtgagtctgtgagctggcttgtgtctggttttggcgactgtcgctctgtctggatcctcagtacctggcccgcagtaggagctctgaccacttttgctgccagcctgtctttgcggtactgagattaccagtatccgtggaattacgactctggatattgtatctggtgaggctgcgacggtgcagcctgtggtgtcttggtgtctgtggtatgtcagtttcagtggtaacaggtgcagcacctgagtgggtgtgggaaattggtgaggagtgcgtctgtgttgtgttcctgtctatatggatgggctgagttctgtctgtttggtgtgtgttggcctgcctc

SEQ ID NO: 37462 - DNA, 880 bp, Artificial sequence
  DNA replication origin
atccggtatgaatcaggggcacggttcggagagccgggtctcgaaagcagctcttcagtgaggcctcctgaggctgcaagaggaaaggcacactagggagtcaaagatctggctgtttttctccccccttcaaccaggaccactccgaccgcccttggcgtctcagccaatccaggaccctctgggcacaggccccaccctcctatacggctccacacatacaacgctgggccacgcccctagaccattgcatggggccccgcccccgcactccaagccccgccccaggtaagaaggcccaaattccaagtcccgcccctgagcccaggttcctcctccaacgtgcccacccctctgcgccccgcccccgggcagaagccacgccccatacctggtgtaggggggtggaggtgcgtcgtgtaccccagaggctgccagcgcctgctcataggtggggaggcctgggggtgggggtgggggtggaggcaggggcgtcggtgggcccagagggttcaaaggactcagagggctaatgagcccggccctggggacagcaaaggtacagttagcagaggcaacttacaggatacctagactagggaggaagagaggggatctaggagacggagactcagggtgacactgggacagagctggaagggaggtggacttcagaaaaggagggtcaccttcagcctagccttacacacagaaaagcgcctcaaatgacaggcagctgcacacagacaggtagacacagaaatcagcaaccacagagacacactcttattcagacacactcatgtgcaccagatacaggcagagcaatagagaaaaagacagccctgccgggtgcatggcgcacacctgtagctctagt

SEQ ID NO: 37463 - DNA, 979 bp, Artificial sequence
  DNA replication origin
aaaaaaaaaaaaaaaaaagggagagtgagagagagactgagcgcgagcagggcctgggggtgtagggcgcgtttgcacagaaaaccagttccgatgcgcccgggatcgcagttcatttcattattattttttgcattatttctgctttttttggtctcctttccgaagggtttttatttaggggaacagctcaactccagctccctgggtgcaatgcgagcctgcccgcaccgagcgcgcttgcaaatatgccccccgccctttccctgggttacgaagtgcccctgtaccgcacggggagtgcacgaagacacgcgtgtgcacaggcggggctctgcgtgtgcgtaccctgtggcactggagggggctgtcaggtcatatctgcccatacacaagatggcacagccggggctgggctcctgggtccgaatttccccgcgcgtctgcctaccacgggggcggaactgaccagtgccctcacggtcaggagagtgtgggggcccgtgaggggccaggacacgggaacacgttgccgaaaacatgtgtatatccatacgcggcggaaacgcgtgtgccagggcaggcctcgggccggatgacccctactcccaccattccccactccaagtccagcttcggcgtctatgaggcctagcggcttccggaatccggtatgaatcaggggcacggttcggagagccgggtctcgaaagcagctcttcagtgaggcctcctgaggctgcaagaggaaaggcacactagggagtcaaagatctggctgtttttctccccccttcaaccaggaccactccgaccgcccttggcgtctcagccaatccaggaccctctgggcacaggccccaccctcctatacggctccacacatacaacgctgggccacgcccctagaccattgcatggggccccgcccccgcactccaagccccgccccaggtaagaaggcccaaattccaagtcc

SEQ ID NO: 37464 - DNA, 830 bp, Artificial sequence
  DNA replication origin
ccacagaaatggcccccactccagagcccgaataaagagagcccggatagtctcacgtttacaaacaggcatgctcagagacgagactaacacacagaagagggtccaaggcagagcaagcgtcttgatttgcaaatgagagccctcccccgtcgaccccacaaaccccccccagcccccgttccggcgacacaggctatggggccaacgccagaggtccacatggacgcctcctcttccgtagacacacgggaacacataggccctgaacttcatggggtggtgcagaacaagttgggagcaggaggaagatcggttcccaagcggcaacggtttggggggtggagagaagagggaataagacctggggaaagtaccaggtacaagtgtgaacaagaacaccgaccatccccgggggttgaggttcaaatgcatgggcccatgcaatgccaggtatgtgtgcaaacgggtatccaactcacccgtggggaagaaaagatatagacggaggaatcccacacggaaaatcctgacacacttggggttatgccctgctgggaaatccaggtgtgttgggggggaggtgctggggataggtgaagtgtgagggcgccacaccaataagcaacaggaaaggggcagattcacaggtgaacacgctgccagccacgcacgcacagggcccacgctcagacacacaaacacacacccgggaaacatccgactcttcccatgcaacggcaccagtccgtggccagactcaagagggcaaacgctccactccttgcgatcaactaggattctctgcctttgggggtgggggcattaaa

SEQ ID NO: 37465 - DNA, 2671 bp, Artificial sequence
  DNA replication origin
tgcccctccagccccagaggccttcccagtggcataggcggctgctggcccacccaggctctgacatttgggggtggcggtcgaacggggtggggggggcctggtggcacccccggcagctgctccataaccacctttgcccgtcttgtacccaggcgactgaatgatggggcggtaacctccaccaccacccccagccccaccgccccctgctgcctcagggcccgtggcccggccagatgccccagccgtggctccgctgggaccagccttgctaggctccccagcacccggggagggctccccaccacccagggggctgcaggccaggttggcccggtggcccatggaggggtagctgcctccacagctcagatagtgctggagcgcatgggctggtggcgggggtggtgggggctgggcactggctggccgctggtagtgcttgatgaccgtgtcctggcgtggcagggcccgctcaggcggcggtgggcccggggcagcacccgagaagttatagagctgtggggaggactgctcggcagcggcggcggcagcggaagaggaagccagcaggttgaactgagttgggaggtggcgaggaggtggtggtgggtctggggggccagggcggtaagggggggtctgggctggaccgagaccagctggccccaagacaccgccccctgccaggcgctcgaagcccagtgaagagggcaccgtgggtgcctgcgagggcttcaggtgcagcacgtcatgaggggacaggagcccgttagctggagggctgaatggggggtcctggaggctgagggacgagggcactgggaaggggcggctgccgaaggaagccgggtgttggtaagccgacagggcagatgaggacggaaaggtgctggaacccggcagggcacccgagatgaagagctccgtggggcctggcgtgtgcatggctggagatgaggaagaccgcgcgtcagagagaacagcgagccagtcccaccctggccctgcagggccggcgctgggcttacctgtttgccaggaaggactgcggaactgggagaggagagaggaggcggaggggccaggctgggggccccgggattccagggccgagataaggttcatgacggaggcgtcgggccctgctgagcccgcgtggtggaggccagtgtcgaagagtccagagaggcctggccggggacaggggttatagtcagccaggtgggggtgggtaggatacagtcaagagagaaagggaagaggccaaaagcaagttggatcaggaaaaggaggggatgggagagaaaagggcaaattcaaaaacaagatggatagaaccaagctaatgagacatgaatgaggggagggaagggggaaaggtgagacagtaaagcaagacaaggggcaatccagtcataaggacagggggcccaggtaggaaatggtagacaaaagtgtagaaaaatctagaagcgaaagagccaggagcaaaagaacagagtcctcagtaaggctgggagggagaccaaatttggatatttccagcaaggaagaggaaaggatgggacaatgaagtctaagaaagaccagagaacgtgtcagaaaggattgagctaagtgggagggttcagaaaaaaagatggggagggaaaaagggaaggagccaatcaggagggtcaagggtcaaactggacagcatcatgtcattaccagtacccctaggaagagggaaccaatcagaaaccttggaggcaaaggcaaggtgggtagaataaggcaatggggcaaaataagataaaacagggcgggccagagaattagagccaatcaggaagaaagggaatcaggaagaaagaattcagagttccaaagagccaaaagaatagggcaaacccagagggaaagaattggggtgggttggggagaggcggaaaagcctggaagagaaggtgggatttgggggctgatggtaacagggccaattggagcgaaaggggaggggcgaggcaggggcggacgaatccggcgagaaatgaagcagcgaccagcagcctcaaaggcaaccaatcagaggagacacagcaaggggcgggccacggcacgggccacggccaattaggaggggcggaactttcaacagccaatcagctgcctcggggggagggggagggccagcccaaagcggggcgggatgggggccgtacctgccgggtggtggttggtggcatagctttgcagtgggtggggggccgcataggcctggcggtgtaagatgtccgtctcggggtgcgaggtcctggagctgccataaaccaagctggggggaaaggggagacgtcagggggttcttccaagctgccttctgagaaggaagctcagaaaaccccccggggagttggggggacccttccagctgaccggggtggggggtgttaagctaaggaaccgtaggccctaaaggggagaacacaagggaatcggggtgctcaactaaagagccacagaaatggcccccactccagagcccgaataaagagagcccggatagtctcacgtttacaaacaggcatgctcagagacgagactaacacacagaagagggtccaaggcagagcaagcgtcttgatttgcaaatgagagccctcccccgtcgaccccacaaacc

SEQ ID NO: 37466 - DNA, 844 bp, Artificial sequence
  DNA replication origin
gagggctgggcgcctgcaagaggtgctggataaggaactcctcatcctctgtgcgctccgcaggaggcccacctgggcccgccagcagctccgagccatcccccttgcccttgtagccacctgctccggctgcatagctgccagctcccggaggtgccaggaaaggcgctgaggccaagactgagctcaggtatttgccaggggctcctggagagccgactccaggtggacggccggtggcaggcggtgactggagcggacgaatgatgtgagatgggctggcctcaccgccgcctcccagggagctgggtccccagccacccccatggcccgagagcgctggggaatggccggtactgtagctgagcgaggggctggctgtgggcagcccctgggagtgggcggctggccctgggtatggctcgccctgcaccccatacagctgcccctgcagctggtccggggagtagctctgacatgtggccaggccaggaggaggggggccgctggggggctgtggggggccccctgagtagctgggggctttgctcaagtcctgtgcctgcccccctccaaacccttgcccgtaggcctggggtcccagaagcccttgaggctgaccgggggaataagcctggccccctgcccctccagccccagaggccttcccagtggcataggcggctgctggcccacccaggctctgacatttgggggtggcggtcgaacggggtggggggggcctggtggcacccccggcagctgctccataaccacctttgcccgtcttgtacccaggcgactgaatgatggggcggtaacctccaccaccacccccagcccc

SEQ ID NO: 37467 - DNA, 1028 bp, Artificial sequence
  DNA replication origin
ccggctcccgacgcccggccaggacagtagggcccatagggatcataagcaggggggccggggggtggcccagcgccagccttggggtccccctcgtcctcaggtggcccggccttgccgtagtcgtccgcggcccctccaccgaacatctcctccatggtggggaagaagctgcgctcctcgtcttggagcaaggagtcagggaagcagatggaggtgagcggcacgaaacgcggcgccttggtgccttgcgggctggggctgcggtaggcgcctgcgggatccttgccctccgagtttggtgggcctacgccagtatccccaggcgccgggggcagcggctccagagccccgagcaattcctgcatggcgcctggcggatccaggctctcctcgggtcgcaggcgggggctgggggccgcgggctccaggccatggctgcggaggtgggcctcgagctgcaggggcatgggtggtggaggcgggggtggcggtggaggtggctggggtgccccatcgcgggtggctggctcaaggaggtggacgccgactttggaggcgctgggagagggactgggggcatggctgaggaccgaggggagcagctgggggggaggcggaggcagcaccagtgggaggtcagggcccccggcctccagaaggaggccatggggagtgggctgggtagactgggccgtgggaggtgggggcggagggctcttttgcaagaaggcccccagctccttggcgcctgccccgtagtggacaacagaggtggccagcccctcgggggtctcgccaccccgctctggccctttcttcttctccttcagcctccccaggcccagctccagtgccgcagtggcaccctcatccaggctggcactggtgcggatgacactctgcaggtggtacctctgggggtcttccttggccaactcgtagggtgtacccggtggtcccccggccccgccactccccccaagtcccttagaggcatctgctgccccgtcctcgcccaccaagcc

SEQ ID NO: 37468 - DNA, 712 bp, Artificial sequence
  DNA replication origin
aaaactagccgggcgtggtggcgggcaactgtagtcccagctactcgggaggctgaggcaggagaatggcgtgaacccgggaggcggagcttgcagtgaaccgagatcgtgccactgcactccagcctggacgacagagcgagactctgtctcaaaaaaaaaaaaaaaagactcaaacatcggacacagctcctcctcccctatcccctacaagaccccatttcccctcaccttaagtggcttcaggggctccaaccgggtgccccctgcctcctcagcctttcgaccccggcctcggccccggccccggggtttcttggcgccatcggtgggcgtggaggccgaggcgggccccgcagtggtcgggacctccagggggcggatccggggcctcccccgtggccggggtggcccatcacgtttcgccttcgtgggcttgcggccacggcgccgggggccatcgggtcctgggttgggtgggcagaagtcgatgtcccccagtggcgagagggccggacgggagcggcagctggagaccaggtcaggcaagcgccgggggttgaggcggatgtcggcgggaacatcggccttgtcctcgtccgcctcgaactcgtactcctgggcgtacagcttcttgggggtctggaagggtgggtcgcggcgccgcagcaggtggaaggaggatgtcttgagcagcttctttggcttggta

SEQ ID NO: 37469 - DNA, 1337 bp, Artificial sequence
  DNA replication origin
ataaacacgcaagcttacaccatgtatgtgaatggtgtctcttaaacagtgcgtaacctgcacaactgttacctagtgatcataataacctttaagctctactcccagaccacctgcccagagctcaccgggagtgccattgctgttggcactggggagccccggaagagggggtggccctggaactgcagccgcgggggccaagggcggcccatctggggtggaagtgtcttttggcccagcaaggggtgggtcatcgagggcagagatggcggaggagatgctctcctgcaggtctcggttcttggcgacagagtcttcctcatccgaggagaaggagggcagcgtctcgaggttccgcttcagctcctcatcaagccgcttgcagggtgaagggcagccaagccccagaccctcactctctgcagcctccagggcgcccccaagcccaaaggctccggaaggtgggggatgtggcacagcaggggtggcagggggctggggctgcaggcctcgggctggcacagagggtggcacactcttgggagggctgagcggaggcgtcaggcccgcctggtagagtggtgggtggcgcttgcctgacttgaggaagtccaagaaggaggccatgaaacccgacttcatctccggctgcttctcctccacctccttaatcttggcctcgatcttctcccgagtcaggctcgagtccaggctgttgtggtcagtgcctgatatggcatcacccgatgaggttcccagaccctcgccagccttgggcacagacagcttgatctagacatgggagtggcgggccgtgagggcccagtagcctgggcccccagtcccatcctccctcagcccccaaaaatccaaatttacaggtgctcagcctgtgaatttatagaattcaaacctgcagaccccttgtcttagattctaggaggacaagactggagttcctccctcagaagaccaggaacttggactcactgagcctcttcacttacagcccagttcaggtccctagacccgcttcccatgagacccaggaatgtaggatccctgaatgcccatcctttgggatatagaaactaaaagcaagcagaccgggtgaggtggctcgtgcctgtaatcccagcaccttgggagactgaggcaggcaaatcacttgaggtcaggagtttcaaaccagcgtaagctccaacctcctgcctctctccctaaacccagaatttcctttatctcttgagacagggtctcactctgtggcccaggccacagtgatgcaatcatagctccctgcagccttgaactcctgggctcaagagatcctc

SEQ ID NO: 37470 - DNA, 1686 bp, Artificial sequence
  DNA replication origin
tctaaggggatggtgagggaagccagtgggccagggcgtaggggcagtaggtctaggaatgagggctgaccctgctggcctcaccacacccctcctcctcagctggcgttgcagacggggcgtgaacccccacccatctggcgagtccagaaggcccttctgcagaaattcactccggagatcaaggacggccagaggcagttttgtgccaccagtaatgtaagcctgcaaaggggaccaaggacttgggggccccggggcgtggtatctaggagctggggttccccttagtgtggctgtgactcactccacagtgtatctggaagggggccccctgctgccggcaggctccaagcagctgccatggtggcccagggcacgggggtgttggccatctggctgggcagtgtgaagaatttcctcatgtgcctctttctccccatagtatttggggtattttggggatgcaaaaaatcggtaccagcgcctctatgtaaagttcctggaaaatgtcaataagaaggactacgtgagggtctgtgctcggaaaccctggcatcggcccccagtgccagtcaggtaccaaccatgggggacacaggggcaggtagtatgtagcgccgacaggcatggggatgcggcatgcaagagagaaggctggagagtggggggtggggacagagagaggagacagagcccagagagagagggggacagagacccggagagaaatagggacagagacccagagaaggggggatagagacccagagacaggaggggaacagagacccagaggtggggggacagagacccagagatgggagaacagagaaccagacgcatgagggagacggagactcagaaggagacagagacccagagaaaaagagggacagagatgggggaggacaaagatccagagacagggagacagagacccagagacgggaggggacagagactcacagaaggctacagagacctggggtggacagagacccagaaagagggggatagagacccagagagggaggggaatagagacccagagagggagggggtcagagacccagagagggagggggtcagagacccagagagggagggggtcagagtcccagagagggagggggtcagagtcccagagagggagggggtcagagtcccagagagggaggggaacagagaccagagagaggaggggacagtatgagagaagctattcctgtgcctagggcactgagcagggaccctgaggagaatttggattattgggggctgctgactacagtcccttctctgttcccttctagacgctctgggcaggccaagaaccccgtatctgctgggggtagctctgcacctccccctaaggccccagcaccacctcccaagcctgagacccctgaaaagacgacatctgagaagcccccagagcagactcctgagacggccatgcctgagccccctgcccccgagaagccctccctcctgcggcctgttgagaaggaaaaggagaaggagaaggtgacacgtggagagcggccattgcggggtgagcgggccaccagcggacggcagacacggccagagcggagtctcgccacgggacaacctgccacatcccggctgcccaaagcccggcctaccaaggtgaaggctgaaccgccccctaagaagagg

SEQ ID NO: 37471 - DNA, 820 bp, Artificial sequence
  DNA replication origin
ggctgatggaccaggtaggaacgaatgaaggtggggcagggctggaagcagaggacgaggctgagctgggcaggcctgggaaagggtggaggggatgggggcggacagggctgggagctgcccagctgtgggggcgacaggtagaaaaagaaaagaggaaggccgggtgcagtggctcatgcctgtgatcccagcactttgtgagactgaggcgagaggatcgcctgaggtcaggagttcgagaccatcctgggccaacatggtgaaacctcatctctactaaaaatacacaaattagccgggcatggtggcacacatctatagtcccagctacttgggaggctgaagaaggaggatcacttgaacccaggaggtggaggtttcagtgaactgaaattacaccactttgcacttcaacctgggtgacagagtgaggctctgtctcaaaaaaaaaagaaaagaaaaggaaaagaggtgaggatggctcctgggaagtctggtcaggtgactgtgtagccagaggtccggtccctaagatggggaagccaggacacagagcttgatgggatttgggggtgttggggaaggtctgtggggtggccaggggcagaaacagggcttgggctcactggaaaggggtcatgaccccagcaacaaggcaaacagccggtcaacaagagagaaggaaactgggaccctggacaaccctgaaaaagagccattcattcattcgttcgttcattcatttattgagaccgagtttccctctgttgcccaggctggaatgcaatggcgcaatctcagctcactgcaacctctg

SEQ ID NO: 37472 - DNA, 1333 bp, Artificial sequence
  DNA replication origin
cctgggtctgagggaggaggtccctgggtcctagggagaagaggctgggggcctggactcctgggtctgagggagaagaggctgggggcctggactcctgggtctgagggaggaagggctgggggcctggactcctgggtctgagggaggaggggctgggggcctggactcctgggtttgagggaggaggcgctgggggcctagactcctggttctgagggaggagaggctggacctggactcccaggtctgaggaaggagggactggactcccgggtctgaggaaggagggactggggcctggactcctgggtctgagggaggagggactggggcctggactcctgggtctgagggaggaggggctggggtctggactcctgggtctgagggaggaggggctggggcctggactcctgggtctgagggaggagggactggggcctggactcctgggtctgagggaggaggggctgggggtcgagggcctgggggtctggactcctgggtctgagggaggaggggctggggcctggactcctgggtctgagggaggaggggctgggggtctggactcttgggtcagagagaggaggggctgggggtctggactcctgggtctgagggaggagcggctgggggtctggactcctgggtctgagggaggagcggctgggggtctggactcctgggtctgagggaggagggagctggggcctggactcctgggtccgaaggaggagggggctggggcctgtacttttgtctctgagtgggaaggggatttggggacccagactccatgaccccaccttggccccagtgctttgtgaggctgtggccttcctgataccatgtcctcgtccatcagacgagctgtacctgccccccatgcggaagatagacggcctgctgaatgagcacaagaagaaagtcctgaagcggctgtcgctaagcccagccctgcaggtgcctgggggtctgggcagggggtgtctggggcccagggtccacatggagaagacatgtacgtgtcggccgctgttggcgggggtgatccttggaaggagatcgtccttctgggctcagatgggagaaaagttgagggcaggactgtcaggagatctctgggttctcaacagccatgaagcccatgtggggaggagctgtgggccttggggcagcagaggggtggttgtgaaaggctgggctgttgtttcggagaacaagtgtgcagccaaacatagactaggcctgcacccaaagcgggcactggaccgatggcttctttgtgagtccaatgcaggctattaggatcccaggcttcagtgtt

SEQ ID NO: 37473 - DNA, 1422 bp, Artificial sequence
  DNA replication origin
tattagtcgggagttagaattctgggatagatggctgggcgcggaggctcatgttggtaatcccagcactctaggaggctaagggaggtggatcacgaggtcaggagaccaataacaacccatcctggctaacatggtgaaaccccgtctctactaaaaatacacaaaaaattagccgggtgtggtggtgggtgcctgtagtcccagctactcgcgaggctgaggcagaataatggtgtgaacccgggaggcggagcttgcagtgagccaaggtcgcgccactgcactccagcctgggcgacagagcgagactttgtcttaaaaaaaaaaaaaaaagaattctggggtagatgggatggttaggatagggctgagaattctgggatagatggttaggatggggccaataattctgggatagatggttaggatggggccgagaattctggggtaggtggttaggatggggccgagaattctggggtagatggttaggatggggctgggaattctgggatagctggttaggatggggctgggaattctggggtaggtggttaggatggggctgggaattctgggatagctggttaggatggggctgggaattctggggtaggtggttaggatggggctgggaattctggggtgggtggttaggatggggccaggaattctggggtgggtggttaggatgagaccgagaattctggggtaggtggttaggatgggactgagaattctgaggtaggtggttaggatggggccaagaattctggggtaggtggttaggatgggaccgagaattctggggtaggtggttaggatgggaccgagaattctggggtaggtggttacgatggggctgagaattctgggataggataggtggttaggatgagactgagaattctggggtaggtggttaggatggggccgagcattcagggataggtggttaggatggggctgagaattctggggtaggtggttaggatggtgctgagaattctggggtaggtggttaggatggtgctgagaattctgggataggtggttaggatggggctgagaattctgggatagatagttaggatggggctgagaattctggggtaggtggttaggatggtgctgaaaattttggggtaggtggttaggatggggctgggaattctggggtaggtggttaggatggggctgagaattctgggatagatggttaggatggggctgggaattctgggatagatggttaggatggggctgggaattctggggtagatggttaggatggggctgggaattctggggtagaattttgggtgacattgagaatctgagccaggccagaaggcacagtggaagcatcactggtcaggcccagcctcctctgtcctttgaggagactctagttgtctc

SEQ ID NO: 37474 - DNA, 925 bp, Artificial sequence
  DNA replication origin
ggtcggggcaaggggagagggaaaccgttactaaatagacatttatacatatatataaataatttctctgtacaccgaacagtgggaggaatggggagggagtggagggggcttgggagagggggggagtcggactttgaaccctgccctggagggggcagcacagacacaccctgacccatgaccccctttccccggcgatggagcccaggtgttagctcctgaggacacggttctgtcccaattctcggttcatggaggaggcgcccccctcacaagctggggcggggtcacccgcagcggctgtgggcctgtgcttgggccagcaggtcactgaaggagtcaaagagctgttccagccacggctggttccgcatgcactgctggaccacctcctcctggcccaggtcctcggcgccgccctcgatggccagggtctgcaggggtcaaacatggcactggggagggtggcacaccggcctctggggagggaaggggctggggcatggggcctggggtgtcagatgtcagtgtcccagggagaccagggctgggggctgcattcttaagtccaagacagaaggacctgaactcttgggtctgaggcaggatggggctgggcttggaccctcagatcccaagaggaagtcagaaaggttggaatcccagggcgatgggtgctgtgggtggggctcacctggtcccggcagcgcaggaaggtgtggtatttatagtggtggagcgaatggtagagtgtatagtatcccgacttttccagctcaaccttgaactcctgggtaggagtggagatgcctcagcccctccagcccggcacttggcagcccctctcctcccttcccacataccgccagcactccccactcccagccccagccccagtgcccacctgggctctgaccacgct

SEQ ID NO: 37475 - DNA, 1423 bp, Artificial sequence
  DNA replication origin
ttggcagaaggcacacagtggcagtagcccagaagaggccaggaagtaagggtgggtatgtgatgtgtcctgggagacccagatgaggaaattgaggctcagtgagggcctcaggtcacacagcaaggtgcgaaggcagctagtcccgagagcttgtggtggttgcttctctcttgcctgggctacaggaggacgcaggggcagcccccgcccttcttcctgggggcactgggagggctcggtgggagctcttgttcctggtatttcctgtgggaaaacgccagtgagtttggagtggaagggctggggacaaggacgacaggaaggggacttggctcaccggacagcccgcaccagctgctcaaaagcctcgtccacgttgagacgcagtttggccgaggcctcaaagtaggccacgtggtgggaggcgccgaaggcagaggcttctgatcgggggacctgggggtaggggggacacgggggagtcaggtccctgcactcagggtgaccgcagccagagagacagacaggcaggctggatactctaggagaggtgacccactgtgagaactcaaagaggaagagctcctgagagattatggagggagatgccgcaggggcttggtgtcttctaagtaagggatgggggcaggcttcgtgggcacttgccctgctatgccttagataaccaggagtgggcaggcagggaagtcagggtgttcccggcagaggcaggcggaaccccaaagcctggaaatccccagagcctttgccagatggatgagttctgtgtggaaatcgttgtgggggaagtgatgggagcagggaaaggaggggcgcaactgtgcggggcatctggcacctggggaggaactggggagccatggagggggccggccatgagcaggggaggtgctggggctggtgggaggttggctggaagggaggaatgcgaggaaggggcaaagagagctggcggacggggggtgaatgtcctttgttccgtccagcagcctctcctgaggacacttgcatgctaggccctctgctcggtgatgccggggaccctgaaggtccagtttgggggtaacccatctaggtgagctgtgtgacagtggcagtcgcagcactgcaggaacagaggaggatgctgatgggggacaggtgtgctggaaggagcctcccagactgagatggggtccccagaaagaggggtgtcccgaacctggcgctgtgactccagatctgccttgttcccgaccaacacaacggggaagtcgtcgcggtccttgacccgcagaatctgcgtgaagagcttgcccacctcgttgaaactgcgagtgaagccggaggcatgaggtccagccagctgcagagcccaggtcctccccacacccacccactgctccgccaccagcaaccc

SEQ ID NO: 37476 - DNA, 760 bp, Artificial sequence
  DNA replication origin
cagagctggccaaaggcttggctggcagcgggcaggacccaggcaggaagggaggggctggggcccgagggtggggcagcctctccgcagccggattggaaccgggaccttcccctgggaggagacgctggaggccgcctgagcaggagaaggagacgggggaggaggagacgggggaggaggaagagagggaggaagcagaagaggagggagagatataaacaggcagtctggacaacaacgcctccgataactgatacattcaatatttaatggggttttgctccgaatcttgccagtgctggatggagtgtagtgctgttcttagcctcctttttcaaatgaggaaactgaggctcagagaggggaagtgatttgttcagtgtcacacagctaggatgtaatcacgatgtgggacatgtaccttataccagaaagagaggaccaggagtgactcagagagaagaagactggtaggaggggtggggggcagggaaaggggggcaggggagcagctacccaaagagaaggggacagagacccagagagagagagtaatagagactcagagagacagaggggacagagacccagagaaaagggggcagagacccagcaacaaggacagacatctggagagagagagaaggacagggcagggcgcagtggctcacatctgtaatcccagcactttgggagacccaggcgggcggatcacctgaggtcaggagttcgagaccagcctgaccaacacagcctg

SEQ ID NO: 37477 - DNA, 1313 bp, Artificial sequence
  DNA replication origin
gaggcgttgttgtccagactgcctgtttatatctctccctcctcttctgcttcctccctctcttcctcctcccccgtctcctcctcccccgtctccttctcctgctcaggcggcctccagcgtctcctcccaggggaaggtcccggttccaatccggctgcggagaggctgccccaccctcgggccccagcccctcccttcctgcctgggtcctgcccgctgccagccaagcctttggccagctctgggactgcctctgggtgcaaggggcccagggctggggcctttctctacacaagcagggcttcctcccaggcccttgaaggggtctcttggtgggggtgaggggggtgtcctggggccccggggcctctgcggtagcatgtcaggccaagacacttttctaggatttctttgaagctgggaggacctccctcaggaatggggaggaggtttcctgggctggggtggaatttcaggaaagggggtgatgtggaggctaggggtctgaaggctgcatctgtcggttagaggggtgcttggtgaggggcttgtcctggagggaggctgtaaggatcaagccctgggagggattgtggctctgggggtagttaggggcgtgacctcagagcacagcgtgagaagctcagggctgagaactgggagccagcccggaggtggctcaggggttttgggaggttatagtatatacagtcttagaaacattgagttcatttatggggtcagagaaactcccaaggaatagatctttctgggggtgccaagaatctgggggcttcttccatggagatgatttgagagctattcagggtttctgagaggggctcagggagttgcagcggagaaagcatgggatggaggaggggctggttttccttgggggtggggtgggagagtggaggtttgggcctccgggaatgggggattgtcaggacttggggtcttggagatttctggaatggccaaggggcaggatgtctttttaaatctcgggtcggagagcaggactctcttaggactgggtagtcccagaagagtctcagggccagggtctgggtagaatttctagattctgggggcagtcatggaaggggctaagaatcaaacgtggggccgggcacggtggctcatgcctgtaatcccagcactttgggagtccaaggcaggccgatcacgaggtcaggagttcgagaccagtccaatatggtgaaaccccgtctctactaaaaaatacaaaaattagccaggcatggtggcactcgcctgtagtctcagctacttgggaggctgag

SEQ ID NO: 37478 - DNA, 1026 bp, Artificial sequence
  DNA replication origin
caggacttggggtcttggagatttctggaatggccaaggggcaggatgtctttttaaatctcgggtcggagagcaggactctcttaggactgggtagtcccagaagagtctcagggccagggtctgggtagaatttctagattctgggggcagtcatggaaggggctaagaatcaaacgtggggccgggcacggtggctcatgcctgtaatcccagcactttgggagtccaaggcaggccgatcacgaggtcaggagttcgagaccagtccaatatggtgaaaccccgtctctactaaaaaatacaaaaattagccaggcatggtggcactcgcctgtagtctcagctacttgggaggctgaggcaggagaattgcttgaatccaggaggcagaggttgcagtgagccaacatcgcaccactgcactccaccgcactccagcctgggtgacagagtgagtgagactctgtctcaaaaaaaaaaaaaaagaaaaaaaagaatcgaacgtggtggaatctcaaaggtgctgggcactggcattctcccaggaaggctctcaatggcttagaggggaagttggggactgggatttgggggagatagggctcagggtggtggaaggtggcaccaagggcgtggtgggggtcctgggagtgcttagggtccgaatggggtgagtattttgtatttagcatgctcccaggaggtgctcaaagccaggtcagcaggtaagcggggtcttaggcactgggagagggaatagtgggtctcgggatgcgagtgcagaaggaagggtcccccgtgcaggggatggaggctctccaagagtttaggttacaatctgtggggatcttttaagattagagggccttataggagggtctcagtgatgggtcaagggggaaaaggggtctcggggatccccccaagggctcagttctgggtcccgggggacaccctcccgggtgagggcccactacctggatgaactggatggtcagcgcgctcttgcccacgccgccgccg

SEQ ID NO: 37479 - DNA, 934 bp, Artificial sequence
  DNA replication origin
gtctcgggatgcgagtgcagaaggaagggtcccccgtgcaggggatggaggctctccaagagtttaggttacaatctgtggggatcttttaagattagagggccttataggagggtctcagtgatgggtcaagggggaaaaggggtctcggggatccccccaagggctcagttctgggtcccgggggacaccctcccgggtgagggcccactacctggatgaactggatggtcagcgcgctcttgcccacgccgccgccgcccacgaccaccagcttgtgtgtctcgctgggcggggggtccccgggcccaggtcccccgccccggggccgcccccgccctgtcccggacgccgccccgctgctcatgtcgccaccgctgctgctgccttcgctaccgcctgcgggggagccgggcgggacccgggggggcgggctacgctaatgaggctactgcataatcatgagctctggcaaggagggctcgcgtctccggacacttaaggagggggacgggccaaagaaagggaggagctatgttaataagggaaagggaacggcgttcgctgcgaaggggaattccgaatgaggcggggctatgctaatgagagacctgtgctttgccctgagcggcgccacgcgctctcagcgggagggcggtctgtgggcgtggctatgctaataagaatttattctttcagcagacggggcggaaagttcctcaggggaggggctatgcaaataaggacccctgtgacactgctgcttggggcatcgtctccgaggccttagtatggtaggcggagctcgtcgactcgcgcgcgcggccgtatatagggcgctccgaggaagcagcaggttttgaggagtagctccacctccctcctgggatcctagccaagctttcgaccccggcgtctgggttagaagctagag

SEQ ID NO: 37480 - DNA, 1671 bp, Artificial sequence
  DNA replication origin
gccaggtttcgccgcagctgccgggcccgagaccgccccgagaagccctctaggacccgtggcttgtggggaggaccccgggacaactagcgacccaactccgccccgcccaccccaataggcccgagccccgcggcccggactgccgccgccatcttaccccgccgctcgggctgcggctccggccccggcgcggggcggggcgggctggggcggggttcgtgagcaaaggaggagagaggcggagctaaagcgccgccgagcttgccgggatttcaagtaccgagcacggcgacgtgaaggccggcgggaaggcaaccgcactcggtttcccagaagccaatgggacacatggggcggggtccgcgcgatgcacgccgggaggcgtagtccgcgcaccgcctctgtcgcgcggggacagctaatggggtgagaggtgaagtgggcggggccgcggtagcccgcgatgacgccccacagtgccctgcgcgcgcgcggaaagggtggcggaacaggaggtgacgtaagaggcgccaggcagaacagacgcaagggaattgtagtccggcggagtgagcacgacttgctggatgttgtgctgcccacattctggggctctcagaatccagatcctctaggcccccctaaatttagaaccagacgggatgcagtggcgcacaccgtagtcccactcgggagactgaggcggaaggatggcttgagcctagaagttagaagccagcctaggcaatatagggagaccccgcctctaaaaaaataaaaataggccaggcgcggtggctcacgtctgtaatcccagcactttgggaggccgaagcaggcggatcatctgatatcaggagttcaagaccagcctgaccaacatggtgaaacccagtctctactaaaaatacaaaaattagcctggcgtggtggctaacgcctgtaatcccagctactcgggaggctgaggtaggagaatcgcttgaacccgggaagcggaggttgcagtgggccaagatcgcgccattgcactccagcatgggctacaagacggaaactccgtctcaaaaataaacaaataaaaataaacttagaacctagaagcccgaccccatagccgcctcgttcagtacagagaagtctgaattccgaatcctctcactcagagcagtgtccagactcctatttccctcctccctccgactcaggagtctgattcttccttcctcggatccaagagtcggtctcccagactagtcctggtctcaagctctcacatacgaattcgggtccccccaagccagtgccctcgctcggatccagaatcctgggtccccagcctctccaattcctggacctaagagtccaggcccccggctccctcctttaccgaacctagtacgaaggaacctgtctaccttcctccctgacaccctcctccccaggacccaggagtccacatctccagccccattttctcctaaggacccaggagtctgggccctctgcttccttctccttcaagacccagaaatcctggccccaggctcttcatgacccaggcatccctacttgggcgagctggctcatggattaggaatgcagtgatctcacggcccctccctgccccgttaccctgctgtccccctctagggccccactctcctc

SEQ ID NO: 37481 - DNA, 1160 bp, Artificial sequence
  DNA replication origin
cacttcacctctcaccccattagctgtccccgcgcgacagaggcggtgcgcggactacgcctcccggcgtgcatcgcgcggaccccgccccatgtgtcccattggcttctgggaaaccgagtgcggttgccttcccgccggccttcacgtcgccgtgctcggtacttgaaatcccggcaagctcggcggcgctttagctccgcctctctcctcctttgctcacgaaccccgccccagcccgccccgccccgcgccggggccggagccgcagcccgagcggcggggtaagatggcggcggcagtccgggccgcggggctcgggcctattggggtgggcggggcggagttgggtcgctagttgtcccggggtcctccccacaagccacgggtcctagagggcttctcggggcggtctcgggcccggcagctgcggcgaaacctggcgccgagaggggggccttctcagggccccgggacgcatccgtgggttcctgggggcgtctatggggcgtctccgagaggacttggggcgtctctgggcctagaccgagcctaaggcctgccctccatcacacagctggcctggatcgtgtctgtagacactgtagattgtctttttgggctgaccggaggctagggtctggttagagggttctggggccatcttgagatcttgagatatgtcccaggggtgaaggagggtctgcaagacctgaagagtatcttcagagccatctagaggcctggggtatgtcttttagggctggaaagtgtctgcatgggctggcctgaggatgcaactggtctgcataagtctggggccatttatcaggcctagaaggagtgttcaagggctaagaagtcatttagggccccctagggggttgggttatgcccaccagggaagggcgccaaatattgagatgtactgagggtctggggtctccaaggtatgggtagtgtctaataatgggtgacaggaggctgggggcagttagaaggacctggaaccatctagatggctttaatgtgactgcaggaatgcagttttgatgcctggagcaaattcgaatgcctttggggtcagagcagcttgtggcgaataataatacggaaagagaatgaggaaattttgcccagcttagatatacttgcccttc

SEQ ID NO: 37482 - DNA, 841 bp, Artificial sequence
  DNA replication origin
tgcagcaggcctacagcacgggtgcagcggcgaggggctgcgctgggcttccttggggctggcatgcaggagggtgtgagtggggttgggggaggcaggagaggtctgtggggactggatcccagcaaggcctgaatgccaggttgaggtgtctgagggcagacaggaggacgaatggctgagcgtcgcagcctctgaagtgggtgctgggaagtcctcctgggaggtggcgcatggaggcctggagagcatgcgggaggctggttccgctgtcaggaactagatcaagctcctctttcctctaccccgcaagtctctgcagcaagtcccctgtgtccaatcccccatgcaaatctctcaccagatggctctcggtgtcatggccttcgatggcggcgctgccggagtccacggtcagagccccgttcccaggaatcagggggcactgacacggctactgtgagtaagaagagggggctgggggcctggctcacgggtatcagggaggaagggatgggggcctgagtctgggggaatggggtttggggacctggactcctggctctgcgatgctgaccaggggcaatgttggagagtctgggggcctgatctgtgggcctgagctttgagtgttgatggcagtcaggctataggaattagatcctcagttttcttggggatcttagatgtctgggttcctgagaggttagggagtggggaagcaggatttgccagtcttcatgtgaccagggacggcgtagagcctctctggcctcttccaggtgttggacatggccacggacagcttcctcgcagggctggtgagtgtcctggatccccc

SEQ ID NO: 37483 - DNA, 2304 bp, Artificial sequence
  DNA replication origin
ctgcctcggtccccaccacgaagacccgccggcgcatggctccatcagcccgggtggagtccacctggggcggcgttccaggggcgggagtcggctgtgtgggctgcgcgtccgggcgggggctctcgtcacctgggaagtcctggctcaggctgttgtcatcgtagatgcccgccagggtctccgagatgcggctgatgctctgggacaggccttcctcctcctcctcgtcttcctcttcctcttcttcttcctcttcctcctcctcttcctcctcaggtgagggggtccccgctgatgagctggggttggagccggtgggctcaaaagggtcgtacttttgctccggagcaggcggtggagagtaggcctcgtcggtggggtggaaggggtcatagatatcgaatcggggggcaggtggggctgggggtgcagggggcggtgggggtgggggaggggaaggggaggaagatgagggagaaggggaaggggaggaggatgcagaggagggggcagggggtggggcagggcccccgtctcccgtgcccaaggtgaggtgacgggcacaggtgggcctagaggagttcgactgtggagaaactgcaaaggaacagggagagagaggcggtcagggcctttgcctccctcctggtgcctgcttgctggcccagccgtggacactccctgggccaccaggtcctgcccaggaagccccaagtgcttcacaggagccagccgtaggatgctcccaacaactgcacaccatggttcttaacccaaaggtcacaggaggaaactgaggcagagggctgcagtatcctccccaagggcacacagagagaaggcagcagtcagggtgtaaactcagtcagtgcggccccgaacctgcactcccatatcctgagacagcactggcctgaccctgggcaatgtaccctggccttgaaactaggaactatcttgaccagtgccggcgacccatcccaggaggaggtggaggctgcagtgagctatgaccacaacaccacactccatcctggggggagaagaaacaggaaaacaggctgcagggggagagctgggattcaaacctaagtccccctccaagacaaaaacaagctctggcctgctgcgccagctgcctctcgtgggagtttctcccgtttggtagagggtgagattccagtgcagagccaggaaatggcagagctggggagcccaggaaggctggtcttcaccccaagctcttcactctgtgctgagtccccacccaaggaattacatctgctcaggactcaaagacaccactgaccagtgacagtggcaatgacaaaggtttgcctcttcctccaaaccaggcatggtgcttcgtatgtcacctcattcgcccccaaagagcccgctgcactgtgctaagtactacagtcatgatgccacagtcacacgatggagatggctgacagaggccacaccacaggcaaggatgccagcagagtggtgtgaggacagtgccagggaaggagaggggtcaagagggcagcaccagagccaccccttgatccaggggctggccctcaccagccacatgaccacaggcaagtggatcaatgtgtcttacttcagtttcctcatctataaaatgggggtatgttcattcatccaacaccctttatggccgggtggggtggctcatgcctgtaatcccagaactttgggaggccgaggtggatggatcacctgaggttgggagttcgagaccagcctgaccaacatggagaaagcccatctctactaaaaataccaaattagccgggtgtggtggcacatgcctgtaatcccaactactcgggaggctgaggcagaagaatcactcgaaaccaggaggcagaggttgcagtgagccgagatcgtaccactgcactccaacctgggcaacaagaccaaaacttcatctcaaaaacaaacaaaaaaaatatcaatgagtggagtgtacggtccctcagctgccaagggcttaggggaagatgaaacaggggtgatgatgacagcatttacttcccaggataagcggaggaatagatgagtgcgcagaaagagccaggctgcacctgctgctgggtgaggacagtctgagcctcagcttttcctagcctcattgctattcccagcaccttaagcacaaaatactctccacagactagagcgctctgcaaacacgcgagatccacagctttatataaatttctgtatgggacaggattatgggtgaactttcttttctttttaaagctacctggaataagc

SEQ ID NO: 37484 - DNA, 734 bp, Artificial sequence
  DNA replication origin
gctcccgccgttgggtcaggatcttgcggcgcaggtccaggccgccccagcgcgagtcggcggcgggcggcgcgggagccggctcccctaggtccacctgcagggcgccctcgccgtccgactccgcatgcagggacaagaagtcgtccccctcgggggcccgcggagcgggaggctgaggaaggggctgggccgtgggggtggccgaggcggccggtgtaggccgggcggcccggccgccggggcggaagagggacagcgccagcctgggctcctcctccggctggacgatctccccttcctcgatctccgagtcgccgggcggcagcaggggcggcgggagggcggctccaccagcggtcaccacctccaccgagaccttgccttcccgacaagcctctgcctcggtccccaccacgaagacccgccggcgcatggctccatcagcccgggtggagtccacctggggcggcgttccaggggcgggagtcggctgtgtgggctgcgcgtccgggcgggggctctcgtcacctgggaagtcctggctcaggctgttgtcatcgtagatgcccgccagggtctccgagatgcggctgatgctctgggacaggccttcctcctcctcctcgtcttcctcttcctcttcttcttcctcttcctcctcctcttcctcctcaggtgagggggtccccgctgatgagctggggttggagccggtgggctcaaaagggtcg

SEQ ID NO: 37485 - DNA, 2559 bp, Artificial sequence
  DNA replication origin
gactcgcgctggggcggcctggacctgcgccgcaagatcctgacccaacggcgggagcgctaccgccagcgctcgccctccccggcgcccgcgcccgccccggccgccgctgctggtccgcccacgcgcaagaagtccaggcgggaacgcaagcgcagcggcgaggccaaggaggccgcctcgtcctcgtcgggcacccagccagcgccgcccgccccggcctcgccctgggactccaagaagcaccgctcgcgggaccgcaagcccggctcccacgcctcgtcgtccgcccgccgccgctcccgctcccgctcccgctcccgctccacccgccgccgctcgcgcagcaccgaccgccgccgcgggggcagccgcaggtcgcggtcccgggagaagcggcgacggcggcggcgctccgcctccccgcccccggccacttcctcatcgtcgtcctcgaggcgcgagcggcaccgcgggaaacaccgggacggtggcggcagcaagaagaagaagaagcggtcgcggtcccggggtgagaagcggtctggggatggcagcgagaaggccccggcgcccgccccgccgccctctggctccacctcgtgtggtgaccgcgacagccgccgccggggggccgtgccaccctccatccaggacctcacggaccacgacctcttcgccatcaagcggaccatcacggtgggccggcttgacaagtccgacccccgaggaccctctcctgctccggcctcctcacctaagcgggaggtcctgtacgactccgagggactgagcggcgaggagcggggcggcaagagcagccagaaggatcggcgccgctcgggggccgcctcctcctcctcctcttcccgggagaaggggtctcgtcggaaggcgctggacgggggtgaccgggatcgggacagggacagagatagggacagggacaggtcatccaagaaggcccggccccccaaggagtcggcgccttcctcagggcccccgccaaagccaccagtcagcagcggctcaggctcttcatcctcgtcgtcctcctgttcttcccggaaggtgaagctgcagtccaaggtggcggtgctgatccgcgagggtgtcagcagcaccaccccggccaaggatgccgcgtcagccggcctgggctccattggcgtcaaattcagccgtgaccgcgagagtcgctcccccttcctcaaacctgacgagcgggcccccactgagatggccaaagcagctccgggcagcaccaagcccaaaaagaccaaggtcaaggccaaggcaggggccaagaaaaccaaggggaccaagggaaagaccaagccatccaagaccaggaaaaaggtccgcagtggaggtggcagcgggggcagtggtggccaggtgtcgctgaagaagtccaaggcggatagctgcagccaggcggcaggcaccaagggggcggaggagacttcctggtccggggaggagcgggcagccaaggttcctagcaccccgccccccaaggcagccccaccaccccctgccctcactccggactcgcagaccgtggacagcagctgcaagacacctgaggtctccttcctgcccgaggaggccactgaggaggctggggtccgaggtggggcggaggaggaggaggaggaagaagaagaggaggaggaagaggaagaggaggaggagcagcagcctgctaccaccacggccaccagcactgctgcagccgccccaagcactgcccccagcgcggggtccacagccggtgactcgggggcggaggacgggccagcttcccgtgtctcccagctgcccacgttgcccccgcccatgccctggaatctgccagctggtgtggactgcaccaccagcggcgtcctggcctgtgagtgtcccctgggggagggtggtgctggggcaggtgagacaggatggggactggagggtacagacttagaggcagtggggtgccctggcagggagaggtttatagggacatagactgggagggtgggggtgagtaaaggccagccaggctctaggtgcctgggtgtactgggagagaggggccggtgagagcaggtggtggccagcacagactggagtggtgggctgggttctgggattcccctagacggggagtaggagagagggaccagaaagaatggcttgagcagggcatcgtattccttacggatggcggttgcctctaccagactgcagaggtggggagagaggttgggactggccacagcgggtcaggaggcagaatctcactcctgccactgtctcatcactgcatgaccctggccaaccccgcacccacacacctggagtcccaagaacattcgtggtatgggctgttctctcattggccaaggcccccttttcccagttctgagcgtgaggctttgtggctgttctggggccaagggcaggagatgacagcaggtgtccaggtgaggttcaccagctcctgtcctgtcacctctcccatcttcatgttgtcacctctctgcctcctgcagtgactgcacttctcttcaa

SEQ ID NO: 37486 - DNA, 764 bp, Artificial sequence
  DNA replication origin
ttttcattcggaaaccaccctcccccactcacagagacggagacagcgcgagcaacagataatcaaggggtgggctgcagcgcggggcatctcttccagggtgtgtatatgtggtgtgtacgcacacagccccacacacgcacagacgcgattttcctttggacacgcctaacgcatttcctgctcacccattccagcaaagtggagttccttatggttccatgactttggtctctacggccctgtctccctgcctcagtctccctttctccttgggcccccgcgtctcagttcctgtccatattctctacagaactgtcagcaccgccccacctctccccaggccagctcaccttatctgtgtccccacggccctcagagctgctgctgccctctctcttgtcagacgtggcagccagcccggtgggggtggggggggtcgaaccgcagccccccagagggaggctgccaggaagcaggtagctggaggggccagggggcagacccaaagaggtgggcacaggagctggggtcatccccagacttgagggtggctttctgtggctgaggatctgtgggacgaggacagaggggtgatgagtaaagggaggtggaggggaagaggggacgtgcaccccactgttcccacgctgacttccccacagctgaggcaacaggctcctcttcaggccgataccttgccccagagctgccaggcccgcggttcctctcctaacccgaggcaatggacaaaagaaggggcg

SEQ ID NO: 37487 - DNA, 1086 bp, Artificial sequence
  DNA replication origin
aagccaacctggcgagccgagcgaaggcccaggagctgatccaggccaccaaccaggtgggctcccctgggggagagtccctgccgccccttcttttgtccattgcctcgggttaggagaggaaccgcgggcctggcagctctggggcaaggtatcggcctgaagaggagcctgttgcctcagctgtggggaagtcagcgtgggaacagtggggtgcacgtcccctcttcccctccacctccctttactcatcacccctctgtcctcgtcccacagatcctcagccacagaaagccaccctcaagtctggggatgaccccagctcctgtgcccacctctttgggtctgccccctggcccctccagctacctgcttcctggcagcctccctctggggggctgcggttcgaccccccccacccccaccgggctggctgccacgtctgacaagagagagggcagcagcagctctgagggccgtggggacacagataaggtgagctggcctggggagaggtggggcggtgctgacagttctgtagagaatatggacaggaactgagacgcgggggcccaaggagaaagggagactgaggcagggagacagggccgtagagaccaaagtcatggaaccataaggaactccactttgctggaatgggtgagcaggaaatgcgttaggcgtgtccaaaggaaaatcgcgtctgtgcgtgtgtggggctgtgtgcgtacacaccacatatacacaccctggaagagatgccccgcgctgcagcccaccccttgattatctgttgctcgcgctgtctccgtctctgtgagtgggggagggtggtttccgaatgaaaactcaagaacctgtttgtagatgaagcaggggagaatgggtgccaggcagacagtaatgtaggttcttactcagctgctctggccggctcctactcctgggctctggagctgtttctctcttggtcaggtctagatgtgggtttttgtttttgtttttctttgagatggagtcttgctctgtcacctggtctggagtgcaatggtgccatctcggctcactgcagcctccgcctccagg

SEQ ID NO: 37488 - DNA, 964 bp, Artificial sequence
  DNA replication origin
atggatatgggaaggaaccctagctgattagagagcctctcgggaggatgggaggatgggaagaggaggtttcctgtttgtacccccgaaaatatgggtgaaggacctgtgccgtggcccgtgagaaggaggtctgggtgcggaaactccaggccaggtgggtccgggggaggccggtcgcgcccaggaaatgccctatacgcgcaggccggaccatgggaaccccaaagccacggatcctgccctggctggtgtcgcagctggacctggggcaactggagggcgtggcctgggtgaacaagagccgcacgcgcttccgcatcccttggaagcacggcctacggcaggatgcacagcaggaggatttcggaatcttccaggtgcgtgcgacgacctgggacgctggaaacccggagctgcgcgctgggcggaaaggactcctagtgggcccggctgagaaggcggaggtggcgcgcgaggggcgggctcgtgccaacgctggtgggtggggctagaacgggaggggcggggctagccggatccgctgactgatggtggggcgcaagcagggttggagctgcagggttacgggaataaaaccgggaaagccggttagtacgcaaaggaaatgcatcctgggggtttggggctttctagaggccggggctcttggttgtaggatagatactgggggatggttcttgaaacatcagaggtgaggcctggagccccaaatctgaggttcctaactaccgaattagtatatgccagaggtggtaaacagtgtgaggggcggggttatcacagagggtgtcgcggggcaggtggtgcacgggattagacaccaagttggacttggaagcctggcttagaaagaaaaggtttttgggccgggggcggtggttcacacctgtaatcctagcactttgcaaggccaaggcgggaggatcgcttgagcccagga

SEQ ID NO: 37489 - DNA, 1196 bp, Artificial sequence
  DNA replication origin
cctggtccggggccccaccgccgcctcctccactcaacttgcggtctcctccactgaactcgtacaaactttattagttcaactttcccgcgcctgcgcactgggccgggtcgataaccggcccagcgtagaaagggcggaacgctgggtgcacgctcaatttgcatgtgacgctcccagcatgcctctggccggaaacccaaaaaagggcataggggcgggaacagcccagcgggccgtcccatcggcttttgggtctgttacccaaagaatgataaagttggttttatttcaagaagtcgatcaaaaagaaagccccagcgctctagagctcagctgacgggaaagggggtgcgcagcctcgagtttgagagctacccggagctccaagacaggggtgggttccagctgcccgcacgccccgaccttccatcgtaggtaacgcggaagagcccgggagagcgttggtggcgtccgagagcgaggagcgggaaagaggatgggtctgcacggagagtggaaaggcaggctgtgtactctggggaaagtggagcaaggaaggagctacagtggccgacgctggaggtcggctgcagaaaaactagaaaaagtagggaggaaagaggaaaagaggaggcgtctacactgagggggttctagagagggaggggtggactccgtagatgggggtagttcagtctcgaaacctggggcgtgctctgtcctggaggagggaggcgggcagtcggaggggaattgaatggaagttctgtgttggaaatgttttgggagatcttctgtagggggactgtggaagggggtctacattggggtaagtgcaggaggtagaggcttacacgtgaatcgattctgcactgaaataactagggaaagaggatgctaccctgaaagtggggatacttactttcgatgatgtgggggagggaggaggtctatactggcggaattgagggagtggagggtctgcactgaagacgctggggaaggatgtgccatggatatgggaaggaaccctagctgattagagagcctctcgggaggatgggaggatgggaagaggaggtttcctgtttgtacccccgaaaatatgggtgaaggacctgtgccgtggcccgtgagaaggaggtctgggtgcggaaactccaggccaggtgggtccgggggaggccggtcgc

SEQ ID NO: 37490 - DNA, 1099 bp, Artificial sequence
  DNA replication origin
tagaagctgaccagacaaagagaggtgggcgttcctggcagggggagggacttggcaaaaaccaagtggcttgagaggggttgatggttttaaaaaacttggaatgattatgtcaagggctagggatttaatgtgttgacgacggactcctattcctcacttgcttcgggaccccagctatgcccttcctctctctgggcctctcaccgattccgtttttcccccaggtaatgagcacaagctccctttttcctccagactccccccgggttgggaggatccaccgagtggacgaggagtgataattcctttgagccaatcgttggtgcctgaagccccgccttcttccctacccgtgggccaattgccgtgttctccttgaggccggccgcttggcgagggtgggccaaaggctgcgtgacgtcgcttccggataaaccaatggcagcgattaggaggcgggtcgttttggtgatggacaggtgtttcaagacgcccctttagcgcggggctccccgggaagctttgaggcggtgctgggtgtaaaggggagggcattcctggtggattttgcccaatcaccagtcgcgcttcttgcaatagacgggcagttttccccatcccgggtcgacttgagggggcgggattctggacgccagagttggcaaacccctgacctatgatggacgtattctctagccaattactagacggtattctcagacgggccgcctccattgccaatgaaatcttccagcggggtcgcggtaggcgggccgtggaccctctggtataaggcggtcccgggggagtgaggagaaagggggggtcttggcggccggaggaggagtaggtgcgggtgaagatggcggcagccgaggccgcgaactgcatcatggaggtgagcgcttggagcgccgccgtgggcgggaggcggctttgggtcggtgtttcacgcctctgtggtggggaaagggctctaagttggcgatatggggttggaggtcccccgccgcacacgggggcgccgcacgttccacatccggggatatcgtttgaggtgacggctccctagcttccaagggccttcggcatccgg

SEQ ID NO: 37491 - DNA, 1489 bp, Artificial sequence
  DNA replication origin
ggtgcgggtgaagatggcggcagccgaggccgcgaactgcatcatggaggtgagcgcttggagcgccgccgtgggcgggaggcggctttgggtcggtgtttcacgcctctgtggtggggaaagggctctaagttggcgatatggggttggaggtcccccgccgcacacgggggcgccgcacgttccacatccggggatatcgtttgaggtgacggctccctagcttccaagggccttcggcatccggcctagcggagggtcttatcccccctcccacgtggaggagggctgggggcgcttccggccaggcccccacgtggccgctgcgcggtgggtggggagggggtgtgccgagtccagtggcccggcgggctccacgtgcgggacaaaggccccgcccccggccggggaggggcgcccaggggggcggggagggggtccgaccctcctgacgcccccagccctcctccccggggacctgggcacacgccgtggggtgtgatcgacctggggccctccacgatgtggggagtctcttgggaggagcagtgcttctcagccctttaccaacctccttccgagctccgggggcatctgttgggatatcggacccggttttgtgcgttctgggttagggactggaggaaaaccaagaatggggtcccccgccgaccccgtttcccctcccagaattctccccctcgcccagggctttaggagttgggggatggggcatgcccctgtgacctccctctgggtggtggtggggcatctagatagagattttcccattaataggcgccgtgcacccccttgtggccatttctgggtgtgtgggagggacatctttttcatggggcgtgtcctgaagcccacctcccctcggatttcttcctggcgggcggagggaggagggtatgtccgctgggaaggagttgtgggaaatatgtaggctgagagctttaccctactggagccgtttatctcccccgggtctttgtgagggtgcgagatgacctccttcttcctgaagccctgtgcagggtcctgagccctggggtcctgagagtgggtgcctgaaatggtttcgagtgaggtttggttctcgtgcagccatgtgggggaggtttcagtcttgcgtttcaagccctctggggctggggttgtctggcggtagttttcagtggtattgagaaataggcccgagtgggaaaccccctcagcacctttcttcttataggcatccccgctagcttgggagagctggagggagggtgcttggagcctagtaggtcatggcctgtgacgtggcccttcttggagacttggatagtggtcacatctggaagagatgtaatctgatggggcctctgtccttccaccccttacctatggcattggctggaggggcaggtcagctctcagctgtcaggatgcagctcccaggggtcactgtaatgacttcccaccctcttggctgtctcctgca

SEQ ID NO: 37492 - DNA, 1269 bp, Artificial sequence
  DNA replication origin
caaggcaacggcttggcgaggcgaccctaggaagtgcgcagcagaggggcaggggggcggcctgcggccaggggaagcagtgcgcatgcgtgggaaaacaggttccaccccttccccaacatttaagcccccctaagattggggccttggggactgtccccactgacctcgtggatgccaaagtgtgcgtaggagtcaaagtagtaatctttggatgtcatgtcctcagcgttgggcttctcactgctttccgcctggccacaggacacctgggagggggccgatgggatcatgggtcagatctgggggctccccacagcctcttaaacctccagcgccctacttttccctgaagagtagtatagaacccccaaaatcataccatgacaaccctacagcccccgcctgccatcttgcccccccaggaaccccaaaacctaacaaccccattttccacttccaggacccccccagagcaccatccaggggagcaccccgatacctcagccacgcctaccatctctccagtctctctgaccccgtctctagctcagcccacagctggggaggggaggggaaggaaaatgggggcagacacagggaagggcaaaggggggttggaggtggagttaaggaagtagcggcgatactgggggaggccagcgggggctgtgaacctggaggggttgctactaagtgtctgggggcctggggtaaactggtttgaagcaagaggggtatggttagacctcaagaaagggccagatgtgtggcaagatatattgatgtggaggtcagggtggggaggggtctcacaaaaggatatttacttcttcaagaggcggctggaggctcatcccattagccaaggtggctacaaaattctaggagagagtaacagggaaaaaggattagctactgggagtggctgtgggagggctgggtggcggaacctgggctctggccggggggtgggtttccagcaattctccttcttggtggggagtggtggcgaagggggcaagtaatgaggtggggtgtttaagaaagggtgggaaaagtgaggggagaagaaaggggggtctcctatcccagctgtggctggagagatggtggcccacccccacgctgcccctctctggccaggcagctgaccacacacctcccccatccaggccaggggaattggcacccaccaccgccagctgtcgctccctctcatcacctaatctcctccagattaggtgacacttcctgacacacacaccc

SEQ ID NO: 37493 - DNA, 770 bp, Artificial sequence
  DNA replication origin
tgtgcagtgcctcagtttcctcatccacaaaaggctgacacggtccctgtctccaaagctcaatgacagggaggtgactcgcggatagcagtcccatcagctgtcatgggggtgggcattccgacagagggaacgcaagggtggggttggggggggcagcaggccgaggccggctgacccgcccgcgcccccaggccccgagtccccgtacacgcactggaagcagacggtgttctacatggaggactacctgaccgtgaagacgggcgaggagatcttcggcaccatcggcatgcggcccaacgccaagaacaacgtgaggctccgggcagctgggtgggagggtggcagctagggcggggagtgtagattggggggggagtggtgggggaggaatggtggcagcgggggtaggggatgggggcagccggggtgggggatgggggcagctggcgggggcgagcacctctgcctattcccgggtccccaagcccctcagccccatgcctgtctacacagcaggattgcttgagcattcaccggaagttatgggcctggggacccaggctgaaaccctgccctcctggtgcttccactctagacaagggggtcagtgacatggtgatgccagttggaggtgacctctgtcaggctgggagcagggcagacaggtgttggtgtaggtgggctccagggcaagaggcagcccccagtagagtgcacggggttttctagcccagctgggaggcatgagaggagaaaggcagctt

SEQ ID NO: 37494 - DNA, 1064 bp, Artificial sequence
  DNA replication origin
gggggggagtggtgggggaggaatggtggcagcgggggtaggggatgggggcagccggggtgggggatgggggcagctggcgggggcgagcacctctgcctattcccgggtccccaagcccctcagccccatgcctgtctacacagcaggattgcttgagcattcaccggaagttatgggcctggggacccaggctgaaaccctgccctcctggtgcttccactctagacaagggggtcagtgacatggtgatgccagttggaggtgacctctgtcaggctgggagcagggcagacaggtgttggtgtaggtgggctccagggcaagaggcagcccccagtagagtgcacggggttttctagcccagctgggaggcatgagaggagaaaggcagctttttgttttctgctcccctttctttttcctcctgagcacttggcaggagctgccatcacctgagatcagggggcttccgggggagctgggggggcttctcggagacagggtctgggcagagatccagtgtggtgggtctgagcaggcaggaggatggaaggcttggagcctggagtcgccgggagtggtctgggttggaaaagtgggtcccggccgatgggtgcgagggtgggtggcactcagggtagtcatggaatgtggaccctgggacacccacgagcctgtgacagcagcagttgtcaactgggcagttttactgccccctccgctccccgcccccccccaggacgtttgccaccgtctgtggaaacatttgtggttgtcactccggagaaggggtggtcctggcatctggtaggtaggggccagggggctggtaaatgtcctgcagccacaggaccaccccctacaaagactcatgcagcccccgggaccacggcactagctgggaaacggatactggagagggaggaggagtcctcgggcgttggtgactttgtctcatcttcatgtgctggagggtatggggggaggagaggaagtggagacagcaggctggaccattgtgtttcactggaacgtttgcctgaggaggaagtgggcttggg

SEQ ID NO: 37495 - DNA, 1160 bp, Artificial sequence
  DNA replication origin
taaataaatatatatacatatatatttttatatatatataaatgtggaggttaggatatagatgtatgtgagcggggctcagggtattgacccttgggggctgggggcgtgtgggttgtgggcgtgtcgtggggcagggcgtataactcgcaagtttagcaggcgagctcacaaccttagcccttcaggtggggcgttggtggcggtggcgggactcacataattggacgcccaccaggacttgagccgcaggtaccactgcagcagcgacgcctgcagcctcaggaattcctgcgccaggaccgcggtccagtcgaagtcctcgtcggagaggatgggccggaccgactccaggtactaaaggggagaagagggcaggtcacgcccccggcccgccccggccgccccagcccgtctgcgcgctcccaggcccaccttgcgcacggtgtcctgcacagagggcacgggctggcgtggcagggagcgctggtaactgaacagcatcgggtggcggccagagaagatgcggaccagggcctggggaggaggagttaccgggtcattaacccctcaccggagccagggagttgacggggcaggggtcgacagtgggacagaaacccaaagagaaggacacagagacttaagagcatcggagaccccaagagagaaaggaacagagacccagagacaggggacagagacccagagagagggggacagagacccagagagagaggggggcagagacccagagagagtcgggggtagagacccagagggggggacggagacacagagagagagggggacagagacccagagagagggggacagagacccagggacagaggaggacagagacccagaaagagagggggaagagacccagagagagagggacagagacccagagagagggggacagagacccagagagaggggaatagataagcgggtcccaggagagcctgagcagggctatgcccctcccataccagccaggtcttggtgggggaggacatggctccgtggggctcaagaagccagccgtggtaggacagaagcagcctcagggccacgtgcagtgtgaagatcagggctccccacaaacacgaggcaaacagcgcggctgccaggaccccccggagcccgtggtg

SEQ ID NO: 37496 - DNA, 987 bp, Artificial sequence
  DNA replication origin
acatatatatgctctctctatatatttaatgttgaagtttggggtatagatgctccagtattctgagcttcacccttgatcttccaaagtttgaaccagaattccaggacttagccctggtgcaatgtctcacgcctgtaatgccagcaggttgcgaggccaaggcaggcggatcacgtgaggtcaagagttcaagaccagcctggccaacatggtgaaaccccgtctctactaaaaatacaaaaattaaacaggtctggtggcgcacacgcctataatcccagctactcgggaggctgaggcgggaggattgcttgaacccaggaggcagaggtggcactgaactgagatcgcgccactgcacttcggcctgggccacagagcaagactctgtctcaaaaaaaaaaaaagaaaagaaaaaaaaaaagacaaaaccaaaggagttgaatggtgaggagtggtgggagaggcctgaactccagactgaggatcctggactctttcctgggggtactagggagccatgggagggtttggagcagggaaggggcagggtcagctttggtgtgggggaaagactggagggcgggaggctgcagaggaagctaccgtgagacctaccattgtaggtcattgagacactgggctgggatgagaaaagctgcagcaagagtgagaggggaagggaagagggtccccggcagagccccacgaggcagctatgtggaagcctcagttggtcaaacccagcgaaggggacgaaatatctggagaagtaaaagggaatgcaggccttgcttttctggttaaatatttttttcttcacacttttggacaagattctgtttacacacacacacacacacacacacacacactcatttctttcttcccttccttccctccctccctccctcctttcctaccttctttcctgcctgcctgcctgccttctctctctctttccttcctttttttctgtctcct

SEQ ID NO: 37497 - DNA, 1313 bp, Artificial sequence
  DNA replication origin
tacttgggaggctgaggcaggagaatcgcttgaacccaggaggcagaggttgcagtgagctgagatcgcaccactgcactccagcctgggtacagagcaagactccgtctcaaaaaaaaaatgccgggcgcggtggctcacgcctgtaatcccaacactttgggagactgaggtggctggatcacctgaggtcaggagtttgagaccagcctggccaacatggaaaaacctcatctctattaaaaataaaaaaatttagccgggtgtggtagtgggcacctgtaatcccagctcctcaggaggctgaggcaagagaatcgcttgaacctgggagatggaggttgcagtgaactgagatcgtgtcattgcactccagcctgggtgacagagcgggactccatctcaaaaaaaaaaaaaaaaatggggatagggatggcatgtgtagactggaacaagattggggttgggccacagttgaagctggggttggggatggggatggaggagggactgagagtggtttgggaatagaacggggaaggggttgggtatgggaagtgaattcgagttgggcatgggttgtggttggaggtggggttgtggctgagtacgggatggggttggtgtggggtatggggttgaggttgggtatgggatgagttgggcatgggttgtcattggaagtggggtcgtggctgagtacaggatggggttggggttgggtatggggttagggtttggtatggggtggagttaggatgaacatgggaatgaattcaggtggtgttgggatgggattgggtatggagatggatttggaaggaaaatggagtaggggttggtgctggggttggacagtggtggtttttgagtctgaaacaggtagagatggggttggggttgaggatgggattggcagtgggaggacggttggagttggggctggagatgaggttcgtgttggggtttgaggttgtggatgcatatggcctgatttgggggtgggggaagcatgggtttcgggttgggggtaggaatggggttgattttcacgttcagattaggggtggggatgagtttgaagtcaaggctaggaatcttgggacttggaggagaggcccagaaacccagcctcacctggtctggaaggtcccattgcagccgctggggctggggtagtgtggggtccgggtgccccttgcagtggccgtctgttgagtagcccagctgaaagcattctgtagccagagtgaactgtgggcaaacagaggctgttagagtcccttcctccctgtggactgaggccatctaac

SEQ ID NO: 37498 - DNA, 767 bp, Artificial sequence
  DNA replication origin
agtgagtacacagaaataactgaagcctcaagcgagggctgcacccaccgtcttctctttgtcctccatggccctgacaaagttgcaggcctccctcgtgcaagaccgcaccgtctccgtccggccttccaggaataagcgagtcatggccgactcataagtcaggcagaattgacccctgtcctgggggacagggaggagaagaggagtctgtcagctgggctcaggagatcttacagacttgacctatctctgtccagacctccagcctcctccagccagcccaagaatggttggaagagagaattcaagatggccgacccacaatggcagcgaccacaaggaaccgtggaggggcaggtcttgggggctcaggtggactgagaccctgcgggggctgtggatggggaacccaactgacccggaagtgggccagttgcaaggcgatctggatgaagctgtctgaagagaggtggcagcgtcggatgaagctcttgccaaatagggagaatggaacgacatggcagtcgacattttcagacaagatcttggctcccctcagggctagagagatggaggagtggatctgccagaggaggagggaagaggagtagttggggttacagatgggggtagggtgaaagccaggaataaggctggaagcggaggtggatgtggagttaaggttgcggcagaatatggaaatggggacaaagaagagaagagaattgaaggatgagactaaagatggggataggggctgggcg

SEQ ID NO: 37499 - DNA, 847 bp, Artificial sequence
  DNA replication origin
gattctcctgcctcagcctcctgagtagctgggactacaggcacatgccaccacacccagctaatttttgcatttttagtagatacagggtttcaccatgttggtcaggatggtctcgatctcttgacttcgtgatcagctcgcctcagcctcctaaagtgctgggattacaggtgtgagccaccatgcccggccaaaagaaagccacaatgtcttttgtgacctaatcactattttttttttttttttgagacggggtttcactcttgttgcccaggctggagtgcaatggcgcgatcccggctcaccacaacctctgcctcccgggttcaagcagttctcctgcctcagcctcctgagtagctgggattacaggcatgcaccaccatgcccagctaattttgtatttttagtagagatgtggtttctccatgttggtcagactgatctcaaactcctgacctcaggtgatccacccgcctccgcctcccaaagtgctggaattacaggcatgagccaccgtgcccagcccccacttgtggacattttttaaaccatcacagagttggcagtctggctggggtggttgggctggtagaggttgagccatttagaattttgattttgttgttgggttgtattattgtttgactcagaagcagtgagggttagattgatggcgcgttggaaccgtggtattggtggggtgggtgattgggtttggtgttgatggctgtagttgggctggtggagattgtaatggtgggggtggtggagcacagtgaaggtgtgctcggggatgatggtgtttaaagtcatcactggccgggcgcggtggctcacgcct

SEQ ID NO: 37500 - DNA, 1774 bp, Artificial sequence
  DNA replication origin
cctggtgaaactgaggtgggcggggcttaggagaggagtggtcctggaggcaccacgtggggcagagtagggtgggcagtgccttggggggccagtgtctggaggagcccaggtagaggttggggacctgaccaggaaagggccaagatagccaataaaggaaggggataaaggcggggctctggaggacacgaccaaatttcaccaaatggagggtgcaataaaatttggtgacctgggtgggtctggagccacgggcatggtctcagtggggcgagataggtgagtcctgtcccacctatctcgtgggggtaggtggggacctgttgaagcctagcccctacccattcccctcctctgcccctccaggagagaggtgtcctcactgaccgcccggtggcatcaggaggagggggcggtgcaggaagccctgcggctgctcgggggcctgggcggcagggtcgacggcttcctaggccagtgggagcgggcacagcgcgaacaggcacagacggcgcgggacttgcaggagctgcgaggtcgggcggatgagctgtgcaccatgtgaggattggggccagtgcatgggaagaccggaaggggcagggcaatcccaacctgagggcggggtcttgagggaaatgggtaggccaatcagctatggccaggcattccggaacatataccgacatcgggaaacaccaattagagagcaggaagggttgcatcagccctaataaggcctgaggggtggaatcaattagagaaggggtgtggtctataccttaaaagggcaaagggtggggtcaagtgggatccgagaaaatcaattaagagaactaggaggggcattccaaacagtaatctacaaaaggtggcccagtgaggtggctcacatctataatcccagcacattgggaggccgacgtgggcggattacttgaggccaggagtgcaagacaagcctgggccacatagcggagaccccatctctacaaacaatttaaaaattagctgggagtggtgtggtgtcgcaccctggtagtcctagccactcgggaggctgaggcaggagtgatcgcttgagcccaggagttcaaagcttcagagagctatgatggtgctgctgcactccagcctgggccacagagccagaccctggctcaaaatagtcaacagataaataacataacataaagtaaaatacaaaaagtgaggccagtcagagcagagaggggagggcagggtggagaattgctgaccagatggagacgcaagtggtgggctaataatgggtggagtcttgccagggttataccgctgaagagacgacccagcagcactggttactcatgcctcagggtggagcggtcagcagtgtctgtggcttcactgaggagcgaactggaggggctgggcccactgaaacccattctggaggagttcgggcggcaatttcagaactctcgaagagggcctgacctctccatgaacctggatcggtcccaccaaggcaactgtgcccgctgtgccaggtaacggggctgggcttgcctctgggagccttgtggataggacattaaaggagatgcggaaggagatgggacattagtgaagggtggggcgctgttcattttgggagacaaggtatcccagtgcattgtagaaacagccggtcctgctgcactagaagcctcatttgttcccactctacaaggtagaatcagtgtcttgtggaactcaagagaaacttggtacaggccgggcgcggtgg

SEQ ID NO: 37501 - DNA, 1291 bp, Artificial sequence
  DNA replication origin
gagaaggcggcaagaggcagaagagttggaggggtactgcattcaactcaaggtgagccagtgggacgcaggaatggatggggagaggggaatgggagtaagaagagggtgggagaaagaggggaggaggctgggtgcagtggctcacatctgtaatcccagcactttgggaggccgaggcaggcagatcacctgaggtcaggagtttgagaccagcctggccaacatggtgaaaccccatctctactaaaaatacaaaaattagccaggtgtggtggcgggcgcctgtaatctcagctacttgggaggctgaggcagaagaattgcttgaatccacgaggtggaagttgcagtgagccaagattgcgccactgcactccagcctggccgacagagcgagactcagtctcaaaagaaaaaaagaaaagaaagaggagaaatggaatgggtggaccgaagagaggtgggaggaagtggaggggtgccactctggcacatctggctaaggaggaagccatccccttagccaaggaaatgagctggtgagtgtgtcttgtactggggggctaggaggcctggagcctggatggaaacagacaggctaagggttgggaggcagaactggaatgggaaggcagggccctcgccctggtgtctgacccaggagaactgctggaaggtgacccggtctgtggaagatgctgaaatcaaaaccaacgtcttgaagcagaattctgccctgctggaggtaagggctagggggcagtcccaggatttgtgggaggaggtcagatgcacgagggactcaagatacacttttaggtggaactccctgccccgacaccaccaccacactgcaccttcgtgcacatagtcatccttagaactcgctgataagagggattcaaatgaggctccaacacccagatgggggactcttgccctgcagtcacattcaggtcccagaaagagaatcgagctggacttcaggtgagaaggcccgtcctgtccacatgcccactcattttccaacaaaatgctgagaaagcttcagttgttcttgccaagtggccgggactggtatttgacgcctggagggcttggagggccgggtggatacctggaggcaggctgtgggaggttagcgggaattggagtccaactgggcctcaaatggtgcctcccctccctaatgacagccagtgagacttccaacatactgtccccacaggcgttctacttccaatctcggggagtactggagcggattttggggtggaggtggttgcgg

SEQ ID NO: 37502 - DNA, 767 bp, Artificial sequence
  DNA replication origin
ggcatgtaactagaatcctgaacaggaggagtccactgagaaccctaggggaatgacctgggccagcatctctccctaccctgtgccccccactcactggggcccagtggttgggtcctttgtgaggcaggctgaggggacagtggatcctgagggtctgtggtcacagtaggtaggaagtctcagaggaaggagcccctccctgggagccagacccccacaccatggcgagcgtggtggtgaagacgatctggcagtccaaagagatccatgaggccggggacacccccacgggggtggagagctgctcccagctagtcccagaggctccccggagggtgaccagccgggccaaggggatcccgaagaaaaagaaggccgtgtcgttccacgggtgggtttgttgcacactgtcagggatggttctaatgcccagcactacctccaacagagcaggagtccgactgtgggtgctagaggaaggggagggggaaaagccagcaggtcgggggcaggaaagagggcagcagtgaagagacatcaagtcacagggaggtagagaggaagaaggtaatggggatggatggagggaggaagaaggtaatggggatggatggagagaggaaaaagccagtggggagggaagaaggagaagggaggctagtgaatgaagaagaaagtaggtggcagagaagggaggagaaagtaggcagcggggaaggagaagaagaaagtagacagtggtggtcgggcacggtggctcacgc

SEQ ID NO: 37503 - DNA, 1082 bp, Artificial sequence
  DNA replication origin
cgtctccagtgtcccccggccgcgcgctcacagttccggatgtcggagatgaacaccgcgagcccccgcatcccatcgcccttggacacggccggcatgatggcggtggtgtcggctccaggcctggccggacagggcacagagcagcgggggctggcaagcggggaccgggcggaaaggaccccaggcagcgccaaggagccgagccggccgcggggagggctggctggcgggcgggcgggcgggctggcaggccgtggcaccgccccctgcccctcccctccgcccgcggtccggagctctgagccgcccactggcttgagctcctgccgctcacaggcgggtttctcccccacttcctctctcattggccgccaagcaaaggcacgacgctacgattggcccagtgttccgctatttccgtttgggagctggggaggggggggaggaggcgttgcccgagagacgggcggggttcgattgcgtatcatgggcccgccccctccgcgcggccaggtcaaacactgattggatctagcggctctccaaggaggaagggagggacgtgaaggaaggcggggaacggtcctaggaggcgggacttaggttgactgggaccaatgaacgggtagacctgccccgcaggcgtcgcggattggcgagatctgtcctacttcagccctccattgggcggctgtggggcgggcggaaggcgaagatcagtagagaaggaaagaggggagggtgtcactccgctcggctgggataggtggagcgacgcctgcaattccctgctgcagagaaggggttgggcgaggcaagagagcgtgcggtgtttactgcgcaagcgtctccgtgttccctttctccctccactgtcacccccgactgctgaaatcctcttctaggaagccttcctcccctccccccttctctgcagccaacgtgtcgggacttgagttgtcaggagacctagaatctcagagtgaaaaacagtaattcaaggctagtcccattaagcagaagttaaaacttaggtcgagagggcgaatgacttgcccagggccacacagcttggaagt

SEQ ID NO: 37504 - DNA, 2066 bp, Artificial sequence
  DNA replication origin
caatcgaaccccgcccgtctctcgggcaacgcctcctcccccccctccccagctcccaaacggaaatagcggaacactgggccaatcgtagcgtcgtgcctttgcttggcggccaatgagagaggaagtgggggagaaacccgcctgtgagcggcaggagctcaagccagtgggcggctcagagctccggaccgcgggcggaggggaggggcagggggcggtgccacggcctgccagcccgcccgcccgcccgccagccagccctccccgcggccggctcggctccttggcgctgcctggggtcctttccgcccggtccccgcttgccagcccccgctgctctgtgccctgtccggccaggcctggagccgacaccaccgccatcatgccggccgtgtccaagggcgatgggatgcgggggctcgcggtgttcatctccgacatccggaactgtgagcgcgcggccgggggacactggagacgcgggggaggggggagcgtgaaattgaggggtttggggatcacagagggacccgggggatcaaaagcctctgcggccgtatagggacagcatagatgggccccaggaagaactttagagtggggggcacgtaggggcttggggtgtcatagagtgcctcttgaggtgacgacacggagtagctagaggggtccgggagggcttgaaaggggaggaagccagtgaggtcccggggatgggagcatagaggtgtcccctgggaaagactgaaaagctgggggatcttacaaacgatggggttagagggattcccaatgtagagaagaagtgaaagaagtgtatggcgggggtgccctgtggagcgatggaatgggaagaggccagaggggacctggaggaagtggaatgccggaagcctaatgaagcagggcttgaggacctgggatagggggtgtcatacaggggaaaggggttagataggtcaccgaggctcctggccagtggtatagaggaggcctgagagtggttgaaagtccatgagtttggggcagggagatgatgggacggggagactataaggacaccctggtgaaggatagaggggcttcagggtgggagattgcctagaagacatggaaggcagtgtggagggggctagaggggcagctgaggggaaaggagggacccaaggaacacagaggaaaagagctgtcggtgtaaggtcttgggagaacctgtgacagggaacggggggccaggaaagaagaggacattagagtaggggattggggaaagggtagaagaaggagcgcccagacctcaaggaaggcgttgggttctgaagtgcttgaggggtagatatctggaaagctgggaataggggaagtctaatcccagagagaggtcaggggtcaggcagcaggacaggcagggatctgagcccttttctatttgaccacagtaatatggggacggtggtccctgccaggaagagttgtcgtgacgatgggaatcctggcggcaagtcagctctcaactcctgggaatggctgtgggtgattggagctgccaggagtcttcagaggctgcatccgcatgggctctggggtcagccagacttgggtttgcgtttgagcactgccactccctggctgtgtgaccttgaatgagggacttcacctctcggtttcctcatctgtcaagagagactgctgatagtatcttcctgaggggcttgtgacaatgcccctcaggcctttcactcgttccaggccccagatggaacttggctattgtttttactccgttggctctgaacagcagccctgtaaagtacccagtgatggttgttgttttagaatttaactgttatggaaggatctggcatgtaataggtgctcagggaacaggagggtggaaacagttgagtatcagttggaggagaaatgatcacttgttatgataaggggcggggctatgggggttgtggaggagctgggagccactgttagcagacgggggctgcctctgttacccaccagggatgtgaccctccacgagttgtttaacctctttcaggacgttt

SEQ ID NO: 37505 - DNA, 871 bp, Artificial sequence
  DNA replication origin
ctcactgcaagctccacctcccgggttcacggagatgggtttttattatgttgcccgggctggtctcaaattcctgggctcaagtgatctgcctacctcggcctcccgaagtgctgggattacaggagtgaggctcagtgcctggcccccttctctattttcaagaattcttttttttttttggaaacggagtctcgctctgtcccccaggctggagtgcggtggtgcgatctcggctcactgcaagttctgcctcccgggttcatgccattctcctgcctcagcctcccgagtagctgggactacaggcgcccgccaacacgcccggctaattttttgtattttttttttagtagagatggggtttcactgtgttagccaggatggcctcaatctcctgacctcgtgatccgcccgtctcggcctcccaaagtgctgggattacaggcgtgagccaccgcgcccggcccaagaattctttctggaaacaaaaaaaggccctgatgccccagtgagaccctgagaaaagggctgtgtggctggtgcagagagggatgggatctgacgctggggagtgggcagaggctaggtccgtgtttgtcctgagagctctggagaaggtttcaagcaggagcgagggaagagaagggcggagggatgcggaggaggaggtggggagaggcagggctcagagagcagcagagggaagagtgtggagccagccagcaggaggatctgaagggcacagtggggctatggggaagggtctagaaggtgaaaggcaggctctaaggagggcagggagggcaaattctgcagataaggagggggagaggttgaggctgggcccagcccgagggcgtgttctgtc

SEQ ID NO: 37506 - DNA, 1442 bp, Artificial sequence
  DNA replication origin
tgtgatggagtctcgctttgtcgcccaggatggagtgcagtggcaccatctctgctcacttcaagctctgcctcccaggttcacgccattctcctgcctcagcctcccaagtagctggggctacaggcgcccgccaccatgcctggctaattttttgtatatttagtagagatggggtttcaccatgttagctaggatggtctcaatctcctgacctggtgatccgcccgcctcagcctcccaaagtgctatgattacaggcatgagccaccgcgcccggctggaaatctctttttaaagtattacttaaattgtatttaaaatgtatttacatatatatacaaatatgcatatatatgtatatttttctttaaataggctttatttttactttttttcttgagacagagtctcgctctgtcacccaggctacagtgcaatggcaccatcttggctcactgcaacctccacctcccaggttcaagcgattctcctacctcagcctcccgagcagttgggattacaggcacccaccaccacacctggcttttttttttttccgcatttttagtagagacagggtttcaccatgttgaccagactggttttgaacttctgacctcaagtgatccacccgcctcagcctcccaaagtaaagtgctaggattacaggcatgagccactgcacctggcctttaaataggctttaaatggtccacatctatttgatgctatcttctgcataactggtataatttgctataaaaaaaggaattcagagagagaagaaaagctctcggtcttcaaaacaggagcagttgtggccccaaagggagggctctggcagaggcccagctctgcaaagatctaaaggcccgtgatggccagggagcccagggatactgtatgggtgctactggggtggtgcctggggaaagggctgaggcagctctgacagaccaggatcatgggaagaatgacccggcattcagggccagcaacagggggaatgagctcactgtcacaggaggcaagcaagcctgtgagagagttttaaagggattctctcattcacaatgggatttctggggccaggcttaaggatgagtcacatctaccctgctctcgaggcatccctggattggagtggtggcagacagggacagtggcaagtattctgaaagaggtatacacatttcggggctgagaggctaaaatgagaatggcgcaggggacggggaaggcttctctgcacacagctgctgggatctgaggatcaaaagatgaggctgaaatggaccaggcagaaacaaggggaggcgcgctccaggcaggaggaccagcaggtgcaatggcctggaggtaggacagcatgaggcaaggcaggcggacggtgatgaaagaggcacagagtctgaggatgcgggcggcggcgggggcgg

SEQ ID NO: 37507 - DNA, 1934 bp, Artificial sequence
  DNA replication origin
cctctcagtttggaatggccacatttcaggatctcaggagccactggctggcaactgctatattggatggtgcagcgctagggtcctcttagcactgatcaggaggtgctaatcagaggggcttcctggaggaggtgatacctgaagtgaggcttatgggagcttccatagaagttgggagcagggacaagacaggatttctagagagaaggatggcacatatacttgctttctcagtcattgactcatttgttgaatgcacaccccaccctgctggggactacgccctgaaggatgtgggtcagagcagatctctgccccttccataactagacatttatagagcacctgctgtatgcagggcactgctctaggagctccctcctgatgcttacagtctgaagtgggaggaagttcgacagtggagagaaataaaattgtgacatggtgaaatgtaccagagaggacttcttgaaaaataactctttaagcagaataataaagaattgactttaaggaagtgaaacggaacggcctttcaggggtggcaggagccgagacccaaatgatgggaagatgacaggggaggggtggccccaggaagagggcacagcttgtgtgaaggcccttgaggcaagaggatgtgcgtgttcccggagcaaaatggaggccagggggcctggatggacagtaggggtctgaggggtgacaccggcagggttgctgtgacaggggcagaggacttgatgggccgtggagtggagcacccccagctggcatcacagagcccaggatatggaaacacgagggaggcaagaaggctggaggggaggctgcttcactgacctgagcgagcgagcatgggatctggatgaagtggtcatcgtggaggtgctcaagacatgttctgaaggtcaagttaggaggaggtggctgggcacagtggctcatacctgtaatcccagcattttgggaggctgaggtgggaggatcgctggatcccaggagtttaaggtcacagtgagctatgattgcaccactgcactgcagcctgggcgacagtctaagaccctgtctcaaaaattaaaaggacgaggcagtagcccgattggcgtgaggatgtccaggttctgtttggaggagaagagggaacggtagaacctgtcaagggagggatgaagtctggggtgagtggaacagggacaggagaagcagagagggcagccgagagcatccagtcggattgtgctctgaagggggtgctgtagggcattgaggagcatggaggaagcagagacctggcctgcaggatcaggggaggctttctgtgcttattccacaagcaggtcctgtcagaggtgtaggaatgtcccagacaaattggggagaggttggcagccagagaacaggaggcagtggggacaggccacgcgggagaggacaaagccatggctgtggggacaaagggggtgaggacagcacccaagggtctgacctggtgactgggtggacagtgggaccttcatgggattgagaactggaagaggcagtgagctcagtggtaggggtgagcaccctgcggccagccaagctctttattcattcattcattcatcacatgttcatcgcatgtggggagtggggacaggagctctcagggagcgtgtctggggccctgaggagccccacaaatcaggggccacagtggtaggaggaaggagagaggaagtcagggacagcccaagggtgtgtgctctgtgctgtggggctcagccagcggtggttcttccctctttgaaactcccagccagagaaggggtcctggcctgtcctgagccccagggcttgggggcggagaagatctgcccttcctgctgggtggggccgcgcctaggaaagagagggcaggtggctgactccccagacccctcact

SEQ ID NO: 37508 - DNA, 931 bp, Artificial sequence
  DNA replication origin
agacccctcactgcctaccctcctcctcctctcccaggtaagagcaaagaggcggaaattaagagaatcaacaaggaactggccaacatccgctccaagttcaaaggtaggctgggggcccaacttctggttctgagggaggagggggctgggagctggggctcctgtgacctatcctgtgacccttccttatttctggctcccctttcctccttcctctgccctaggagacaaagccttggatggctacagtaagaaaaaatatgtgtgtaaactgcttttcatcttcctgcttggccatgacattgactttgggcacatggaggctgtgaatctgttgagttccaataaatacacagagaagcaaatagtgagtctggagaggggggtgccagggcctggactcctgggtctgcgggggagggggctggaggtctggactcctggatctgggggaggagggggtctaggggtctggactcctgggtatgagggaggagggggtctggggctctggactgctgggtctgagggaggagggggctgggggtctggactccccattctgagggaggagggctggaagcccagactcctgggtctgagggttgaatctggggcctggactcgtgggtctgagggaggaggggcctgggggcctggacttgtgggtctgagggaggaggggcctgggggcctggactcctgggtctgaggttgaatctggggcctggactcctgggtctgagggttggatctggggccactcagtcacaaggctcctagccatccacgacctccctccccacagggttacctgttcatttctgtgctggtgaactcgaactcggagctgatccgcctcatcaacaacgccatcaagaatgacctggccagccgcaaccccaccttcatgtgcctggccctgcac

SEQ ID NO: 37509 - DNA, 1350 bp, Artificial sequence
  DNA replication origin
ctccccattctgagggaggagggctggaagcccagactcctgggtctgagggttgaatctggggcctggactcgtgggtctgagggaggaggggcctgggggcctggacttgtgggtctgagggaggaggggcctgggggcctggactcctgggtctgaggttgaatctggggcctggactcctgggtctgagggttggatctggggccactcagtcacaaggctcctagccatccacgacctccctccccacagggttacctgttcatttctgtgctggtgaactcgaactcggagctgatccgcctcatcaacaacgccatcaagaatgacctggccagccgcaaccccaccttcatgtgcctggccctgcactgcatcgccaacgtgggcagccgggagatgggcgaggcctttgccgctgacatcccccgcatcctggtggccgggtaaggcactggggacccgttggcagtggggggcctgggggtgatgagtcccagccaagtgtgaggctcagagaggctctgttgcctgcccaaggtctcccagccgagatgtgggctaacgctgggctggggacccagtggttccggtggcagccccatacttgtctcttcccgtgatacgaagctgacttgatggtgtgaggctgctcccggcaaagccagtggggtgtttctgaactgcagaattctaacacctacgataagaggcgtaactgtgctatgtgggtgacggccctccagaacttcctcatcttctccattcattcaccaaacatttactgagcacatactatgtgccaggcactgtgctgattgctggggatgttgtattgtccagagatggacacggtcattgccctcctgtgttcatggtctggagcaggagacaaatggtgatggaagaattgcaggatgaagtgtagaatttgccaggtgcgatggctcatgtaatcgctgcatttggggaggctgaggcaggtagattgcttgagtctaggagtttgagaccagcctgggcaacatggcaaaatcccaatctctactaaaaataccaaaaattgccagggcatggtggcgtgcacctatagtcccagctactcgggaagctgaggtgggaggatctcctgagctggggaggcctaggctgcaatgagttgtggttgcgccagtgtactccagcttggtgtgcacacaggtgagacttctatttctggcagtgtggtcagctagatacccgactcatgttctccctgaaacctaactgtcaatattggataaaagaggaaagacaatattatttaatggattcatgaggtagccagaaaatgaggagcacacaggc

SEQ ID NO: 37510 - DNA, 1341 bp, Artificial sequence
  DNA replication origin
agggacgccaggcaggagtgagaggctgcacaggaaagagagaggcgggaggcaaagccagaagagggaaagtgggagacagagagagaagtgggagagggaggaggtcatgagggcggctggctcccggggtgctcggcccgcgaggccctgttctgagcactctatccacagcgctctgtgcctccaggtgggcaccggtattatccccactgaacacagggggcagctgaggccagggaggtgaagccacttgtccagggccacccagccaggaagaggccgagccaggatgaatccagctcagagcctgagtttgtaaaccttgggctgggctgcctctcagggagagtgggggcctgaggggtgtcagagggcatagggatgccagggccacctccagcagccaatatctaggccacacccacccggctcaggcgcgacacagccagagagacgcacgtcttgaagtcatctgggttcttcttgcagagacaggtgatgaggctgacggcggccgtgaccacaccctgcaggggcagaggagagacaagtcaggcccctgggggaggtggtacctgagagcagaggctcaggagcgggacagggtcgggatgtgtgtgcagtcgggaagatggggtttaggggtgtgcacatgtgtcactgtgcgtgctttaggggtggggtgaggaggccacggggcctcgggcgccatggccagcactgacctgggtgtgtggggtgtccctggcaggaccccaggcagctgggtaaggagcagtgaaggggcgagactctagagggttgggactgtgggggtgggacagtcaaggtttctgcgctggtgcgcaggtgatgggcgctgttgggggaatctccaggtattagaaacagagtgggattttctaagggactgggtggttggtgaggggtgtgggggtcactggacaggatccctggccagccaggggagtgtcagagatggggatgggagggtttctggacacttgggcaggtaatgagtaccggggacactggatcatggtttctggtgtctggtgaacgtcagcgccgagggggaagctccaggaatccagggggatcagggctgaggtgggagccccaggcatccagggggcgtgagggctgaggtgggagccctgggtatccgggggcgtgagggctgaggtgggagccctgggtatccgggggcgtgagggctgaggtgggagccctgggcatccagggggcgtgagggctgaggtgggagccctgggtatccgggggcgtgagggctgaggtgggagccccgggcatccagggggtgcgtgggctgaggtg

SEQ ID NO: 37511 - DNA, 903 bp, Artificial sequence
  DNA replication origin
ccctctccaagcctcagattcctcatctataaaacaggcacagttaacagtccctcgcaacagggctggagtgagagcccgggtagcagggacctcagctatgaggctgatccacgatgctgcacagggtaggcgctgggcctcgggctgcctgcttgcctccccgagtgcagccacgtaaggggacagaggaaccgccccagcttcagagaaatcctgacccagaccctccagtcccacctggtgcgccgtggagcaggaggcccccagatgccagcagcaggccaccccgggttggggagtgcacggcgttcattacctggaggcgggtagcactgcagcagccgcaggagcttcaccgagagccagggtgctgggacgaagtagtaggtgtagtcctggaggtcggtggaggcagaggagacgatctggcggggaagagcaagaaataagttgggggctggggtgggaggggcacgtgggtccacatgccagggtggagcaaatggtgccttccaagggcagtgctgtcagtgttaatggttttgttagtgggttttttttgtagagacagggtctcactatgttgcccaggctggtctcgaactcatggcctcaagcaattctcccacctcagtcccgcaatgtcctggggttacaggcatgagccaccatgcccgaccaatgcaatggttttatgaagcaggaatctgaggctctgggaagggagcgaggaagcgtcaggcacactgaatgggggcaaaactaggactaagcccggctggttgatctttccaagtaatgctggtgtgtggtgggcaggaaaggtctctgctggttcccttctgtgtgacagtttcccagggccccctcctcactcggctctgagcctcccatgcccca

SEQ ID NO: 37512 - DNA, 983 bp, Artificial sequence
  DNA replication origin
cggcaaggttaagacctggatccttgggggctgtgagatgggtcagctggggcccgagtcctccaccttctcctgtcagtttctctcaccatccctctcttgtggcccctgctggcagtgagcccaacctcctggttcgggcctgcaaccagctgggccagttcctgcagcaccgggagaccaacctgcgctacctggccctggagagcatgtgcacgctggccagctccgagttctcccatgaagccgtcaagacgcacattgacaccgtcatcaatgccctcaaggtgtgagcccttggagcccaccccgggcctgccacccccctcagaaagaccagaggctcagaggcccttgggtggccaaccctgtgccaacagggagtctaaaacacacctgggctctgctctccgccctcagacggagcgggacgtcagcgtgcggcagcgggcggctgacctcctctacgccatgtgtgaccggagcaatgccaagcagatcgtgtcggagatgctgcggtacctggagacggcagactacgccatccgcgaggagatcgtgagtgctgtggggtgcgggctggactcttgggtctgaggcaggaggtggctgggggcctggattcctaagtctaagggaggaggggctggggcctggactcctgggtctccagatgggggcagtggtgagcccagatccaggtgagtgaaagcccgacatggcctgcggcacactctctctcacacgccccggcggcaggtcctgaaggtggccatcctggccgagaagtacgccgtggactacagctggtacgtggacaccatcctcaacctcatccgcattgcgggcgactacgtgagtgaggaggtgtggtaccgtgtgctacagatcgtcaccaaccgtgatgacgtccagggctatgccgccaagaccgtctttgaggtcagcatccctgaccctgaccctatgaccccacgacagga

SEQ ID NO: 37513 - DNA, 1758 bp, Artificial sequence
  DNA replication origin
ccccaggctgggctgggcggccgggccatcgaagacgtccaccagaaggttccctgctcctgcagaagccgggggtgctgccgggggaggggctgcccgcagccccaggaggtcggcggagggcgagggcgtcgactgtaggaagcgcaggtcacggtgaggacaggcggcgcccggcaggacccagccccaggcaccctggcagggcccaccccaggggactcaccacagtgctgggggtgggctccatgcccccgttgatgtcgttgctgctggggtccctccggccatcgtccagggcgctgccggcccctggccccttcttgcgtttcagcttggccaggatggacgactcgcgctcggggaagggcggcatctcctccagcaccgtggcctggcgcggtcggggtggggaaggtcagttcgggtcaggaggaggggagggcgggaagggggtgtgcaagaggggtggggtggggggacagggctctgaccaggacgtcggtgctggccactgagctgagggtgaggtactccacggctcgctgctgcagctccacgtcagcattgcgcagctgggagccggcccgcaggacgccctggatggtggccttggtctcggggaagaggttgatgaacttgatgtaggtggacagcagcagcgcccgcgtggccacgctgcacagatggaacttggagtggagcagggagaactgcactggggggctgtgtgcaggagtgggtgtcagcggggccaggttccactgccctctcccagaaaccccctcgagaggtgcccctccctaggatggacccgtcccaggaccccaagctgctggaggggagtggccctccccaggcaccagacaggggccgcagtcacactctgtccacgatcctgggactaagctcctttcttaccctgctaggtggattggggtggaggccgagaggatgggagcccatcactgcctgccctgagacccctggggatcccccaagccctggacccctcagaagcatgtgtgttctcccctgcaggctgaggctccctcacctggagcgggggtccccagcaatcaggttcccaaactccccaaggatgtagccgccaaccttcaccatgttctcgtgacaggcaggggcctggagcgcctgagtggggtggggaagggcgtggagaggacaacaatgagcgccctctccgggatcggtgggtgcagccacctactgactggtggaacactgaaagctctgctgcaggtggggttataggtgggaaactgagtcacagaaaggttgagtgacgggcccaagctcacacaggaagtaaaacagggctgtgggccggaagcagtggctcatgcctgtaatcctggtactttgggaggccgaggcgggcagattgcctgagctcaggagtttcaaaccagcctgggtaacatggtgaaaccccgtctctactaaaaatacaaacaaattagctgggtgtggtggcgcgtgcctgtagtaccagctactggggaggctgaggcaggagaatggcttgacgctgggaggccgaggttgcagtgagccgagatcgcaccacggcactcactccccactccagcctgggcaacagagtgagactccgtctccagaaacaaacaaacaaacaaacaaaaaacaggactgtgtggggcccctttcctggggcagagggaaactaccgagatccgggggccaggactgcacactgggtgccccatgcccatg

SEQ ID NO: 37514 - DNA, 898 bp, Artificial sequence
  DNA replication origin
gggtgcctgtctgcacctggcctgggctccgcacctgtcccgttcccctcccccaccactcccaggactcacttattcagcaactcatcggcttccggaatgggagggccgatgtcctcaggacctgggctggaggcatggagcagagtgagatgggaaggaacttggtggggaggggcaaaggcccagagcgattgagtgcgagaacaagccctaaggacagaaccccagaaccacatatccagacccctcacagagcctcgaggaacctcgcatccatccagcagtggcctccaatgggaatagaaccctggcccgtgcccccgcatcggcagacaccaagtttccctttcctccaagtccctgcctctgctgctcatcaggaacccgttgacgagggctcccagtcccctaactctccctggggacacccgagtccgcccccccgaccgacctcccaccccaggccaccccttactcagcagctggagctgggtcagccagcaaagccatggggctctcgggggcaggcggctccagctcgctgagccatccaatcccagagcagacaagagaagacaggcgtggcaggcagccaattccacataggcagcgagagggcagaagagagacagagagggagggacggaagagggaaggagagaaggagaaaaggaagagcaggctgagaaacggtgacaggaaaggagacaacgaagggtggccagggtcggcggagtccagagtggcagagggagggcgtgagcagggaggctggggcaggggaggcagcagccagggctggcgaaggcatcaggatggagagaggagcgagtcgggggcgggggaggggctcagggaaaacggggacagaggccgagaagggacagccctgggg

SEQ ID NO: 37515 - DNA, 1791 bp, Artificial sequence
  DNA replication origin
accccctgggcccgggccccttctcgcggccacccccagggctgtcccttctcggcctctgtccccgttttccctgagcccctcccccgcccccgactcgctcctctctccatcctgatgccttcgccagccctggctgctgcctcccctgccccagcctccctgctcacgccctccctctgccactctggactccgccgaccctggccacccttcgttgtctcctttcctgtcaccgtttctcagcctgctcttccttttctccttctctccttccctcttccgtccctccctctctgtctctcttctgccctctcgctgcctatgtggaattggctgcctgccacgcctgtcttctcttgtctgctctgggattggatggctcagcgagctggagccgcctgcccccgagagccccatggctttgctggctgacccagctccagctgctgagtaaggggtggcctggggtgggaggtcggtcgggggggcggactcgggtgtccccagggagagttaggggactgggagccctcgtcaacgggttcctgatgagcagcagaggcagggacttggaggaaagggaaacttggtgtctgccgatgcgggggcacgggccagggttctattcccattggaggccactgctggatggatgcgaggttcctcgaggctctgtgaggggtctggatatgtggttctggggttctgtccttagggcttgttctcgcactcaatcgctctgggcctttgcccctccccaccaagttccttcccatctcactctgctccatgcctccagcccaggtcctgaggacatcggccctcccattccggaagccgatgagttgctgaataagtgagtcctgggagtggtgggggaggggaacgggacaggtgcggagcccaggccaggtgcagacaggcacccccgtcatcttgcgccccctgccccctcaggtttgtgtgtaagaacaacggggtcctgttcgagaaccagctgctgcagatcggagtcaagtcagagttccgacagaacctgggtgtgtcccgggggactgtgggaatgggtcggagggagaccttggggaaggggtcagagggactcagatggagctctgcctcccccacctactgcaggccgcatgtatctcttctatggcaacaagacctcggtgcagttccagaatttctcacccactgtggttcacccgggagacctccagactcatatcctctcaggcccggcccagcctcctgcctctccacgtcggccttcctcaccgtggggaagccggctgacccaggtccacacttctcttcagcctctcttgggcacgcaattagttctctgagattgagtgtctgcatctgttaagatgggggtgggattccttcccccaggacaggggatgacagtgaagtggtgtgtgggaggctttacttccagaactccacctgctccaggcctcattttgtccctgtctggcaccttccgtgtcctgccatcgtcctccactgggctccatgtcatgatgccagcaccgcctgcactcaggagccaggcctgcgggtccagacgctgatcaggcctgatctgggctgagtcactttgcctctctgggctctcctgtccccgctgtgaagtgtatgtagaccctcctcttcctcatagggttattgtgaagatcagagtgtctggaaaaccctggaagggcggctggaggtatcagtcccccctgcccgttctctgggcctccattgccacattcatgaaattagaaaagctcg

SEQ ID NO: 37516 - DNA, 1294 bp, Artificial sequence
  DNA replication origin
gaagcctggccacccacactctgcatgccctcaccccacttctttgactacctagcagtgggtgatggacacagacatggggctgttagcgtctctctgtttattcgctcacaataatacacagcccctggatggggagggggtaggaggggctacaacagggtggggtgggaggggaggagacatccacttccctggcccctctcccctctgtgcttgggggggaaagggagggagggggactccccctaaccccccagaatgtaaacagcagcagatgaacaaaaataaaaatacaaaaggccggaggaaagtcccaggcatcccccaaaccctggtgtcttctctgtcaccagtggaggtcccccatccaccaaaactgcctcagtccaaggggctgcccagtgccggccacatcccccggggcagagtccagggctcagaactgctgtgccagcagctcacacaggtgacgggagacgggctccttgctggtgcgcagggtcagccggtacatctgggtgggggcattgggggcagaactcagaggagatggggagcccagggaagtcgggacccaagggagatagaaggaaggaaggataaaggggccagaaaggtgatacaagacacaggagagaaaaatgtaagactgaaatcaacagaggcgccagagaggaagaaaattataaaagatgagagaaaggtggaaaggatatggaaaggtagaaatcagggagggacaggaagaggagaggaacaccagaggttggagacaggagattaaactgatagataaagaggagtaaaagtggacaaagaaatgtgagaggaggagggtcaaagtggggacgtgaattaaagaacagtgaggcaggaagggtggacgcagagatgacaggcggccttcctgccggcctcaggcctcccacagcagcactcacctgggcctgggcattgggctccagccgaagcagacagcccacctgcagggctttagtctggatgatccccgcccccacgaagttctcagggttggggtccacattgtccaggagagcagagccaaaccccagaagctgggaggagggggggcgccgtcagagtgtgccagagctgttagttaccacacagtggcatcccagatcccaaaaaacccttggggatgggaattggccccactttacagatgggaaaacagaggctcagagaagcaaagcagccataggccggcaaacacgcccgcggtctctcaccttggccttagtaacttctgcgtccatggggtggttgg

SEQ ID NO: 37517 - DNA, 1020 bp, Artificial sequence
  DNA replication origin
ccacctcctactcccattttgtgcgacctgggactcagtgtccccgcctgcgcagtgggagcactgtgccttccgctgacctggtgggaagtgcgtggaggtgaccagggtatagaagtttcggaggaggcgccggcgctgttctggtgaaggctctgctgggaggaaaaggcggtgatgcagagcgcctccccggcccacgcccctcctacccctgcccctgcccctgtcctcagtcacctttatcccccaagggctccacggtgaagaggcagcgcttcagttccaggtggaggagcagcagcctgtgggaaagggaagggaatgtcatggctggggaagaggacatgacccccgacccactccctccatccgagccctacccgaggatgtctgtgtgaagggggaagccactgggcagcgcccggggtcccaacggcagacaggcccgcaacgggtccagcagtggctgccaccagcgctccagaagctgcagggggcgtggtcattgtgaggtcgtcatgggaaggcggggccggcgggggaggtcggggggtgtacaaggataggggcgtggtcaatcgggaggggcggggcctgcaagaagagtggagggcggagggcagaagggactggggaaggggcgaggcctggaagaatagaggcagaggcgggagcggccgatcttggcgggtaggtgaatgactggagcgcagtccagaagaggcggggctggggaaagatgccgctggcagggcagggtggtggggaagggccctcctggtagcgggtgtcctaagagcgaaagcgggacgtggcgcgggttcacctgtggatacaactggctgaggggtgggctcggcccgcagagtagacacagctccaggctcggcagcagagtcagggtcaggagccggtgtgggacctgaagcagggcacaggctggggctcatcgcggcccggcccctttccatcgcagatcccgcctcctcgcgactcggcccccaggtcacatccctc

SEQ ID NO: 37518 - DNA, 1210 bp, Artificial sequence
  DNA replication origin
tggggaagggccctcctggtagcgggtgtcctaagagcgaaagcgggacgtggcgcgggttcacctgtggatacaactggctgaggggtgggctcggcccgcagagtagacacagctccaggctcggcagcagagtcagggtcaggagccggtgtgggacctgaagcagggcacaggctggggctcatcgcggcccggcccctttccatcgcagatcccgcctcctcgcgactcggcccccaggtcacatccctccgtcggtgcccgccacccactcaccgtggggctcccgtgcggcaggtacaccgggtagtcgcgagcggtctgcggcggcagggaccccaccagccaggggagcagcacggcctcgggcgtccccagccgccaccaaccctctgttgctgccaccacccggccggacaccaccagactgacgaaggtcgtgcccgcggcctcagcgaacccggagagggcttcctgggtacgggaggcaggaggactgggagtcagcagacaagcgtagggggtggcagcgacttcccagatgggcagggaatggggagaaacccacagccagccccgagctcgcgcagtggccatgctcctacgtctcaccctctctgagcctgagttccttcactttcatacgaagtcacatccccaactcacactgtgaagtctgtgaaatctgattaaacatctagcctgggcgggcaaactgaagctaataatgtaaccgcagcagctaccgttcatccaggcctgttacatgccgagtaggcaccattagcaacgtagagaagccaagtcacctgctgagagtcacatgcctgggaggccgccacaccaggcaagtccacaagagcagtatttaagtagaggtagctagagatctgagaggcaggaggaagaacatgcactgaggttggaaacttgttgggatctcaggactgtgaggtagctgggtggaagtagactgtggatttagcaacaggttagggggtgccaggtgccacaggccttcaaacaccaggctgaggagctgggaccttgtcctgggggaggtggaggctgccggagggctgtgagcaggaaaggggcagagccagctctggatatagtagggttcttctggtggccgggtgtgatggctcacacctgtcatcccagcactatgggaggctgaggcgggaggactgcttgagcccag

SEQ ID NO: 37519 - DNA, 1775 bp, Artificial sequence
  DNA replication origin
actgcactccagcctgggcgacagggcgagactcccgtttcgaaaaaacaaacaaacaaaaaacaaaacacaaaaacgaaaacaagggcagcgtacgcgttgcatagcaaccaggtctcctgcccctccctttgagacaagaggcggacctggacgccccgctcaaagatggcggctgactgagccgctttcaatttatttagcttttgacaataattccgtctaacccatcaggcccctagaagggctaactatgccctttctgagtcttccacgcggtgggggcgaaggaggatggagctagaacgaagcctcagcgcgtgccccgcacaaacatggcagcattcccagcagccctaaaccgcccgacgcgagcgcgcgcgcggcgcaggcgcatttctgctcattccgcggcgtcggctgcggctgcagtggtggtggcgggtaccgcacggggtatggtccccgggtccgagggcccggcccgcgccgggagcgtggtggccgacgtggtgtttgtgattgagggtacggccaacctgggaccctacttcgaggggctccgcaagcactacctgctcccggccatcgagtgagtgctgtttccgcgactctaaccccgccctcccacttcagtttcgcacagtttcttgcctgactccgacctttcacttcctaccctcacaggtattttaatggtggtcctcctgctgagacggacttcgggggagacgtgagtctagggactcctgggcctgagggaggaggggccgggggcctggactcctgggtctgagggagggagaaagggctgggcctggactcctgagtttgagggaggaggggctgggggtctggactccttgttctgagggaggagggcctgggggcctggactcctgggtctgagggtggaggcgctggggcccggattcctgggtccgagggaggagggagctaggggcccagatccctgggtctgagggaggaagggctgggcgtctggactgctgggtctgagaaaggaggagctgaggcctggattcctgggtctgagggaggaggtgctggggcctgggctcctgggtctgagggaggaggggccgggggcctggattcctgggtctgagggagaaggggctggggccgagattgctgggtctgaggaaggaggaagctgaggagttcctggttctggaggaacgggaagctgggagccctgattccttctctaagggaaaagggaattgaggtcccagattaaaagttttctgtcctcccctcccagtatggggggacccagtacagcctcgtggtgttcaacacagtggactgcgctcccgagtcctacgtacaatgtcacgctcccaccagcagcgcctatgagtttgtcacctggctcgatggcattaagtgagctttcccccacttggggtgggttgctggtccctgtgaggggccgtgaatgagtgatggcttggggtggttggtgtccccgtgagaggctgtgaataagtgatggcttggggtggttggtgtccccgtgaggggctgtgaataagtaatggcttggggtggttggggtccctgcgaggggccgtgaatgagcgatggcttgggtttgagctgcaggaaacatctcatacattaagggattgaaaggactttgagggtgattgtgtttttgtcagaagtcacttttgtggtggcttctgtgtgctcagcaatgttgccatcagtttagaagtaggaaaaaccttcccattcagggaggc

SEQ ID NO: 37520 - DNA, 800 bp, Artificial sequence
  DNA replication origin
cagggcatcgcacagcttacgagtcctcgaatcctgcaaggtccaagcatttggggtcctgcggctggccaagtgctgttctggggatggaggggcagaagaagggatctttcctccttcctggtttgccctcacaggatggcccccggaggctcccggccttccccattctcatggccctccttcctcccctctggcaggcaggcactgtggccccaggaggggtgagcggcccttccccagcccagctgggagccccagccctcggtgggcagcagtcagtctccaataagcttctggcctggagcggggtcctggagtggcaagaggtgaggggcctgagggtccattgggcacttgggactcctggggccgtggggctgggcatgtaggactcatggggccagatgcgtggggtctgcagtgctgggtttggaggcattcgttgcgctggacctgtgggatgcggggcgaggccaggagccccatggagtggtgggacttgcggtacagaggagagtccccatgcaaagaacccagaaaagcccaggatttggggcccagagaagagcccaggcgatgtatcatctggggcacagtggatggtgggatttaggggccgggcacgtagctgtaacatttgaggaactgaaggcttgctggtctggaggaggggcctggggctcatgggacttaaactggggaacatcctgagctttggggctaccagggtaggacatgagggctcaaggggactgaggcttatggccctttttactgacatgctcttttttccccct

SEQ ID NO: 37521 - DNA, 1939 bp, Artificial sequence
  DNA replication origin
tgagcccgggataggggctgggggggcggggccgtggaaggctctggaaaaagggcggggggctcaccatgggaggggccgagcgggcccggatccgcggaggctgcgggcctcgggggctggcaggccaggagcgcgagcggacggcgcgcaccacgaggggccgcggagggcggccgcgacccccgagggggcccccggcgccggagcggtacggggcacggcgcggacggaccatggcgggcgcgggccgagcgggcggggagctgccgcgggccacaaggggggctgcgggctccaccgactgaggggcgcgggcgcgggcgcgcggcttcgggggagacgggctgagccgtaccaagctcgggggacgcgccgccggagtggggtcgccgcggccgaaccactgaggcgagcgggggagcccggcgcgtaccaagcgcgtccgagggggcgtggccggagcgtaccaaggcggcgcgggggagcggggcccgggcgggagcggagtgtgggctcggcggtcctgcgggcctctccggcgcgggggagtcctgggaagacgcgcgagccacaacttcagggggcgtggcgggaacgggagcccctaccgaatggggtggcagaagaacgaaggcgacaccaagctggccccttgcgggggtcgggacggcgggagacctcatccggagccctgggcccgcagagccaggagaccgcgccaaaatacatcagggaagaggggaggacggaataatgggcctggggacaaaggaacccactgaaagggaacccactgagggtacggattgcacccgagcctgagacagctgaaggtttgcagtcggtgacgtggcgaggtgggcaagggactccaactcccagcgggccccgcgcggcctgggcggggccagctgtccctggaggctccgcccattagccccggcgcccaggctccgcccgccgtccctggcgactccaagcttctcgccactcacgtcgctccccggccttccgtggattcgctcattcgctctgctaaaatggaatgactacttactagtagttgtataagatttttccctcgatttttgttccttaaacgtgggtaatacctaaccctagagtggttatggggatcgagcccgaggggctgtgcttgactgcttggcgcagtcactactcaaatgttagcttttctttaaaaacaacaacaaaaatctgttatgagtaccctgtccagttctgtgctcggcgacgaccgaatcagaccacgtccctcacaggccccacggtccactggggagagacataatcacaggctgtgctaagtgttaactagcgcacatccacagggcgatgggatatgaccatagcgaggtaaagttagcaagcaagggaagtcaagaaaacgacctgtgagcaacctgccattccagatggctggaaaagtgtgcaaagaggacagaacagcaaagacaaatcctgaaagtagaaggaataaaagggagccagtgtgggcggagtcgagtgaaggtagagaggagaaatagacacagctgtaggaggttagagacggagtccctacttctgtttcggatgttgactaaacaatgtagatagatattgatgtcatagcctggagagagaaattcgggagtcatcagtgtttgaatggagactggatgagctcacaaagagactgggacactcatccctttagcagtcacgacaatgagaagcaaccagcaaaggacacggaggagtggccagtgaaatggcagaagaacccgtaggcctgtccatgttttcctgcccaggggctcccgagggctgactggagcccagccttaaaccccaaatccaacctgcattgtggccaaacggagtcagtgctccctgaacacaaactgcaagttagttatcaacaggtacctcc

SEQ ID NO: 37522 - DNA, 1475 bp, Artificial sequence
  DNA replication origin
aggaaacccacgagagtttccccgtaataggcgcctccaggcgggggaaaacaaattataagggtgatttatttttatcttattacaaacaggtattttccaaattttctatgaagcacaaggagatctttccttccagaatactagcaaacacaaaaaattttattttgtgagtgcttaaaaagagaaaaacctgaacaaacttgctctccacccacgcaggtgattctccacccacgcaggtgattcttcacccacgcaggtgattctgacttttgggcagtcgtcagaagatcagatagaaaacctgagtatcttggcgttagaatgagttggacagagagtggatgttgccccgggggcttcaggcaccataccggacatccagcatctgagatgagttaaaacgcacagctggaggtgactttcgagatgagggtacacttacaacatacaagttgtttatggcgctgggacctgaggtatctagtccgcatatacagtgacacgtatgcatttactgccacaaagatgggtaaaagtcaggagaacgcacttaagagcccaagcgacatacttaatgtctgcttgtctaggagagcaggttgactcaggacttcaaatatgctgggatctggagccatagtaaagaacacatatgcttgcctaaaacccagggataccttccacagcaggagcagcacatcaagatgggacgatcatatttaaaaacgacggttaaggtgcaacctaaagtaaatctcacatcttggcaatcgtgtgcaaaactgcgcgcctgacatccctattgcacagggaagcccatctagtacttgcactgaggtttaaaaccttggggtgcatgtctgaggacccggaaagcacttttgaacaactagatgcgaatgctgcaggaaggggcgaaggcagtggagtgaaggggtacgtttaagttgtgggaggtgatctaagtctcggtatccatgtttatgaccccaggaagcctgtttaaggtttcagtagggctgccacagctctgtgccatccacaccgctgaggcagtgtatttaagaagcggacccgagcgcgaacccaggggaaatctcacatcggggcaagcgtgtgcacggtgcaaagtcgcgatgtgcggttttacagccccaggtaaaccttacggtttctgaaaagcatgtgcatcttttgggtccggagaagcgtgtgcagcccaaagtacctgcgaagctgaatgtttacgtttaaggtctgggctcacggcagtccatcaaagcatcccacatgtgggcgcgggcgcgtattctaggtgcgcactccacgggcacggagcggccgccaggggagaacgcccacgggtgcgacatctgggggcgctggtacaaagcgcgggcccctccctcgccgctgtcccccaaaaccgcccccatttccaggtttcctgcccggagagcgagcaactc

SEQ ID NO: 37523 - DNA, 781 bp, Artificial sequence
  DNA replication origin
tcaaaaaaaaaatagtaataaaaatagtggggagagtgcctgtgagtagcatttgtggcgttgcttggctttattgctagaactttctcttggtgttctacatgttttggtctgtgagacccctctgggggtggtgtcccagctgtcttccaaatgtttcccccttttcctcgctgtctttctcctggatggtttagtcccctctgtgtttcttgtcatctccttcctgcctccccccggggtcagacttataaggccagagaggtgggcactggcctgagccagaggaaggaattgaactttgggatgacagggagctttaggagagtttcagcctgggaaagacagggcaagctggtgtgtgggacagacacagcgcaagccggcttgtgcctgtggaggctgcaaggaagccctgggcccagcctggggcacggggaaagccccctacagctggcttctaacttgggtctcaagaatcgatcaggcgcacagctggggcaaaggctggaggtggggctggctgaaggcttcaggactctgctgggccagtgtcaaggtgacagcaggctctgggaaggaagggtcctgagggtgggcagcgggaaaggacatgaggaccagcgtgtgggggtcctgaggggtgagcagagggtttggacatggccccgtgggcttccagcaggggatttggggctgaatattgggacgtcccctctggggtgtgtggggactgcctgtccttgcaggccccggcctcagttttcccacctatccccca

SEQ ID NO: 37524 - DNA, 1208 bp, Artificial sequence
  DNA replication origin
cagctgatccctcagcagctgctggtgagacccgcccctcccaccccatccactctgagcacccccatgcctggctgacccagctgtctgtcctgtcgcccccagaccaccctgggccccctgttccggaactcccagttggcacagttccacttcaccaacagagactgcgactcgctcaaggggctctgccgcatcatgggcaacggcttcgtgagtggggcgggctcccttgtagcactgtggtgacaagtacagctggaggcagcgctctgctcacacagtccaggcgggggtcggggggtctcccctggggccgagggtagccctcgtggcctctcggaccccatctggaaatgactgactccaggcaccctccgtagagcacagggtgaaggaactcagcctgagaggcctccagtttctgcatctgtgcccagcttcgaggtggccctgggggcgtgagtgcagggagggactggggccagccctgttggggcccaggagcctgtcggggacacatagcgtatggcagggacctggtaaatgggtgtgctaggcacaagagccagccaggagggagtggcacgttggggcttggtattctggtctgtaaaatgggctaacctccccgagtggcctgagctggccgtgagggagcagagctgagggtgctgaagcaggcgcggtgagtaggtcctcaggcctggctccaaggggacccaggtatccagccagtggctgtgcagggactgagtggggcaggcgcggccatgacctggacccggggggctgccaagggatctgagagcggcttccgcagcactccagggttgggctggttgaggggtagagatgacattttctgaggtagggaggacaggggagccgtgcttcctagggccaccgggaggctggagggagggaatttgtgtaaagcgcttgagatggtgactttagtacctagtgagtgctgggtgaacccagctggtgaggctgttcaggtgactgagattctggcgcagggcaggtcagaaagggggcttgggctgtgaaagatggcaggtgctggagaggaggcaggggtggggtgggagcgagttgtctgcccagaggacctggctctgggacattcccagtccctgttccctgttgggacagtctgcctctacccgtcccagctgccgttgagcgccctgggttccgct

SEQ ID NO: 37525 - DNA, 861 bp, Artificial sequence
  DNA replication origin
cgcttgagatggtgactttagtacctagtgagtgctgggtgaacccagctggtgaggctgttcaggtgactgagattctggcgcagggcaggtcagaaagggggcttgggctgtgaaagatggcaggtgctggagaggaggcaggggtggggtgggagcgagttgtctgcccagaggacctggctctgggacattcccagtccctgttccctgttgggacagtctgcctctacccgtcccagctgccgttgagcgccctgggttccgctagggcctcccttctccctcaggagaccaggggcagaccagggcttgtgcctggcatgaggtctcttaagtgacccgttcccccttcacccagcaccgtttgttgagggcctgccatatctgggccccgagtacccagtctgtagggaaagtggacatccatactcaccccccaggcatggccctgggaggctgactgtgcatggctccagggaggccagggacagggccctgagcgggtgatccctgggctggacaccaaggttgagaagttaggccggcagcgtggaggggacagcactgtgggggtggcccggtgtggggaggggacatggggttttgggacggtcacaccacttcatctagacaccacagccaggcacatctgtcaggcttagttctcccatgcgccatcctcaagaggcaccagcactttatctgttgagcctttatgtggcaccaactgtgtgcactattacccggttttacagatgatggaggcccagaagcaggaggtggctggtgttaggtcacacagctaggaggcagcagaacggtggggcgctgcctgtgctcttaacccccaggccaagt

SEQ ID NO: 37526 - DNA, 1557 bp, Artificial sequence
  DNA replication origin
acgcctgcaatcccagcactttgggaggccgaggcgggtggatcacctgaggtcaggagtttgagaccagcctggccaacatggtgaaaccccgtctctactaaaaatacaaaaattagccaggcatgatggccactcaggaggctgagtcacaagaatggcttgaacccgggaggcagaggttgcagtgagctgagatcatgccattgtactccagcctgggcgacaagagcgaaactcagtctcaaaaaaaaaaaaaaagtttcctcaaggaaacccagaaaggctccatgtacctcagcccttgcttgtgctgggccggccgctgcagatccctcgggctcctgagttgaagccatggccggttggctcaggtggctgtggtgaggtggccccagacacagcctggcctgcccaggagctctgaaatgcaggttcttgggcccttcccgacagagcctgttggcctttggcccacccattgctcttggccaccgtgtcatcccaataagggggcccacctccagggtgggtggggggtgtgaggacagagcagttaggctgtgcctggctcatggagcccacggcatgatgccgtggttggagggatgctggtccctgtggtgctgtctggtgacaccacgccctgtgcctgccaggccggctgcgtgcacttttcctacaaagcatcgtgtgagatccgcgtgcttatgctcctgtactcttcagagaagaaaatcttcattggcctcatcccccatgaccagggcaactttgtcaacggcatccggcgtgtcattgccaaccagcagcaggtcctgcagcggaacctggagcaggagcaacagcaacgaggggtgaggtggccggcctccagggctgctcagtctccctccacccccgctgcctgctcaccactggcctctgatttctcgccgtagatgggggggtagtggttaccccgggctgggcccctccaggagtcacagatgaggcccccgcagagactggtgagtggtgaccctgtcatgtacaggagggaccctggggcatgtggggggggtggggttgggaaagaagcagggcgaccttggccttggggagagcagagcagagggagaggcagcagtcccagcggtcctaggctgtcgggaaactgcagcccagcctcagggccatgggaggtggtatccaggcctgggtggggccaggcctctgctcacagggatgtggggtcagtgcttgggagcctgtggccagcagcccccactgcacccctgcccccaggtgacacgcttctgagcaggggcccctggggacttcaactgcccagcaacatggaggatggtgtcctgaggcctccaaggacggtccccacccctctacgtttccccaataaagccttttaaaaacctgcctgccttctctgctcactgcccgatgccttgcagccccctagctctaaggtggcccagcaggctggacagcccgggaactcactgggtctggctctcggctgtccacaccctcttcccccccgaatctccagacccgcag

SEQ ID NO: 37527 - DNA, 1071 bp, Artificial sequence
  DNA replication origin
gtgaacagggtatgaccaggcttttgccgccccaaatctattataaagttcccatctccacctctcaactggtttggggcggctttcctccatcattgcctccccgtccccgctcggggtcttctctccccctgggtctgccgatctgtttgtgacctctcgtgtccccaggacacgctaggctcctggcagcgctgtgtgaccacgtgtgagacagccctgaagcaagggaaacgggtcgccatcgacaacacaaacccagacgccgcgagccgcgccaggtagcgtgaccgcggggccgtaggtggcctgcggcggggtgggcggggcctgcacatccagctccttcccccacaggtacgtccagtgtgcccgagccgcgggcgtcccctgccgctgcttcctcttcaccgccactctggagcaggcgcgccacaacaaccgggtgagcccgctcagcccggacaccccccgggctgcaccccctgacccccctcctcccctgacccctgggcctgccgcccctctgatgttccccacagtttcgagagatgacggactcctctcatatccccgtgtcagacatggtcatgtatggctacaggtactgttggggatagcagggggcaggggcactggctgggccacatgatccaggctgtccctcactgttcccaccactgccaggaagcagttcgaggccccaacgctggctgaaggcttctctgccatcctggagatcccgttccggctatgggtggagccgaggctggggcggctgtactgccagttctccgagggctgagccccgcccagctcccctccacaataaacgctgtttctccttgagcttggccggcattttgctggaaggagggtggtccccacgggggaggggctccaggcctgccagtttcttacatggaggaggctttaaggacattttcaggtaacaaaaggtggggccctaccgaggggagtccagctgggacctggcatgagcactttagacattagccggggaacacacagggagggcgctgtgtggccccccgagagccagctggtgag

SEQ ID NO: 37528 - DNA, 1214 bp, Artificial sequence
  DNA replication origin
cagcctcggctccacccatagccggaacgggatctccaggatggcagagaagccttcagccagcgttggggcctcgaactgcttcctggcagtggtgggaacagtgagggacagcctggatcatgtggcccagccagtgcccctgccccctgctatccccaacagtacctgtagccatacatgaccatgtctgacacggggatatgagaggagtccgtcatctctcgaaactgtggggaacatcagaggggcggcaggcccaggggtcaggggaggaggggggtcagggggtgcagcccggggggtgtccgggctgagcgggctcacccggttgttgtggcgcgcctgctccagagtggcggtgaagaggaagcagcggcaggggacgcccgcggctcgggcacactggacgtacctgtgggggaaggagctggatgtgcaggccccgcccaccccgccgcaggccacctacggccccgcggtcacgctacctggcgcggctcgcggcgtctgggtttgtgttgtcgatggcgacccgtttcccttgcttcagggctgtctcacacgtggtcacacagcgctgccaggagcctagcgtgtcctggggacacgagaggtcacaaacagatcggcagacccagggggagagaagaccccgagcggggacggggaggcaatgatggaggaaagccgccccaaaccagttgagaggtggagatgggaactttataatagatttggggcggcaaaagcctggtcataccctgttcacgtggacatatccggccgacacgaggtgcttcttgagaaaggtggacttcccggctgtgtggggggcagtgtcggtgggtggcctaggacccaggcggggctcagggcacgcgcacaggaacaggacacttacccccagggaatcccactgcgacaaccacctccgggctggcgctcaggagggccctggactcggggaggcagagaggccctgagcgggagacagtcctctgcgaggggcgggggacacgcgtgagatgccgtccccatccccgggagccctcccatccccacccccacccccgccccagggcctcaccggatcaaaggctgggagctcgaagccggctgctggccacttgagaaagaactcctcaggcgtggcgaagggcaggccaaggttgagggcaaactaggggttgaggacgaacatcagacacagg

SEQ ID NO: 37529 - DNA, 919 bp, Artificial sequence
  DNA replication origin
ttccttcgttcattcgtttgtgtgtgcatttgttctgaagtttagcgcattcttgagctgaaggtatcagtgagcgggacggcctgctccagcagggccctcacggcgagggcggtgactctaggcggatgggcagactggcgtgtaaaacagcaggagggagggagctggagaaagcaggcatcacccgtggtgggcagggatggcctctgaggaggtgacatcagaggaaaaggcctaaggcagggaaaggagggagccaggtggacacctggggaaagcggtccccccccttgtgggagtgacagcaagtgcaaaggccctgaggcagtccctagcctgggctagttagggacagcgaggcccatgcggctggctctaagcgagggaggggagagggcagggccacagggagggccccgcttttgccctgagggagggggaacctgggaggcgccggcacgccggaggctggagctgtagcagggtgggtgccctccggtggccgcgtggggaacgggaggaggtgaagtcgggagacctggagggagggggctgtgtggagagaccacggaggggggagggggccaggagcacggtgcaaagtggctggagagtgaggacatgaaaggtcgggggatgattcctgatgtggggcacagaccaggcgaagcagccccagggacccgctaccgctgcggggggacatttgtgggaagggcctcctcactaccgtctcccgtaggccaacgacggcacgcccatatccatcggggacagcatctttgtgggaggtaagggcctggaggctgctgagggtgggctgggacgcctccctccgagctggtgggaacggggtgtcccgtgtgttccagacgcagccggacgcccggccaactgggccccggggcggaagaag

SEQ ID NO: 37530 - DNA, 984 bp, Artificial sequence
  DNA replication origin
gtttgaagctcctgggctgggctctgctggcctaggtgggtcctcctcacccttcactgagcctccctgaagcagaggggaaactgaggcactgaggggacatgtgacttccctgagaggcagagctgggactggaacccaggtgtgtttcaggaaggagctgtgggctttgagggaggaggcctgggtccccacagtccccccctcaagcctcagtgtccttatatgcaaaccagcagtcacagtggtgaccttttctgtgcatcctccctcaatgaagcagtgagcactgaagaccaggaacagggcctggtgcgggcggggtccacctgctgctgctctctgtgcttgcgactcatggcaacacagttaattgaatgctctggcctcttgcgtgctgtgcccgggggctggtctcccactgggctcaggtccagttcctgatctgggtctccgggtcccatcctgcgaggggacaggcccagctccgggtgacgggggctgtagtggaggcagtactaggtgccagaactgcaggctccttggcgggggctgacacagcgagggatcttttctgtagcgcagtggccacatgataaggcagtaacagctgattatctcagccctcacagagaccctgttatccgccccatttttcagaaggggagactgaggcctagggaagcaaaacctcttgctcatagtttgtcagcggcagaggtctgattggaacatgactgaaaccccagcccagatcctcagacatgagacggtgcactcagccttaatggctagcaggcaacagcacttccactgtgtaggaagcaatgtcctaggccaagaaggggagagggagaggggcaggtaggcttcgtggaggaggtgtctgaaccgggtagaagggttcctacgtggagcaagacggggaggggcactgctggcagtgggcatcgcagggcacaggtggcagggcagggacgtgct

SEQ ID NO: 37531 - DNA, 1373 bp, Artificial sequence
  DNA replication origin
agaaactgggttggtttttgccgatgaccaggcaggctgctagaggaagttgtttttgaggtgaaggaaatgggtctcagaagcttcagggaggtggaggtggtggctgtggcagtggccgtggctgaggaggaggacacatggagcatggctaggtgctgcctggcctgggcctctaactcaggtcatccacagggctctttgtgatggatgaggacgccaccctccaggaccttccccccttctgtgagtcagaccccgagagtacagatggtgagtgtcccaggctgttcccctcccgacctgagggcaggcacacggccgacacaaaggcagggacagaagctgaagtccaccctctctttcagatggcagcctgagcgaggagacccccgccggcccccccacctgctcagtgcccccagcctcagccctacccacacagcagtacgccaagtccctgcctgtgtctgtgcccgtctggggcttcaaggagaagaggacagaggcgcggtcatcagatgaggagaatgggccggtgaggggcaaatgtggggaggtagggagggcagctggaagggctctgagccgcctcctccaggaagccctccagcatggatgctgctttccacccataagctaactgaatcctcccctcaacctcaagaggcgagttcttggacacgagccttgcagttttaacaattgcagccttaccatgtgtcctagtgccttatagagaaggcctctcctttccaggagcgtctctatttatagaacacctgctctgggcaaggcacaggtgttttggcatgccctccagtggagaaactgaggcttggagggttcagatcacctcccatccccaccctgcacattcctagccctttgcagaatttgtcccaccccctggtcccctgttcaccccttgtagcaacccctgtttgaagctcctgggctgggctctgctggcctaggtgggtcctcctcacccttcactgagcctccctgaagcagaggggaaactgaggcactgaggggacatgtgacttccctgagaggcagagctgggactggaacccaggtgtgtttcaggaaggagctgtgggctttgagggaggaggcctgggtccccacagtccccccctcaagcctcagtgtccttatatgcaaaccagcagtcacagtggtgaccttttctgtgcatcctccctcaatgaagcagtgagcactgaagaccaggaacagggcctggtgcgggcggggtccacctgctgctgctctctgtgcttgcgactcatggcaacacagttaattgaatgctctggcctcttgcgtgctgtgcccgggggctggtctcccactgggctcag

SEQ ID NO: 37532 - DNA, 1855 bp, Artificial sequence
  DNA replication origin
cagaggacgtcgccagggtctgggcctgcgaggactggatggtgagaatcctggggagtagcaggtttggggaggacacacagcaccgctgggacaaggtgggtggagggtggtgagtgccatccaggggacgggcgggcactctgagtgggtggcgatgatgtaggccgccaagcctcagccccctctgtcctgctctggcccgcagggcgcggatggcgtcggggcgccccgaggagctgtgggaggccgtggtgggggccgctgagcgcttccgggcccggactggcacggagctggtgctgctgaccgcggccccgccgccaccaccccgcccgggcccctgtgcctatgctgcccatggtcgaggagccctggcggaggcagcgcgccgttgcctccacgacatcgcactggcccacagggctgccactgctgctcggcctcctgcgcccccaccagcaccacagccacccagtcccacacccagcccaccccggcctaccctggccagagaggacaacgaggaggacgaggatgagcccacagagacagagacctccggggagcagctgggcattagtgataatggaggtgagagggtgggggcaggggcgggtgcggcccagcgcttgaggtgcccgcaggaggctttgtcggggtgggggcctgcttagcccagagtacttctacagaagtgcagtctcaggaccccagagccagacaggcttgcctggggcttgctgtgtgatctaaagccagtcccttccctgctctgagccttactggtcctggggccagctctgtgctgggagtggtgggcacaaggacacagagcaggctcgggcttttttctcaaggggctcccggtctagccaaggaactggagtcccggtgggggttgggaggctctggggcaggtcatgggtagaaccagagtcgtttccacaacgcctgggaggccaagcaggagttaaagagttgtctgggatgcagccaacatctgaggaagccagggagggagcagccagctgttttggggggaatttgggggtcgggcacttcccggaggctggactgtaacgctagggctttgcggagttagtaggagtttgatcagtcactaggaggtccttgtttgttgttattaccaatggcaggcctcctcaccattgctggagaaaacccgtgtagggtgaagggcaggcatcctgagttcaaatcctggtggtgtcccttagtagccatgggacctcgggcaagtgacttaacttctctgggcctccaggtctccatttgtgaaacagaggtcatagtcattgcatgtttctctaaggctgtgttttgagtcacattgtcccgaacagatcgtagaggtttcatgttagcagcccgttgtgtgcagctgagagggtggcagatccatagaaactgggttggtttttgccgatgaccaggcaggctgctagaggaagttgtttttgaggtgaaggaaatgggtctcagaagcttcagggaggtggaggtggtggctgtggcagtggccgtggctgaggaggaggacacatggagcatggctaggtgctgcctggcctgggcctctaactcaggtcatccacagggctctttgtgatggatgaggacgccaccctccaggaccttccccccttctgtgagtcagaccccgagagtacagatggtgagtgtcccaggctgttcccctcccgacctgagggcaggcacacggccgacacaaaggcagggacagaagctgaagtccaccctctctttcagatggcagcctgagcgaggagacccccgccggcccccccacctgctcagtgcccccagcctc

SEQ ID NO: 37533 - DNA, 906 bp, Artificial sequence
  DNA replication origin
ttctgtagaagtactctgggctaagcaggcccccaccccgacaaagcctcctgcgggcacctcaagcgctgggccgcacccgcccctgcccccaccctctcacctccattatcactaatgcccagctgctccccggaggtctctgtctctgtgggctcatcctcgtcctcctcgttgtcctctctggccagggtaggccggggtgggctgggtgtgggactgggtggctgtggtgctggtgggggcgcaggaggccgagcagcagtggcagccctgtgggccagtgcgatgtcgtggaggcaacggcgcgctgcctccgccagggctcctcgaccatgggcagcataggcacaggggcccgggcggggtggtggcggcggggccgcggtcagcagcaccagctccgtgccagtccgggcccggaagcgctcagcggcccccaccacggcctcccacagctcctcggggcgccccgacgccatccgcgccctgcgggccagagcaggacagagggggctgaggcttggcggcctacatcatcgccacccactcagagtgcccgcccgtcccctggatggcactcaccaccctccacccaccttgtcccagcggtgctgtgtgtcctccccaaacctgctactccccaggattctcaccatccagtcctcgcaggcccagaccctggcgacgtcctctgccccaacccattcctcctgccccaagtcactgtactccttcccctttggccctgccctggcctctgtgggagccgccagccacatgtgaacagggagtactggaaaggcagggagtcctagcagagagtcctagcagagaggcctctaacaataaaacctgcactgggttctgaagactgagtacaataaagccgaacgagccgggcgt

SEQ ID NO: 37534 - DNA, 1181 bp, Artificial sequence
  DNA replication origin
gccttgtgctcctcagctgtgccttcccagctgaggtaccctaggaggaacttccaggcctcgcgccgcaggctggggctcagaccctgggggtgcaggagggcaggcagctcagtggggccttgttctggccctgccccattcttccacctgtcctggcactcacccccgagaagatccggttcttcagctcagggacctgctgcaggcgaccttcagggcccacgtggcgtgcccactcctcctctgtaactggagggccccgctccacggttggccgaggccccagctccacctgcaggcaaagagcaaatgagcctggggctcggcggggtggtggggggacccaacccagcctcagtccacaagctcagagagcttattagcttgacggatgactaacattcaggggcaggcagcagcctcttccggggctcagcagccaagtcatcccccagttaggaggggtcccccaataagggtgagcaggtgctcacagtgtctggcagagccatgagcgctttcctcatgcaccccctgagggtgtcccattaccatccccgttttaccaaagaggaaactgaggcccagggaaatgaaatcatgcgcccagggagacacggccagaaataacagggagggtccactcactactcacacaggaaatgacctcgaatccaggctcgggctcatcgtcgggtggcgggggaaggtcggaggcggctccctcaggctgtggctgcagggcaccccggaagaagttggtcactcgggagaagctgctgaaggtggtggagtagggatcctggaggaagcgctggggacgaggccaaagggaggtcacggcccgccccttctcgtccctccctgcccacacccgccaggcctcctgctggggacactcactgacaccacattggagctgtcctggtcaaagagctgcaggtggtggaaggagttggagagagcagaggagtcgtgggggaagacaaggtagaggcgggagtcctgcggggagctgggaggcgggaggtgacgcacaggtgatgcacaggtaggggcccagtgtcccaggctgtctgtgctcggccgacatcggttccagctgcagcgtcccaaccacccctgggcaacccctcatttcagggaatgctgttaaaggaggcccacagctggatccc

SEQ ID NO: 37535 - DNA, 2044 bp, Artificial sequence
  DNA replication origin
gaggctgaggcagggtaattgcttgaacccgggaggcggaggctgcagttagccgagatctgccactgcactccagcctgggcgacagagcaagactccatctcataaaacaaacaaacaaaaaaacaaatcaggcaactcaggaagccctgcctccacaaaccccaatcattcaccctaggctctgcccagccaccatcccctcctcaaccaggtcagagcccacttggcagccttccccccaccaacaagaagccaactgcacatgagaagtgtcagtttaatgaagccagcttatcagcagggcggcggagcacacctgccccctcgcaggtgtgcctggctcgggctaaagtgcctgtgcagaacgaggctgcctggcggggttaggagtcggcgccctcgtcctcctcctcgggcaggatctccaggctgctgtcgggctgcggggctgtgtccgtggagggcggcggggtgggcggggcccgggtgggcgacagaggcagcggggaggcggtgggcgaggggctgtggggctctgcgggcggggccagccccaggatctcctgcacgttgtggggcagctcctggaggcacgggatgagagaagcgaaaagcggaaggtgaaggtgagaagggggcgggggtcggtcggggttcgggcggggcgctgcggggcggacggggactcacggggcaggcggttagctggcggtgcagggcctcggcgcgggtcagcacgtcctccacgctcagcttcatagtcagctcgttgatgtgctgcgggagggggtgggtcaggcgccagtcggcactcaaccacctccgcccgagcgcccactctgtgcttcgtgctgggaaacaatgaagacacaccgggctggccctctgggggctcagaagtgcgctgggcgagacatgcttctcaggcctccgggagcattctgagcacgtactcggggagggaaggtccccacccacctgcccggaggaccttgctgggagcaggcatggcatggggcagaagggaaacctacgcggccccacccccactgcgctcccaactaaccaggctttcaataatcccacactaaacacctgctccccggaggtactgcggccctgggcagcgcccagctcaggggggacagggcgggggcggggccggagcctcaccttgaggatctcattggagccgaagccggacagcatgagggtgtccctctccatgtccaggatggcgcaggccaccagcaggtgcagattggggccagggagccctgtccacagcacctgagggtgcgggacagagggagggagggaggtcatagcccagcctgggcctgaggtcccaccagggtctgtccctctccgcccaacctcccagggcaggtgagcccaccccttcaggcctctcgcccaaactggctggcccacctcccacagccgaaggacatccgggaaggggaattccctcttgaaccagatgagcagccaccggaaacagaagcagagagagccggagtcctgggaatctgggggatgacatggagcccactcagccttgcccagcgctgggactgagagtttgagaagtcatcctgactggaagaccttccccaagtctaggcaagtgacttatgcctggctggggaacctcggaggtgaggcaggagcagccctgaacgcgggccctgcccctccttcctcccactctccagaggaagtgtgctattatacttccacatctgccatggacatggaagggaggcaggacgcccagcacgcccgacgaaacagacctctgcccgctgctggtgagcgctaagggaactgacactcctagatacgctgtagcaaaaatttaagctgaaggccgggtgcgatggcgcacgcctgtaaccccagcactttgggagggtgaggcgggtggatcacctgaggtcaggagttcgagaccagccaggccaacatggtaaaaccccatctctactaaaaatacagcctggccaacgtggtgaaaccccatctctactaaaaatac

SEQ ID NO: 37536 - DNA, 1973 bp, Artificial sequence
  DNA replication origin
gctgtccgggcttgtgctgttgaacgcgcccgtggtggcgatgacccagggaccgcacgatgtgcacgtgcagatcgagacctctcccccggcgcggaatctgaaggtgctgaaggccgacgtggtgctgctgacggcgagcggaccggcggtgaagcgcatcaccttctcgccgccgctgccccgccacatgcaggaggcgctgcggaggctgcactacgtgccggccaccaaggtgttcctaagcttccgcaggcccttctggcgcgaggagcacattgaaggcggccactcaaacaccgatcgcccgtcgcgcatgattttctacccgccgccgcgcgagggcgcgctgctgctggcctcgtacacgtggtcggacgcggcggcagcgttcgccggcttgagccgggaagaggcgttgcgcttggcgctcgacgacgtggcggcattgcacgggcctgtcgtgcgccagctctgggacggcaccggcgtcgtcaagcgttgggcggaggaccagcacagccagggtggctttgtggtacagccgccggcgctctggcaaaccgaaaaggatgactggacggtcccttatggccgcatctactttgccggcgagcacaccgcctacccgcacggctgggtggagacggcggtcaagtcggcgctgcgcgccgccatcaagatcaacagccggaaggggcctgcatcggacacggccagccccgaggggcacgcatctgacatggaggggcaggggcatgtgcatggggtggccagcagcccctcgcatgacctggcaaaggaagaaggcagccaccctccagtccaaggccagttatctctccaaaacacgacccacacgaggacctcgcattaaagtattttcggaaaaagccgtgtggtccagcctcccccgtggctcagttacttccccagtttgcctgcatcggaaccactagccctgcagttagcaggcgccacgcccatcctggagcccccccaaaaatctgcccctcacttcttcctggacagtggggctccagaggagggtggggggtggtgcgcacagagggaaccggaaggacgccctgcaccaccgggaaatggcaatcacagcgaccacctctgtcacgaggctgaagtccagatgggccctaatgcaagtaacagaaagcccagctgacagtggctgaacaggaggtgatttttctcacaagcagcagctgggagggcaggctccccagagtgcatctctgcaggcccttccaccttggttatgtccgggaagtgttcccacacagctaccaggtcgccgccacagcccagagcaccctatcctcttccaaaaaccccaaatcaggccgggcgcggtggctcacgcctgtaataccagcactttgggaggccaaggcaggcagatcacctgaggtcgggagttcaagaccagcctgggcaacatggtggaaccccatctctaccaaaattacaaaaatcagccgggtgtggtggcacacgcctgtagtcccagctactcaggaggctgaggcagggtaattgcttgaacccgggaggcggaggctgcagttagccgagatctgccactgcactccagcctgggcgacagagcaagactccatctcataaaacaaacaaacaaaaaaacaaatcaggcaactcaggaagccctgcctccacaaaccccaatcattcaccctaggctctgcccagccaccatcccctcctcaaccaggtcagagcccacttggcagccttccccccaccaacaagaagccaactgcacatgagaagtgtcagtttaatgaagccagcttatcagcagggcggcggagcacacctgccccctcgcaggtgtgcctggctcgggctaaagtgcctgtgcagaacgaggctgcctggcggggttaggagtcggcgccctcgtcctcctcctcgggcaggatctccaggctgct

SEQ ID NO: 37537 - DNA, 1898 bp, Artificial sequence
  DNA replication origin
ctcatgtgccacgcaaagacaggcagggaaacaataggtgccagatgtgtaggtgggagagccctgagggcaggtggtctgggcactgtacactgttcacagaaccagagctgccataaaagacatggactgaggtaagtggggatcttggttctgctgagattcagggcaaagagagtgaccatgaggccttccccagagagtcagaaggcgggtacctggcacgcagtggctcacgcctgtaatcccagcactttgggaggccgaggcaggcagatcacttgaggtcaggagttcgagaccagcctgaccaacatgatgaaaccctgtctctactaaaaatgcaaaaatgagccaggtgtggtggcaggcgcctgtaatcccagctacttgggagggtgaggtgggagaatcacttgaacctgggaggcagaggtttcagtgagctgagatggcgccactgcactccagcctgggcaacagagcgacactccatctcaaaaaaaaaaaaaaaaaaaaaagacattgaggggctagcaggggccttgaacatgaggctgaggggcaagaattctgtggctccaggcactggggagctacaggagggctgtgggcaggggacggacggtagataaacttctcagccatcatgccctgtcagcactgaccagtggcacaggggaccagcttctgtccgtggccacagtgattcaggcaacaaataatcactgagcccccgggaggacacagcacgcctgggaccctctcccagtctcctctccagctgcccacatccctgcctccatggagctcacagtctggctggctggctgaaaaataggcaaaataacacgcaaccgggatgagctgtgaccagccgggccagccgaatgaggggggatgggcggcgttaacagttcggtaatatcggaggagcagtggcatctgagttgccgtggagggcaaggcggagggcatggtgtgggcaaaagcccaggggcttgagagtggtgaatggccagccgtgggcagaaccacgaggagaagccgagtgtgggctccaggcccggcctccaccctggctgcccgggcagctcagcaccatgtctgcttcttccacaacaggccctcaaagacctcaaggcactgggctgcagaaaggcgatgaagaagtttgaaaggcacacgctcttggtaagtggggatcttggttctgctgagatgcagggcaaagagagtgaccatgaggccttccccagagagtcagaaggcgggtacctggcaccctagtcctgccaccgccttcctgcctgacccgggggctggacacgccccctgtctggacctccgtttccctcatctgtcagagagtggggacaggatcctacggtccaaggacatgtcatgggaccaggaggcccagctgcggaggggctctctcaggggtgcagcctgcctgggccctaacctcggcctgtgcccaacctgcaggaatatcttctcggggaggggaacctgagccggccggccgtgcagcttctgggagacgtgatgtccgaggatggcttcttctatctcagcttcgccgaggccctccgggcccacagctgcctcagcgacagactccagtaaggggcggggctggcgggcagggggggggggcggggggcaatcagggaaagtagcagggagtgggaggagcctctgggtctgggggcggggctgttgtgaagggcgtggcctaattgatggtcgcggggctaagggttcccagataaaggacacggcctaggggagaagtggtggggtccctggtgacacaatccactactcctgcggcctttgggatgtcagggacgggcggggtcgggagaggtggatgacgggggagcgggccg

SEQ ID NO: 37538 - DNA, 858 bp, Artificial sequence
  DNA replication origin
tggctccccgctgcctccaggacaaagtctgatcttttcaggctcagctttgagccctgactggccttcccttctgcacccctccagcctcatgctcttttctcctctaagaaatttttgtcctcatggtggtccacatgcccccagctctgtgttcctcacacccactatacctgtgtatcaccctccctttccagaatgcctttcccttccccacacaggaactcctgctcagccctcaagaactagctccaatgtcccctcctccaggaagccttccctgatacctttagggaggaactggccacacccaacatcccctccccacccaggtcagagcccacttgcccatctccccttctagaccaggatgggggccatgtccaggtcatttctatgccttgacactgactggtttgggagtctgagagatgcgagatgcatgagtgagtgaaggggcactgccttccctctgaggtcctggccagaagggggaagccaggtggaccaagaagaaggctgaaattagatgggggcagcaaggcttctgggagggggtgagattcgaacaaagtgctgaagaacacgcactcatgtgccacgcaaagacaggcagggaaacaataggtgccagatgtgtaggtgggagagccctgagggcaggtggtctgggcactgtacactgttcacagaaccagagctgccataaaagacatggactgaggtaagtggggatcttggttctgctgagattcagggcaaagagagtgaccatgaggccttccccagagagtcagaaggcgggtacctggcacgcagtggctcacgcctgtaatcccagcactttgggaggccgag

SEQ ID NO: 37539 - DNA, 1404 bp, Artificial sequence
  DNA replication origin
ctgggattacaggcgtgagccactgcgtgccaggtacccgccttctgactctctggggaaggcctcatggtcactctctttgccctgaatctcagcagaaccaagatccccacttacctcagtccatgtcttttatggcagctctggttctgtgaacagtgtacagtgcccagaccacctgccctcagggctctcccacctacacatctggcacctattgtttccctgcctgtctttgcgtggcacatgagtgcgtgttcttcagcactttgttcgaatctcaccccctcccagaagccttgctgcccccatctaatttcagccttcttcttggtccacctggcttcccccttctggccaggacctcagagggaaggcagtgccccttcactcactcatgcatctcgcatctctcagactcccaaaccagtcagtgtcaaggcatagaaatgacctggacatggcccccatcctggtctagaaggggagatgggcaagtgggctctgacctgggtggggaggggatgttgggtgtggccagttcctccctaaaggtatcagggaaggcttcctggaggaggggacattggagctagttcttgagggctgagcaggagttcctgtgtggggaagggaaaggcattctggaaagggagggtgatacacaggtatagtgggtgtgaggaacacagagctgggggcatgtggaccaccatgaggacaaaaatttcttagaggagaaaagagcatgaggctggaggggtgcagaagggaaggccagtcagggctcaaagctgagcctgaaaagatcagactttgtcctggaggcagcggggagccactgggggctgtgagcagcatcactctgggtgtgtgggaagacgtttctggtaccaggctggggagactagagcctgggcagcttgagaggaggctgggggagggtccagggcagaggaggaggcctgagctggggcaggcagaggggagcagggcacaagcgtcaggcggcaggggtgggcactgatggtgggggaggtgggcgaggaggaggtcaggaggaggatggctcctaggggtctgcccgtgactgcgggatggtggggccatcgtgagatgggggcaccgggaggaggaacaggtttaggggaagcttctgagcccagtgtcctggggagggacacagatcagggtctcgggaggcagatgtctccatcagcccatggatctatgtttaagccagaggtggagactggggaggttatccaggacagtgtgtgggtgaaaggggaagaggccaaaagctgatgcagctttggggtcagcagtgtttacggggaagctaaagaagggagttggggccgggggcagtggctcacgcctgtaatcccagcactttgggag

SEQ ID NO: 37540 - DNA, 1659 bp, Artificial sequence
  DNA replication origin
ggagactggggaggttatccaggacagtgtgtgggtgaaaggggaagaggccaaaagctgatgcagctttggggtcagcagtgtttacggggaagctaaagaagggagttggggccgggggcagtggctcacgcctgtaatcccagcactttgggaggctgaggcaggtggatcacgaggtcaggagttcaagatcagcctggccaagatggtgaaaccccgtctctattaaaaatacaaaaattagctgggcgtggtggcgggcgcctgtaatcccagctactcgggaggctgaggcagagaattgcttgaacctgggaggcggaggttgcagtgagctgaaatggcgccattgcactccagcctgggtgacagagtaagactccatctcaaaaaaaaaaaaaaaaaaaaaaaaaagaagggagttgagagatgacccatatgtgtagaagcccctgggctggcccattctcattctcggatttcagtgagtaggtcagtggttagacctcatggcacacatccccttggtagaatttccatctccaccaacaggcgccccaccccatggaggggactgaagggatgccagagagaagaaaagccgggccggggcgagcttaggaggaggacagagaagtcagggcgggaggagggtgcaggcggtacccacctggttgagagccatctggtagatgtcttcgggcgagtggcccttttcctggggacgcaaggcgtagcccagcttctcgggcaccttctccaccacatagttgcgcagcttcacttcgtgcacctccgtccacgtgttcttgtcgtactgggtgaacttggtcaggttgagccccaggccctggcagagcttgtggaggatcctgatcaggggagtgggtgagtgagggccgggctccagtgggggtggcctggtccctagtgggacttggagaagaggggtgggaggggagagtagctggggaccagcatgaggctgggggtggggctagatttggggtaatcaatgctgggggatgggaatgaaatggggacaaggctggaggcctcagggcagtaccaggattaggattgggttaagagtgggatagagcccagattagaattgggaagggggacagagtttgggttggacgggggtttgagatgaagaaggggcctggggctggggtgcctgagggtgtggggatggtggagctgcaggcctggaggggccagcacaggagctggcttttgcaccaggcagggccagctggaggtctggttggaccaggtggcccgagtgttgccagaggcccagggctggcgctggaggcaagactgaggtgaggattaggcgaaggatggggttggaggctgggtttgggagtcagagtggaagttcgggcccactctggtgtgggcatggagctggggggctagttgagtctaggcacacaggtgggtgggttgctaggtcacctgtgagagctgggcatgcgcatggctcccagctccccaatccagcccgtgttctggtcccggtaggtgaagatgcggcccccgatcctgttatctgcctccaggatggtgacctgagggagtccgtggggcgaggagggcccttcagctccacccactgaccatcccctgccctctaccaccccg

SEQ ID NO: 37541 - DNA, 1297 bp, Artificial sequence
  DNA replication origin
tgggccaggccaactttcccctccaagtccctctccgtcaggtgtcgccatgtcctgcagggccccccatggttccacttccctctccacttgccacccagagcctcagtctccccctccgttacatgggtgtagcagtggggctggcagccgtggtcccggggtcaggacgtgggctctgagcccgccctcccctctgtggctctcgtctacagctgtcaaatgacgtctacagacgtcacagtgttttaggatcaagtgagtgaatccaggttaagttctgtggccggaacctggggtagtactggaagctgctcctttggaaatgccagctgctgtggccgcaggggcactcaggggttctatgagtgaccacccggcagagggaagcgcccaggcttcacccatccctgctttaagaaccacctcagtgctcagggcagggagtggggcggcaccttggagtgggtgggggtggagaaacaatagcagggactttccttggggtgggggagagggagccaggggctccgtgaggaggaaaaccagagggaggcagattctctgcagcaagggttgggtgggggttggagggcattaacaagaaggaagatgggaaactcccgcagtaaatcaaagagggatgcggttatggccgggaggggctggggggtgaatgtgagtaacaaggcatgtgacgcaggggcgggaggccgtggcaaagggaaatgatcaaagagctggagagttcagggaccgaaagagcttgggtcagcaaaaatagtgacgagggccaggggtggctcacgcctataatcccagcactttgggaggtcgaggcaggcggatcacctgatgtcaggagttcaagaccagcctggccaacatggcaaaacctcgtctctactaaaaatataaaaattagccgggcatggtggcatacgcctgtagtcccaactactcaggaggctgggacaggagaattgcttgaacccaagaggtggaggttgcagtgagctgagatcgtgccactgcactctagcctgggtgacagagccagactccatctcaaaaaataaaaaataaaaataaaaaatagtaatgagggccgggtgcggaggctcactgctgtaatcctagcactttgggaggccgaggtgggaggattgcttgagcccaggggctcgagaccagcctggccaagatggcgaaaccctttctctaaaaaagaaaaaaatagtgacaaaaatgttcccatggcgatcacctgccttggaggccgcctggtgctcagggc

SEQ ID NO: 37542 - DNA, 1032 bp, Artificial sequence
  DNA replication origin
ctctggaggctgaggcaggagaatggcgtgaacccaggaggtggagcttgcagtgagccaagatagcgccactacactccagcctgggtgacagagtgagactccgtctcaattaaaaaaaacaaaaaaaacaaaaaacaggtgtggtagtgcactcctgtagtcccagctactagggaggctgaggtgggaggattgcttgagcccgggaggttgaggctgcagtgagccgagattgtgccactgtgctctagcctgagtgacacagcaagaccccatctctcaaaacaacaacaacaaccacccagaagtcccccaaggtgagctgcacatatgcctggggccagaggagttttgtgcaacaaccctctgtgataaggacaaggggattggtgcagggccccacccactctggggacccaaaaactcctgggacatgccctgggagccagttggctgtgggcctccacacctttccatggttgtttccactgttatgcggctgtaggactgaacaagctattgggcaggggccggggacctggggcccacccgacctggtgaggaatgccagcactgccattccccactgtgggacccaggtcgaggcacaggcgaataaggccccaatcccgccgcgttcatacttgacatgtcgctgtgaatgaaactctgagacctaggccaagccttttcccctctctgtgccccagggtcctcctgtcccaccctctcgccatctccaagcctcagtttcctcaactatcaaatgcaggcattgttgttggttttttgtttgtttgtttgtttgtttttgagacggagtctcactctgtcccccaggctggagtgcagcggtgcaatctcggctcactgcaacctctgcctcccgggttcaagcgattctcctgcctcagtgtcccgagtagttgggattacaggtgtgcaccaccacgcctggctaattttttatatttttggtagagacagggtttcatcattttggccaggttggtcttgaactcctgacct

SEQ ID NO: 37543 - DNA, 1220 bp, Artificial sequence
  DNA replication origin
ggtgtgttttttttttttctaaacgattcttcgtgcttggttgttcctgcgcagtagcccaccagtgccccgtagtgaaagagctgcggaccctgaatggccgcacatgcgcattgatccccaagagggcggaggtgtaaaggcaattggaccgctcgggcgacgtagcatgcgccttggccctcggcgcagagccgcgtgtggacgggtggcgttcgggtagccgttctccgcgtgccccctctaccctcctccaccctccctgccccacgttgctctggctcacagcccagcttccttccttttaaaccaggcacctgctgaggcggggactggcttagattgacagggcagaaggcgggacccagaggcaaccctctaagtgggtggggatagaaccactgtcgtcacgatgggtgggatttcggaagcacattgtgagaaggggcggggctaaaccaaccgttagttgaggggtggggtttcgatgtgacaaagaggcggggcctctggggaatcgggggaggggcggagctaaataaacaatgaggggcggggcttggaggggcagcggcagagcgaggagtgggatttgagtggataacattgctgaagggctgcggcctggggcagttcccctgggaactggtttgggatggaagctaggaaggcagtggggccaaaaggaaatattttagaggaaggggcgtggctggaagaaaatgtccctgggattgagtttttccttgaggcgaaatattctgaggtggatgggaggggcctaaggtaattcccctgggagacctttaggttttttttttctgtattgggggaaggggtggggcatcggtcctactttaggacctaaagaaattcccttgggagtgggtggggctcagagatttgggtaaagaaagggcaaatttagaattcggagaggctgaggcttagtgttctaaacggtggttggaagggggagggaggagcctcatggacgtgcctgggggtgtggcttggcttccccttgattttggccggtggatgacgctgtcctgaccacacccactcttgtctcacgcgtgtaggtcttccactttcgccttggtgcctgtcttcgcccacctgagcatcctccagagcctcgtgccagctgctggtgcagcctctcctgttgccatcagtgcccagcacctgtgctacagccatgtcactcctggcga

SEQ ID NO: 37544 - DNA, 1005 bp, Artificial sequence
  DNA replication origin
taaagaaagggcaaatttagaattcggagaggctgaggcttagtgttctaaacggtggttggaagggggagggaggagcctcatggacgtgcctgggggtgtggcttggcttccccttgattttggccggtggatgacgctgtcctgaccacacccactcttgtctcacgcgtgtaggtcttccactttcgccttggtgcctgtcttcgcccacctgagcatcctccagagcctcgtgccagctgctggtgcagcctctcctgttgccatcagtgcccagcacctgtgctacagccatgtcactcctggcgaccctggggctggagctggacagggccctgctcccagctagtgggctgggatggctcgtagactatgggaaactccccccggcccctgcccccctggctccctatgaggtccttgggggagccctggagggcgggcttccagtggggggagagcccctggcaggtaagggcaggtggaaggtggagctggggagtggagggcaggggaagatgggggaggaagaactcatccatgtattcaataaatattgagtgcctacaatgtgccaggcactgttttaggtgctgaggatacggctgggaacaagaagaacatggtctgtgccttccagcagctcacactgtggggagtagaccagagataaattaaatgagagtgtattggaataagtcaaaaacacctagcagctgagctacaaaatgacaaaggggacctaatatagaatgggtagccagaaaaccttctccaagtaggtaacatgttgactgaggcataaatgatgggaaggaagccaggcatgatggcctgtaatcccagcactttgggaggccaagcggggagaattgctttagtccaggagttcaggacgtgggcaacatagcgagacctcatatctataggaaaaaaaaaattagccaggcatggtggctcacgcttgtagtcacagctacttgggaggctgaggtgggagga

SEQ ID NO: 37545 - DNA, 772 bp, Artificial sequence
  DNA replication origin
ttcaaggccccttgctgggcaaagcacaaatgagagccagctttggacccgctgttagggctgcccacctggccagggagagcccatggcaggtggtggcagtggtgttgctgtgcagtgtataatgtcctgttgatggcacaaccgggccttcctgcgcatgtatgtcaatggccgccatgggacatctgtggacctacgcacaggcccaggagggacagagttcctccgcctggaggggtctggggaagacttcttgggaggccaagccctcgagctgtatctcaaagggagaacagccacctgccagagctcagggtggggaagaccacccaggcagcgagagcgatatgtgcagaggcatacgtgcgtggatgtgtggcctcgtgggcctaggagtcctttggtgtggctgggacatgcaatgggaggaaggagtggggagatggagtcagagggtggccagtgtgtgctggggagccatgggagggagggtgggctgtgagcagggagggtcagggacaggtgtaaagagaccctctgggtccacatggggatacacaggaggccagcaaggagttgaggtccagggagaaaggttgagggctgagctggccccagatccatggggcagaggaggacatggggcagagagagttgagaaactggagggtggggctgggggatggcgaaggcagggtcagagaccagtgactgggcaggtggtgggagctggcccgatgggccaggcagagaagtggaggggctgggc

SEQ ID NO: 37546 - DNA, 747 bp, Artificial sequence
  DNA replication origin
ccctgtctctactaaaaatacaaaaaatcaactgggcttggtggcaggcgcctgtaatcccagctatttgggaggctgaggcaggagaattgcttgaacctgggagacggaggttgcagtgagccgagatgttgcagtgagccaagattgcgccactgcaccccagcctgggcgaaagagcaagactcagtctcaaaaacaaaaacaactaaaaacaaaacctgaaggcagtgaaagagtggggcatgcaggcccataagggaagaggcgtccaggagggagcggcaagcgcacaggctgaggcccaggcgtgctgaggtgtggaggggcagccaggaggccagtgtggctggaatagcaggagggtcgggaggtggggtctgaggggaaatggggacctggtcccttcacctcacttggggaagtatgagcagaggaatgatgggctctgactgtattcacaggatctctctggtggctgcgtgaagacgactacagggacaagagaggggagcagagggcaagaaggcttctgcataagagaggtgaggaccagggatgtgggaggtgcggagaaggaagtgggctgatactgcactgattgtaaagagggagccaacaagatttgctgaaggggtgggtgtgtcacggggtgcgagacaaagagaactcaaggatgatccccagggtccggcctgggaaactggatgaatggagtgctattcatggcaatggggaagtctaggg

SEQ ID NO: 37547 - DNA, 1372 bp, Artificial sequence
  DNA replication origin
ccttgtgctctaatattcgttttccaccaagttttacgacccgatcacgctgtttgtccagcacccatactgcttacgggctccggtaatgggcagctccagcctgcggcgtagacagttgccatggagaaagacaggcgtttccagagttgacggttgccgtggagacaaaagccgcccgcacgcagtgggggcggggcttacagaacgtattttgcgattgatccacaggaaatagacgcagctgcgtggatcgccttctccaccccacatactgaagccagaataagccacgacttcgtgtgctccacgcgagggccgcctgacgccagagtttctcccgcatctgccatcagaggaccgtcgccctcaggagcccgagctcccgcggtactctgggaagggtagttcatcagggagtctgacaggcgcggaagtatccgtggggccggggcagcgtcgccaccaacgtggggatgctggtggggagcaagcttcgcgtgggaggccgatccgaggtccaagcccccatttgccaggtccttgagggccccactgtctagtgacattcatcacttgccctccccattttgggcccattttggcctgaaaagtggccccgagcagttggggatttaggccaccgagaggaataggggcttgagaatctgacggcagcctgtgaggctgcaggggtggggacgggtttagaggcagcgggggtggggttagggcgtggccaggagccgagtcagcacaaggattggctggagtaggcggggaagggaggtggttattagagaactgaacccaggaggccggcgtgggcggaacctgctgatgctcgttttgagaatccttacactgagtatcattcttgagtccactgaagaaactgaggctcagagagggcagtggacccttaagttcagtaattcattagaagggctcacaaaactcagcaaagctgttatacttgattgcatttactacagctaaagaatagagattaaaaccagcaatgggaaaaggtgcataggatggagtctaggagagaccaagcgtgagcttccaggtgtcctctgccagtaaagtcatatggaaagcatttaacgcactcagcaatgatgtgtgaccgcacacaaagtgttgccagagaagctcacccacgccgtggtacccagggttatggggttggttatgttgacagggctgatcaccctgactgaccttagtctccagcccttccagaagtcaagctggaatttagctggggtatcagttccgacaaggggtccccatctctgaaatgttgggggagaccttggccctagagaagactttgctgctgctttataccttgacctcgttt

SEQ ID NO: 37548 - DNA, 1004 bp, Artificial sequence
  DNA replication origin
aactcgagaggcggaggttgcagtgagtccaggttcaccactgtactctagcctgggcgacagagcaagactccatctcaaaaaaaaaaaaaaggtaaggaaatggaggcaccaatagattaagtcacttgcccacaatcacgcagtgggagaaaggggatttgaactcagagtctacactcttaagtacaacatgcacaagtgcagtaatagcaccttgagctaggagctgtgaaaacgctgagaagcggtggcctagttatcacggaaggccacttggaggaggtgacctgtaagcttcatcgtgaaacacatgaaggtgcttgccaggcagaaaaagcagggaagggtattccagacagagggaacagcatgtgtgaaggcccaaaggtggcaacacacattcaggttgaggtacggacaggtgcttcagtgaggtcagggcatggtgtacaatcaggggtggatggtgaagatgaggccagagaaagcacaggctgagtgacacagggcaccgagtgccaggctgaggggctgggacttcatcttgggggtactggggaagcaggggagggtgtgagcaggggagggagggggttagctctcagtatggaaggatcccctggggcggtgtcaactggaggggtaagtctgggggccaggaggctggggtgagggtccaggggagagaagctgaggcctggccaggggcaggagggacaaggctggggactgatgggctgtgacgggacaaggggagggtcgggtgagaattataacgatgacagccattgaagccactaccgactctgtgccaagctctgggctctgctctgtatctgttaattcatttattcctcccaatcctagacactcatgtcacctccttttcacagatgaaaaaaatcaaagcacagagaggctaagtgacttgcccaaggccacacagccaggaagcaatcagctgggatttgaacccacacaacccgactcccgagcccacg

SEQ ID NO: 37549 - DNA, 814 bp, Artificial sequence
  DNA replication origin
gagccctgagtctctggtgagcttctctggtgataacatttcccatgtgttgtcacctcttgctgctgggagaattaaaccatcctatgtggctccactgggagaaggttctggaagcttggcctggtttctcctggatggcgccccgggtgcccttcccctttgccagctgtgctgtctcctttctctgtaataaaccatcactgagcgtttaactaagggctgagtccctggcacccgctaacaaatcagtcacctgtggtggtcttggggaccgaccctgatggagaagtttgggccacgtttttaatgagaccacatttttttttttttgagacagagtcactctgttgcccaggctggagtgcaatggcgagatctcagctcactgcaacctccgcctcccaagttcaagtgattctcccacctcagcctcctgagtagctgggattacaggtgcccaccaccatgcccagctaatgtttgtatttttagtagagatggggtttcactgtgttgtccaggctagtctcaaactcctgacctcaaatgatctggccgcctcggcctctcaaagtgctgggattacagatgtgagctactgcgtccagcctaagccacatttttgatgagtttgtccagagaaagtgcgtgagtgaggagggctgaggatggagacgtcacatcaccacagctacttacaggggaacataaagacggagaacgacaggtccaggaaggtgggaagtgaaaccagcaagggggctgtgctgaggtgcaggggcaagacgaggcctgggcagggctggggccg

SEQ ID NO: 37550 - DNA, 966 bp, Artificial sequence
  DNA replication origin
atttctttctttctttctttcttttttttttttgaaacggagtctcactctgtcacccaggctggagtgcagtggcgcgatctcggctcactgcaagctccgcctcccgggttcacaccattcttctgcctcagctcccgagtagctgggactacaggcacccaccacaatgcccggctaattttttttatttttagtagagatggggtttcaccgtgttagccaggatggtctcgatctcctgacctcgtgatctgcccgccttggcctcccaaagtgctgggattacaggcatgagccaccgtgcccggccaactctgacatacatttctgctgttagaagctacccagtttacagcattttgttagagcagctcaaactaagcaagtcagggccgaggatggtgcccgggggtctggtctggagacctggggggatgtggggccaaccagaggtggggacctggaggaagagaagcaggacggtgggtgaactgagctcggcgtggggtggatgtgaggggtgggaggtggggagggctatgcctggaggcaggaaggtgggcaagtgcaggatctcggagacacactaggggacagcgtttatatgctctggggagaagatgccgaggtcagattgggacctgttgattgggaacatgtccgggaggcgcttggagcctgagattctggactgggcgttccagtgtggagcctgaagtccggggacagggaggtcaccatgtgtggaagggaaagcgttagaagaagctggatgaccaggcacggtggctgacgcctataatcccagcactttgggagtccaaggtgggcacatcacctgaggtcaggagttccagaccagcctggccaacacagtgaacccgtctctactaaaaatacaaaaattagccagcatggtggtgtgtgcctgtaattccagcaactcgggaggctgagacagag

SEQ ID NO: 37551 - DNA, 1254 bp, Artificial sequence
  DNA replication origin
cagcacatgtttcagggagcacagggttgggggtaaggtcacagatcaacaggatcccaaggcagaagaatttttcttagtacagaacaaaatgaaaagtctcccatgtctacttctttctacacagacacggcaaccatccgatttctcaatcttttccccacttttcccccctttctattccacaaaaccgccattgtcatcatggcctgttctcaatgagctgttgggtacaactcccagacggggtggtggccgggcagaggggctcctcacttcccagtaggggcggccgggcagaggggctcctcacttcccagtaagggcggtcgggcagaggtgcccctcacctcccagacggggcggctggccgggaggggggctgacccccccacctccctcccggacggggctgctggcctggcgggggctgacccccacctccctcccggatggggtggctgccgggcggagactctcctcacttcccagacggggtggctaccgggcggaggggctcctcacttctcagacggggcggttgccaggcggagggtctcctcacttctcagacggggcggccgggcagagacgctcctcacctcccagacggggtcgcggccgggtagaggcgctcctcacataccagacggggcggcggggcagaggcgctccccacatctcagacggtgggcggccaggcagagacgctcctcacttcctagatgggatggcggccgggaagaggtgctcctcacttcctagatgggatggcagccgggaagaggcgctcctcactttccagactgggcagccaggcagaggggctcctcacgtcccagacgatgggcggccaggcagagatgctcctcacttccccgacggggtggtggccgggcagaggctgcaatcttggcactttgggaagccaaggcaggcggctgggagatggaggttgtagcgagccgagatcacgccactgcactccagcctgggcgccattgagcactgagtgaaccagactccgtctgcaatcccggcacctcgggaggccgaggctggcggatcactcgcggttaggagctggagaccggcctggccaacacagcgaaatcccgtctccaccaaaaaaatacgaaaaccagtcaggcgtggcggcgtgtgcctgcaatggcaggcacttggcaggctgaggcaggagaatcaggcagggaggttgcgtgagccgagatggcagcagtacagtccagcttc

SEQ ID NO: 37552 - DNA, 1551 bp, Artificial sequence
  DNA replication origin
ggaagtgaggagcacctcttcccggccgccatcccatctaggaagtgaggagcgtctctgcctggccgcccaccgtctgagatgtggggagcgcctctgccccgccgccccgtctggtatgtgaggagcgcctctacccggccgcgaccccgtctgggaggtgaggagcgtctctgcccggccgccccgtctgagaagtgaggagaccctccgcctggcaaccgccccgtctgagaagtgaggagcccctccgcccggtagccaccccgtctgggaagtgaggagagtctccgcccggcagccaccccatccgggagggaggtgggggtcagcccccgccaggccagcagccccgtccgggagggaggtgggggggtcagcccccctcccggccagccgccccgtctgggaggtgaggggcacctctgcccgaccgcccttactgggaagtgaggagcccctctgcccggccgcccctactgggaagtgaggagcccctctgcccggccaccaccccgtctgggagttgtacccaacagctcattgagaacaggccatgatgacaatggcggttttgtggaatagaaaggggggaaaagtggggaaaagattgagaaatcggatggttgccgtgtctgtgtagaaagaagtagacatgggagacttttcattttgttctgtactaagaaaaattcttctgccttgggatcctgttgatctgtgaccttacccccaaccctgtgctccctgaaacatgtgctgtgtccactcagggttaaatggattaagggcagtgcaagatgtgctttgttaaacagatgcttgaaggcagcatgctcgttaagagtcatcaccactccctaatctcaagtacccagggacacaaacactgcggaaggccgcagggtcctctgcctaagaaaaccagagacctttgtgcacttgtttatctgctgaccttccctccactattgtcctatgaccctgccaaatccccctctgcgagaaacacccaagaatgatcaattaaaaaaaaaaagaaaaaagaaaacaaacaacccaatttaaaaataggcaacagatctgaacagacacttcaacaaagaagatatgcagatggcaaataagtaaataaaaaggtgtggtggggtggctcctgcctgtaatcccaacactttgggaggctggggcaggaggatcatttgaggccaagagtttcagaccaacctaggcaacacattgagacgccatctctataaaaaataaaaagaaaaaggtcagatgttgtggctcacacctgcaatcccagcactttgggaggccacagctggtaattcccttgagctcaggaggtcaagaccagcccaggcaacgtggtgaaaccccatctctacgaaaaatacaaaaaattagccagatgtggtggtgcacacctgtggtctcagctacttggaagggtgaggtcggaggatcacttgagtctaggaggcagaggttgcagtcagcagagatcgtgccactgcattccagcctggatgacagagcgagacc

SEQ ID NO: 37553 - DNA, 1077 bp, Artificial sequence
  DNA replication origin
gttgggggtaaggtcacagatcaacaggatcccaaggcagaagaatttttcttagtacagaacaaaatgaaaagtctcccatgtctacttctttctacacagacacggcaaccatgcgatttcttaatcttttccccacctttcccccctttctattccacaaaaccgccattgtcatcatggcccgttctcaatgagctgttgggtacacctcccagacggggtggtggccgggcagaggggcccctcacttcccagtaggggcggccaggcagaggcgcccctcacctcccggacggggcggctggacgggcagggggctgacccccccacctccctcccggacggggcggctggccgggcggggggctgaccaccccccccccacctccctcccggacggggtggctgccgggcggagacgctcctcacttcccagatggggtggctgccgggcggaggggctcctcacttctcagacggggcggctgccgggcagaggggctcctcacttctcagacggggcggctgggcagagacgctcctcacctcccagacagggtcgcggccgggcagaggcgctcctcacttcctagatgggatggcggccgggcagagacgctcctcactttccagactgggcagccaggcagagggattcctcacatcccagacgatgggcggccaggcagagacgctcctcacttcccagacggggtggcggccgggcagaggctgcaatctcggcactttgggaggccaaggcaggcggctgggaggtggaggttgtagcgagccgagatcacgccactgcactccagcctgggcaccattgagcactgagtgaacgagactccatctgcaatccccgcacctggggaggccgaggctggcggatcactcgcagttaggagctggagaccagcccggccaacacagcgaaaccccgtctccaccaaaaaaatacgaaaaccagtcaggtgtggcggcgtgtgcctgcaatggcaggcactcggcaggctgaggcacgagaatcaggcagggaggatgcagtgagatggcagcagtacagtgcag

SEQ ID NO: 37554 - DNA, 917 bp, Artificial sequence
  DNA replication origin
ctgcccggccgccaccccgtctgggaagtgaggagcgtctctgcctggccgcccatcgtctgggatgtgaggaatccctctgcctggctgcccagtctggaaagtgaggagcgtctctgcccggccgccatcccatctaggaagtgaggagcgcctctgcccggccgcgaccctgtctgggaggtgaggagcgtctctgcccagccgccccgtctgagaagtgaggagcccctctgcccggcagccgccccgtctgagaagtgaggagcccctccgcccggcagccaccccatctgggaagtgaggagcgtctccgcccggcagccaccccgtccgggagggaggtggggggggggtggtcagccccccgcccggccagccgccccgtccgggagggaggtgggggggtcagccccctgcccgtccagccgccccgtccgggaggtgaggggcgcctctgcctggccgcccctactgggaagtgaggggcccctctgcccggccaccaccccgtctgggaggtgtacccaacagctcattgagaacgggccatgatgacaatggcggttttgtggaatagaaaggggggaaaggtggggaaaagattaagaaatcgcatggttgccgtgtctgtgtagaaagaagtagacatgggagacttttcattttgttctgtactaagaaaaattcttctgccttgggatcctgttgatctgtgaccttacccccaaccgtgtgctctctcaaacatgtgctgtgtccactcagggttaaatggattaagggcggagcaagatgtgctttgttaaacagatgcttgaaggcagcatgctccttaagagtcatcaccactccctaatcgcaagttcccagggacacaaacactgcggaaggccacagggtcctctgcctaggaa

SEQ ID NO: 37555 - DNA, 942 bp, Artificial sequence
  DNA replication origin
gccacttcctccctaggcacagggcctggggtccatggaaatgttttcactgtagtatctttaaaagccagaagaagataaatgaatataacaacagtaattatgatgatgcatagaacataatgaagccaacttggatgatatttgtctttctaccaatgcatccaccaaatataacttttagcgtttttttttttttttttttttttttttttttttaatgtaagaagaggcccacaaaggcaaaagtgctgaggacccgggaaagttgtaatgtggcccagaggtggagaaaaaggaaaatgaggaagaaagacagaaataagatgagagaaaggtacggggcagggggcgggagggagaagagggaggagagagacagagagaaaaagagagacagagactaaagtgactgaagaggagactcccaaagtacacagtgacccatccaggggagtcgccatttttgaggggcccagtgggttccacgggggactgaggagggggcaaggatgactcacgagaccacgatgaccacgaagacaaagacagccagagacacagaaatgaggatgcccaacagcgcctggttcctcgggtatttgctgtccatctggtactgcagggccacgcggggttgccggtcgactggggcgggtggggaaacagccccgacctccacgtcaccacccctccttagccccatacccaccccacctgttcattcagcagcctggggcaggggtgggggtggggcgctctctcttcttctcttcctgcttgttccctgccctctcctggggtctgagtctccatttatccattcctctagtgctctgtctcaggcgccattgtaggcatttgggatatagccgggaaccaaactggcaaactggactcatggagttgacagtccaccccgcatatcacagttatcacagt

SEQ ID NO: 37556 - DNA, 1362 bp, Artificial sequence
  DNA replication origin
cacaggctctgaggccgggcagcccgagttcaagttctcgccctgcctcctactcactgtccgatttggggcaagttgtacaacctcatcatcctcatctgtagatggggacaatgccattgcttcccttacagcacaccgtgaggatgaaaggaggcgctaggccttggcatgtggcctggcacagagtccacactctcaacccatgtgggccgtgggtttggttcagcgtccactaataccaggtgtccaggacacacagtgattcccttcagtttcaggtcagcccagtgagtgccatggtgcagtgaggaaactgagggacaaagagaggaagcctcctgcccaatgtcacacagaacatggggttctcaaacagagtctgaaaggcaggcaggcaagaggaaaggaaggaagggaggagagaagggagggagggagggaaagaagggagggagagagggagggagggaaggaaggaagaaatgaagggagggagggagggacagacagagggagggagggagggaggagcaagacaggaaaaaggagacaaagcactgagacacagggagaggggcagagataggagacaggggatagagacccagagagagggggacagagaaccagagagagggggacagagactcagagagagagggatagagacccagagagagagagggggacagagaaccagagagagggggacagagactcagagagagagggatagagacccagagagagagggggggacagagacccagacagagagggacagagacccagagggttggggggacagagacccagagaaaggggatagagactcagagaggaaggggacaaacacccagagagatagggacagagacccagagaaagagggacagagagagagagagaggaaaaaaaagagacccagagagactgtgagggcagagacccagagagaggtggtacagagacccagagagagttggtacagagacccaaagagagggggacagagactcagagagagagagaggaacagagacccagaagggggaggggacagagacccagagacaggggagtacagagacccagagagagagagagagagagagagagacagagacccagggaggagacagagacctagagagagagagaaagaggcagaaagggaggcataagagaaaaaggagcgagtgatagagtttgaggaacaagagggacagttaggattggctgggggcagacagcctgtggtcacctcacaccccagtttcctgtccagagagcaggcagtggagacaggcagtgtacagagaacccctgggcctcgggagggtgtggggactctggcct

SEQ ID NO: 37557 - DNA, 887 bp, Artificial sequence
  DNA replication origin
gcttcccctggctcagtcccgttccgccgcccccggagggctgccggccccgggcactcaccggcttccagggccgtcccgaggcttcggcctggggagaaagaggggcgtgtccgccaggacagccccgcccccaagagagcagcagaggccaatcggcgcccgctgcggcaagctacggccccgcccctgggggacgggagccgccaatcaaaaagagcggctggcgggctgggccaatcagaagttgtcgaagggtgccagccgtgggaaaagaacgcggcccgggcgcggagctaggcggcgcggtcgggggtggaagccgaggcctgatgggcacggggcgccaccaatagcgaggcgcggggggcggccgggggcgggaggcccaaggggccagggtgaatgggccgctttgtgcgcaaggcatgaatgggggcctttgtaagggccggcgtgggggggccgaccgaaggccggaatgcctgggtcccccgggacccggcgggcaggagagacaggagacagaattcacttttgtcgaacgtagaccatgtaccaggcaccctcccaggctctcacccaccggggaggtgtgggccgtgatactatcggaataacaatgatcgtttatcaagcacttcgatgtagaccgggagctgtgctaagcgccttacctgcatgatctcatttaatccttacaacgaagcccttgaaattggtgctattaagatcttcatcttctagatgaggtaaccccaagcttagaaagagggtgttaattgcagaaagtcacagagctggccgatggcagagcaaggactcagatccaaccagaagttgtgcttttaaccgccatgctatgcccaaacgtggtaatgattccc

SEQ ID NO: 37558 - DNA, 1563 bp, Artificial sequence
  DNA replication origin
gctattggtggcgccccgtgcccatcaggcctcggcttccacccccgaccgcgccgcctagctccgcgcccgggccgcgttcttttcccacggctggcacccttcgacaacttctgattggcccagcccgccagccgctctttttgattggcggctcccgtcccccaggggcggggccgtagcttgccgcagcgggcgccgattggcctctgctgctctcttgggggcggggctgtcctggcggacacgcccctctttctccccaggccgaagcctcgggacggccctggaagccggtgagtgcccggggccggcagccctccgggggcggcggaacgggactgagccaggggaagctggagcctgggggctgcgatcggggcccgggagcccgggcaggcggccggggacggcggggaggtgacgcggacactcaccttgggcgcgcagcgggacggcggcgagggaggtgggggggcgggacgtctacactcccccaactccagttgccgccgtgtgcgaggcccggtcggggtcctcgttgtcagccccgggcctgttccgcagaaggggaaactgaggctgtctttggaacctcggccgctttaatacctgagtcatcgcctccagtcccccgcccccagcatgacatgtctctgttctcacgtgtcagaatcggaggccagagagaggggtcgtgactggaagaggcggaggggtagggaaggacatatttgagaacctatgatgtacttggacgcttttattttttataactaaataatttcctttccttatcgtgttgactcgaggtgagttatattgtacccattatacagagaggggaaggctgagactgggccgaattggtgactgcagggggacctggtggagaagaacactccagagaccaactgtgtgctgggtcctttaaccttttcagtcccacaggagtcccctaaggaaagcggtggtccctgtggcatagatggggaagcaggttggtagtaatcaccaactgggacgcagaaattcatgtctttagggacctgctacaagttctttccagaccccctcctttagaatggcagaaaacggtataggcttgaattccagacctccctcttacgctgtgtgatcttgagtgccttactttgacccttcctgcctcagtttccacatcagagaaatggacatgctgatcacccctatgtcattggttgttgaggttattctaggccgggcgcagtggctcaggcctgtaatcccagcactttgggaggtggaagcgaaagaatcgcttgagcccaggagttcgagaccagcttgggcaacacagcgagacttcgtctctacaaaaagtaaaagagttagccgggcgtggtggcgtgaccctgctgtcccagctactcgggaggctgagcagggaggatcggttgagcccaggaggtcaaggctgcagtgagccatgatcgtggcattgcactccaagctgggcaacagagagagaccctgtctctccctctttttttttttttaaatcattttatgatctcaaagagc

SEQ ID NO: 37559 - DNA, 903 bp, Artificial sequence
  DNA replication origin
gttcccttcccgcagttgggaaactgaggctcagggagattaatgatgaagcactgggctggggaactttctgaacgtcgttttattaatttcactggccgcaatgcacagcagggaaagctgaggcccaggaagctccagcggggtttgaatcccgggaatcctcagccttctccgcggcgggccctcgacctttgccctccataagggggaggagcccctggcgccgccgccgccgccgcccacctggcaacaggctcaacccccgccttcccccggcccccgtcagaggccctgaagctccaggcccgccccgttcccagccgggcaggtgctgggtgacatcagagccgggctcccgccctgtgacgcgacggggccccgccctgcgctggaccgcggaggtcgctgcacctgaagagaacggggattcccgcgccctcaccccatctccccgctccggtcggcgcccccaggtagccccgaggatctgcgagttgagggggcggcgacacaggcgcttgggtccaggggaatgggtacggggctctcagactcctggatctgagaaggggccttgggggccggctgtcccaggtctgaggaaggactgcgccgcgagcccgaacttctgggtcctgggggaggaaaggactggggccaggactgcagagctggggtcttaggggaggagggggctgcaagcccggattctggggtctgtaggagcaggggctgggggcctgaactcctgggtctgagacaggagggcattgagtactgggactccggaaacccagcgctagaagccagggtcagacggctggatgccaagggccccaacctctgccccagggcggatccctggctgcttttctttttcaagcccagcagtctcggccc

SEQ ID NO: 37560 - DNA, 1063 bp, Artificial sequence
  DNA replication origin
tcaagcccagcagtctcggcccctcccagggcaggtgctttcacctgcccaggtgacagtaattagccctggcagagtgttcctgctggttgaggaagggtagggcagtcagagaggctcggccacttggagccaaggcctgcaggccctgcccgccccatcagggctgtgatccatcttcagaactcagcatcctcacctctagcccggctgcagtgaggtgagggggcctgcacttcccaatccataggaggagggggctgggggctcagactcctgggtcctgggagaggaggaggctgggagctcggactcctcagcctggggaaggaaagggctgggggcttggactcttggctccagggaggagaggcatagggcatagggtgattgcaaaaactccgaaacccttcctggtcaaaggccacagggctggtgaggaagtggatggggtggggtggggtgggtgggggtgagggtaaagtcccagggatggagtttgggtccggtgtatccaggtcacactggagatatggggtgagccttgacgatttgggggccacggggtggagaaactccctgctgccttcagagtgcaagggtccagcgtttgaggcctgagagcctcagggccaagagtcactggaagctggagctgctgggcttggggatgggaggagagggtctgggaggaagtgggtcctctcagcggagctgggattcccgtgggagaggcttgagggaaaggcaggagtctgttgggaccagatccaggggggcctccagggcagctgggcgtttagaaggacttctccaggggtatgtgggagcgaggtggggacggcagttgcatataggtctatcgggcagaggtgaagtcctgctgttggggagacagaaatctcccactgtttctgtgactgatgtggtggggcagtgatggggacatttgaggcagtggatgagagtaggggccgggcgtagtggctcatgtctgtaatcccagcactgtggaggccaaagcaggaggatcacttgagcccaggagtttgagatcagcctg

SEQ ID NO: 37561 - DNA, 973 bp, Artificial sequence
  DNA replication origin
attatattgctatttgacagagctgctgtaatcccaggagacagataaaaagattaaaaatgtaaattagatagtatggtttttgttttttaaaaattctctctctcttttttatttttttacagaaaccaaatatggtatgtttggtgggtttgttgggtttttttgtttgtttgtttgtttgtttgtttgtttgtttttgttttttgagacagagtcttgctctgtcacccaggctggagtgcagtggcttgatcttggctcactgcaacctctgcctcccggtttcaagagattctcctgcctcagcctcccaagtagctgggattacaggcgcatgcctctatgcctggctaatttttgtatttttagtagagatggggtttcaccatgttggccaggctggtctcaaactcctaacctcaggtgatccgcccgcctgggcctcccaaagtgctgggattacaggcacgagccaccatgcccggccagatagtacattaaatggtgataaataccaaggggaggaataaaccaggggacaggaaatgttagggttgaggatgttgaagttttcattagggtggccagggagggcctctctggtgtggcatttaaatgaagacccaagggagatgacaggagcgaggaagggggttgttgggagaaaaatcattccagacagcagtgcaaaggtcctggggccacaatgcatctgtgtggctgtgtcactgtgaggtaggcagcatggctagagccaaatgatcgaggggcagagggtgggaggggatgtaagagaggggacaaaaggtacaaccttgcttttactctaagatatgagcccagggtgggaattgacctgatttttgtcattcaggttccctgaccacctctggtcacgcctatctcatgcctgcagaatagactcgaatctcactgcttcagtgaacaattccttccttctctggaacct

SEQ ID NO: 37562 - DNA, 1675 bp, Artificial sequence
  DNA replication origin
gtcttggagatgcttccctcttcccctcacaatagacagatgggcaagacccggatatgggaagtgggtacacgcccagacacacaaaggcccctcacacacagatactcagtcagctggagacacagcccgagctgggctggcctggcctcctgccccattctcactgacctcatgcatcatctcctgtgcccggcagggtgagctggagcggcagctgcttcaggccaaccccatcctagaggcctttggcaatgccaagacagtgaagaatgacaactcctcccgattcgtgagtgccaggggtgggcagtgctggctgtgtcagggatacaggagctgggaacctcagggtgggcttcagggggaaagacacgtggatctgttgagggaggaggggctgggggtctggactcttgagtctgagggaggaggggctgggggcctggacccctgggtctgagggaggaggggctgggggcctggactcttgagtctgagggaggaggggctgggggcctgaacctctgggtctgagggaggaggggctggggccctggattcttgagtctgagggaggaggggctggggacctggactcttgagtctgggggaggaggggctgggggcctggacccctgggtctgagggaggaggggctgggagccccagacccctgggtctgagggaggaggggctgggggcctggacttttgagtctgagggaggaggggctggggacctggacccctgggtctgagggaggaggggctgggggcctggacttttgagtctgagggaggaggggctgggggcctgaacctctgggtctgagggaggaggggctggggccctggattcttgagtctgagggaggaggggctggggacctggactcttgagtctgggggaggaggggctgggggcctggacccctgggtctgagggaggaggggctgggagccccagacccctgggtctgagggaggaggggctgggggcctggacttttgagtctgagggaggaggggctgggggcctggacccctgggtctgagggaggaggggctgggggcctggacttttgagtctgagggaggaggggctggtggcctggacccctgggtctgaaggaggaggggctgggggcccagatccctgggtctgaaggaggaggggctggggccctggactcttgagtctgagggatgagggagtgcaggcccggatccctgggtctgagggaggaggggctggaggctgcgtgcctagttccaagggaggagcagctggggaccagggggctggggaaagaagtccaaggggcccggaccttgaattcccaaggagccccccgatggggactcaccacaggatggggttcaggtagagggagcaaggaagtgggggggcagccgcagctctgggagcagtgggtgtggggtttgggctgttgttcacgtgtgagtggggaaggggaccctctgctgaagcccacccactttggtctctcccagggcaaattcatccgcatcaactttgatgttgccgggtacatcgtgggcgccaacattgagacctgtatcctctcacagcccatgggggtggcagccaaggggggcagcctttcagacagcactgagtatggaaagcacctcccactgcagggacccct

SEQ ID NO: 37563 - DNA, 912 bp, Artificial sequence
  DNA replication origin
gccttgaggaagctgacaaaatgagagcccccaaccaagtcaataaggaatcacatggcctgttagtagactatgagtgcagctgggcgcagtggctcatgcctgtaatcccagcactttgggagtcccaggcaggtggatcatttgaggtcaggagttcaagaccagcctggccaatatggtgaaacaccgtttctactgaaaatacaaaaaagttagccaggcgtggtggtgggcacctgtaatcccagctactcaggaggcttaggcaggagaatagtttgaacccaggaggcggaggttgcagtgagctgagatcgcaccactgcactgcagcctggtcaacagagcgagactctgtctcaaaaaaaaaaaaaaaaaaaaaaacaaaaagaccatgagtgccatggagaaagatgggggagggaggggcacagctttaagcaggggctcaggggagggtggactgagatggggatgtttgaacgaagtcctgaggaagtgagggaatgagcactggagatgtgggggaagagcattcctggcagagggaacagcctgtgcaaaggccctgaggcaggaaaggggtggcatatttgagggattgacacttctggtggtggagctgcagaggggtggggagtctcaaacgccagcctaggaggttgggactttgtcctggggtgctggggagctgtgggagggctgggagcaggggttggacaaattcagctctgggagcaagaagaccccttgggggccgtgtgagagacacactggagtgggtggtgctgagaccagaaggaggctgctgaggctctagggaaggctcaggacgctgtcccagggctgctcaggttggcccaggctgcgcggcactggttatttggtgttaaatgctcagctcatcac

SEQ ID NO: 37564 - DNA, 1041 bp, Artificial sequence
  DNA replication origin
ggcgaagcttgcagtaagcagagatcgcgccgctgcactccagcctgggcgatagagcgagactccgtctcaagaaaaaaacaaaacaaaacaaaacaaacaaacaaaaaacaaacgtgagaacaacagttacggtgagagctctgattaaccgattgatttgagccgggccctgtggcaggcacattctgggccctaatcacctatggtcacaaaagatcgaggaagcaggtgctgtcaccttccccacagaacccatggggcatcctgaggcccagcagaggaggagctagaccctggtctcgcagatgctgggagagacggatctgaaccgtgagtgtgggctgggaggggcctggggctcaccggccgctcgatgaggtcgatgcagggctgcaggtcgaggccaaagtcgaggaaggtccaggggatgccctcacgctggtactcctcctgctccagcacgaacatggtgtggttgaagagctgctgcagcttctcgttggtgtagttgatgcagagctgctcgaaggagttcagctgcagggacgcaggacacgtgagctgggaggatggagagggacagagacccagagacaggggacagagacccagagacaggggacagagatgcatcgagaggggacagagacccagagagagggggacagagacccagagagagggggacagagacccagagacaggggacagagccagagacaggggacagagacccagagacagagaggcagagacccagagacaggggacagagatgcagagagagaggacagagacccagagagagagggggacagagacccagagacaggggacagagacccagagagagaaggggacagagacccagagacaggggacagagacccagagagagggggacagagaccagagagaggggggaacagagactcagagagagagagggggacagagaccagggagaaggggagagacccagggcttcagaaaggaccaggaccggagtgaggaagttggcatccccctcccagcaca

SEQ ID NO: 37565 - DNA, 1123 bp, Artificial sequence
  DNA replication origin
atcttgctctgtcccacgcggtagaggttggggtccagttccagcgcctggatctgtgaggggtgggagaggggtgatgacggagagggggtgatgggggagtgggggtggtgaggagggggagtaatgggggagggggtggcgaggagggggagtgatagggaaggggtggtgattggggagagggggtaatgggggagggggtgatgggggagggaggtgatgggggagaagtgatggggagggggtgatgaggagagtgataggggagggggtgatgtgaagagtgataggggaggggagttataggaagggggtgatggggcaggggatgatgggggggtggtgaggaggggcagtgattgggagggggtggtgattggggagagggggtgatgggggagggggtgatgtggaggagggtgataggggagaagagttatagggagggggcgatgggggagtggtgatggggagggggtgatggggtgacggggaggggggtgataggggatgatgaggaagcgggggtgggggcggtgatagggagaggtaatgaggaaggtcaatgaaggggagatcccagccccactccccgaccacctgggcccctgcacacaaacgcatgcacacacacacatgcacacacacgcatgcacacatatgcatgcacacacacacgcacacacgtgcatgcacacacacttgcacacacacgcatgcacacatatgcatgcacacacacatgcacgcacactcatgcacgcacacacacacacgcacacacgcattccaggctctgccccactcaccatcttttcacaggcctgcttcccatccatgaagcccttggggatggcattgggtgtcaggatctcgtatctgcaatgagcagggaggggtggggaggagagagttacagcaaacgctcacctagtgcctgctgcgggccaggcactgggctcagagtgacacacagcaggaacaacagtgacaataacaaggacagtcacaaaactcacatctgagcattcacgccaccaccaaggacagcaacatcgacaatgatcgactgtttcagttttttgttttgtttgttttttgagacagagtctcgctctgt

SEQ ID NO: 37566 - DNA, 1009 bp, Artificial sequence
  DNA replication origin
ggaggaaaaaaggaaggaaggaaggactgttccacagaatagcagcagccacagtacacagtgtctcttggatgtggaaggatcctttagccagagagattagatagatcaatagtgtatttagtggtgcttgcctgtacctgtcagtgttctaggcctgtgaccagggactgttgccaaggcggggacacacagctaataggtggaggagaagggatttgaacccagaaactcaaaccccactaagagtgtgaggtcttggcgcctgaagtcagccattccacccctttcacctccacctaggtgaagccactgctgcaggtgacgcggcaggatgaggtgctgcaggcacgggcccaggagctgcagaaagtgcaggagctacagcagcagagcgcccgcgaagttggggagctccagggccgagtggcacaggtgagggggcgggggcagggcgtgggggcgtgtcttcggggtggggctgtgtcgcatgggtggagccaggtgtgaggggcggggcttccggctgagccagcctgtgcccaggcagggctgtcgggaggatgggagcaaagctaaggtgtactgaggccgggcggggattggggctgtttagtttggttgagtcgtgacgtacagggagcagggccctgggggtgtagccagggtatgggccgggtaggggtggggtgggagagtcctgcagagccagaatggagctgggctgtaggatctgggggcaggggcctcagctgtggccgggctatggtatgcaggtggcgaacttataactgtttccagtatttcagctatcttaaaataatgctagaacatttgggaggctgacgcgggcagatcacctgaggtcaggagttcaagaccactctggccaacatggtgaaaccccgtctctactaaaaatgcaaaaattagccgggtgtgatggcgcacgcctgtaatcccagctactctgggaggtggaggttgcagtgagccgagatggcgccac

SEQ ID NO: 37567 - DNA, 1207 bp, Artificial sequence
  DNA replication origin
gacgtacagggagcagggccctgggggtgtagccagggtatgggccgggtaggggtggggtgggagagtcctgcagagccagaatggagctgggctgtaggatctgggggcaggggcctcagctgtggccgggctatggtatgcaggtggcgaacttataactgtttccagtatttcagctatcttaaaataatgctagaacatttgggaggctgacgcgggcagatcacctgaggtcaggagttcaagaccactctggccaacatggtgaaaccccgtctctactaaaaatgcaaaaattagccgggtgtgatggcgcacgcctgtaatcccagctactctgggaggtggaggttgcagtgagccgagatggcgccaccgcactccagcctggtcggcagagtgagactctgtctcaaaaataataataataataataataatgctagaacaaaccccttcttgagcatttttctgtttgccttttctgcattatttcctgtggttacattttaggtatgaaatgtattaaatgaaatgtgaggtagtagaaagacccctcgggggttatttgaaggatggactggaaggggaaaggctagagtctgggaggctggggaggaggctggagagagacaggtgagagaaggaaagacctgagcctgttggggctgtagggacagagaggaggggccagagagagcaggggtgcagactgatggctgtgagaggtgagggagggcatccccaggattctgacttagtgattagggggatgtgggctcatcctgagatggggacctgagggggaggaggtggggacaccgtgtcctcctgcccctcagtcctgccctggagaacttaaaggccaaagcaagttacaaggcagtaggcacccagtgcaggttgccctgggagcactgcctgctgaccactaacctcccacacactccccagctggaagaggagcgcgcccgcctggcagagcaattgcgagcagaggcagaactgtgtgcagaggccgaggagacgcgggggaggctggcagcccgcaagcaggagctggagctggtggtgtcagagctggaggctcgcgtgggcgaggaggaggagtgcagccgtcaaatgcaaaccgagaagaagaggctgcagcagcacatacaggtctggccccttgcatgcccaccaggccaccctccagacccct

SEQ ID NO: 37568 - DNA, 982 bp, Artificial sequence
  DNA replication origin
ccaagatgcagaggtgaatcagacctggagtctttcctggggagcccctcggctgctgggggagacacagagtcacagccagggtgataggggttaaggtagcagtatgggagctatggaggtccacaggaagtgcccagaatctgtttagaacattcaggagaaacttcctgaaggaggagcatttgagatgggtcttgaagtatgcatagaagtctgccagttgaaggatatctgcaggcacgtaccatcactcattcattcaataggcatttctcaacgcctaccatacatcaggccctatatcaggctgtgctacagacctggatctaactctgatgggattctagtttgaaggggctctcagtctggtggggagactcatgggcagagacagtcccagcccaaggtgactggagttgggacagaggagaaagagaagacgggtcaggaaacttcccacaggggagcctaatgctaagtctggaaaaataaaaggtttttttcaaataaaataggaaagtagagatagagatgaatacagctaaaggcagaggaaggaccagagattgcagggcctcaatgcctgactgagaggcatggactttgtctaggagtactggggaggcgtgggagagctgtgagcagaggagggacagggtcagctccaggtaaagaaagaagcttctggggctgtgcaggggatgagctgttaggggagaggctggaggcccagaggccaagaggaggatctagatgggagaggacggcactggagctggggctgagctggagctgggacaagggatgaggctgagagtcaggggtcaggacagccagggctgggcatgggctgtggggggtaagggggagtcagagatgagaaaggcacccatgggtctggcctatgagaaggtgggcagcatggccatccctgagctggggaacccaggaggagcagtgaggggggctgtgcctccct

SEQ ID NO: 37569 - DNA, 1056 bp, Artificial sequence
  DNA replication origin
ctccagagctgatcctgctcatagccctcccatggttccccagtgcccccagggccaagtcttggacactcagccatgtctaagtcaaaggggctagcagagacaaaaccctgcagagacccctggccttaggtcacctgttcacctctcttccctgcctccccagcttctagcaccctccaccccaagtctgttgcctacatggctccagcggggtctttctgacacccagagctgcccctgcccctcaccacctagtagaggggagacatgggaagttcctggactgaacgagtaatgaatgaacgatgcagggagggagagagcaatggaacaaacaaggaagcgagggagcgatgactgactggattggggaaggatgtggatggaggggagggcggatgagcaggtcagtgagtcagtgactaagtggagtcagcagggggtgctgaggggctggggttgggtaaataggggaggggttgggttggggagaggagatgggttggaagggagtcactgggtggatggagcagtagttggacacaacgctggttgggggagaggctgtatgtgggtggttagggtagttgaatagatggggtggcagatggatgggtgaatggtttgtgtggtggatggaggatgtatgattgggtacagcaacaggtcaacaggatatgtgtgtgggttaatgggtcatggcaggttaatgggttggggaataggaagatggttttgtgggaggaagatggtttggctggcacgagagactggcagaaatactgagtggcaggcaggtggggagacaccgagtggcaggtgggtggggagacactgagcagtggaagggttggggagatactgagtggtcggcgggtggaggagacagagtggtgggtgggtcggggagaccccttgctgcccttcttgctgcctgtacacaccatggcataccccagctggactggcaccctgtggccttctgtgtgacaatacctgcttggccagctgcctccgcctctcttcaccagcctcatcacggccctgcaggtc

SEQ ID NO: 37570 - DNA, 1667 bp, Artificial sequence
  DNA replication origin
ctgccttctagttctcagccaggtcaacctcctcccttgaggaccagagtgggagaggctggctcagggtcacacagcaagtggctttatacacaggagcccaggtctgcagggttcggagagttccctgcttgttcacgggagctgaggagccccgtcggtctggcaagggggtggaggagttccctgtgctgtgtggccaggctgagcccatctacctattccgttccacccaggcccagatgaaggagctatggcgggaggtggaggagacacgcacctcccgggaggagatcttctcccagaatcgggaaagtgaaaagcgcctcaagggcctggaggctgaggtgctgcggctgcaggaggtgaggctggggtaggctgggccctgggacaggaagctgggaggtgggcaaggctaaccttgaggtccctggatgtgaagctggggaggtgggcggggctaaccacagggtccctggatgtgaagctggggaggtgggcggggctaaccacagggtccctggatgtgaagctggggaggtgggcggggctaaccacagggtcccagggtgtaaggctcgggaggtgggtgtgtcttaccatgtggcctgcaatgccagcctaagagcagggattttgtcttagggcactagggagccatggaaagatccagaacagaggatgggcagggtcagctctgtagcagttgaactggagtggggagattggagtcacaaaggctgtgggagtgggagtgggagaggggagagagagagagattgagaaagagagagagaaccctgagccagggccaaggggatgcagaggacggagaaggcagtcagaaggcaggagggagaaggctatggtgaggggggccggaggaggggaggagagcactgggggtctggcccggtgattgggggaccctggaggagaggcaggtttgagaggaggacctgtgtgcagtaaaaggtggagagggtgaggggcctgggggttgggctgcaagaggtgagcacaggtcaggggctcaggagacagatttaggagacatctgtaggttgcagctcattccagggttacccagggacagcatgagaaaaaagccaagagccttgaggtgtgagggacagagaaaggggtgagacccgtgcccagattgcttctcctcacacccaccggccacccctccatcatcacaggaactggccgcctcggaccgtgctcggcggcaggcccagcaggaccgggatgagatggcagatgaggtggccaatggtaaccttagcaagtaagtgccccaagggtctgaaggctgaggtactgcgtctgcaggaggtgaagctggggtaggctggaggtggctgggctctgggacaggaaactgggaggtgggcggggttaacctcggggcccctggggtgtgaggctggggagatgcgtggggctaaccacagggtcctgtagtgtgaggcaaggcaccctcctctgaccatcctgtcctttcatccccacgccttcctgtctccctagggcagccattctggaggagaagcgtcagctggaggggcgcctggggcagttggaggaagagctggaggaggagcagagcaactcggagctgctcaatgaccgctaccgcaagctgctcctgcaggtga

SEQ ID NO: 37571 - DNA, 713 bp, Artificial sequence
  DNA replication origin
ccttcccatgtgctggtcactgaaaaaattagacgtaccatggaagtatgtctaattacctccatggtatgtctaataccatgtctggtgggattccccaaggtgaaagactcatgagctggacatggcaatgaaggcctatgaactagaagggttgaagggacacagatgaagaagaagctggaataccctgagatgtagtggtttgggaagggtatctagaggaggaggcacttgagctggagctgacaagaatgggatttccagggcttagagtcccaagtcagttggcagctttgtgggaaagtctgggagacatcagggcatttggaggaggagtgtggttggttctgagagtctgggacccaggagagggatcagggagacagggaggtaaatgaggcttgaagcacacagagccttgaatactgggccacggaactctgttctgtgggcagtggggagccctgggggcaatggggagccatgggaaggctgtgggctggggagggacacggccagctctaggtatagaaagatctctctggggctaaggtgggaatggatcagaggagggagactggaagctgggaggtttggaaggagtctggaatgatggtccaagcagaacaagatgaggcctgagctggggctggggctgtgaagatgaacaagagaggatgaagaagagaaagcagggggcagaaggaatg

SEQ ID NO: 37572 - DNA, 856 bp, Artificial sequence
  DNA replication origin
ggtggaggagccgtctcactcccttcctaatgtctatagatcaataacgagggaagaaaggaggacagggagctgatggaaacacagcttgccaactgtacccagtcccccaacaagcaaggtagctccagtcattgcctccctgcctgccccgctcctctgtgtttaggggtcatcctttgatgggaggttgcaggggacccaggtgggggtgataaatgccagagtgctgcaccatttccaaagggcaagaagtcagagggcggggttcctgggacaggggcccgtggggtccagggaggaagggggctgggccccatctgttagtgcatctggggacagggtagggtcactgggggtgggctggtggggacccctcaggctccggggatggcccagacccaggctgtgcttcctctgcctcctcgtcggatgccacgccctcctctagtcggaagacctggcgcaccgtgcgggtggtgaaggtgagggggccgcgtctgtggggaggagagaccaggatacagagatgaaatgaggggaggggaggggaggagaaagggggaggagagagagagatgagggggagagagagagagataggaagagagagaacaaaataagggggaagagagggatgagatcaagagaaatggagggagacgggcagaagcaatggggggcagagagagatgaaggacacacagagaggaggaaaggagagaaaggtggtggtgcacggtgggaaaggagggcacagagatgacagggagaaatgggtgtgggaagaaagaagttacctggatttggctctcccgcaacacagccgctgctcccacagccccacacccccgtg

SEQ ID NO: 37573 - DNA, 1066 bp, Artificial sequence
  DNA replication origin
ctgggcttgggggaggtagcgcatccttgagccaggataggaggtgggaaatgattttccacccgcgagcgtgacgcggtgaggaccgctggggaaggggggctgggatcccagccgagctgggtgttgtcggttcccaatcttctgatactccagtgttcctcccttcgggaacagcctctgtgatcatctgtggactactttaaatggaaacactcttaacctaaataaaccgtgtcctagccaagcagcgatgcctgcacttatcggcttctgtacaaaatgcgtattagagacaaaacttttaaaacaagtgtttgtcctcatactgcctcaaaccttagcacaccaccaaaggtacaaatacaaccctctgggaaacactggtgtctgtgaagagggtacctttggggcaccatctcagggaagagactcagggttaggcgtaagacaaagagggtgcttggggagggtctggttccctggaattgcagacaggttgcgcctatcttggaagttctagcatcaagggaacctgggctggacaagtctgttagggctttggggatatgggtgcggaacaggcctgaggctttgggggtgtccaagaaatgtcagttgtgggaaggatttggagcatcccaaaggctgaatttgagctgaaaagagctgggtcaagtcttggaggtttgagaagtgctgggacgcagttcagggaatttggtgggggtgtttggggtggcaggagtggggagggagggtggttcagggagcctctgtgtgcagaggttaagtcgcaggagtgtgtggggattgggagatgtggcgtgccagggtcagtctcagaattctgggtgcaggtctcatgtcctgggaatggagggagatagtcggggaatttcgtgtgctagggccagatcatcccaggaattctgggataggaggtctgagtccatgcagcaagaatagaggcgagcaggtccctgggggaaggggcggatgagagggtgaaattcaccagaggaattctcctaaaggctgagggagcaggtccaaagcccgcccc

SEQ ID NO: 37574 - DNA, 717 bp, Artificial sequence
  DNA replication origin
agaattctgggtgcaggtctcatgtcctgggaatggagggagatagtcggggaatttcgtgtgctagggccagatcatcccaggaattctgggataggaggtctgagtccatgcagcaagaatagaggcgagcaggtccctgggggaaggggcggatgagagggtgaaattcaccagaggaattctcctaaaggctgagggagcaggtccaaagcccgccccgccctcccaccacctgagctcaactcggccccgccctcccgccacctgagctcaactccgatctggggcttgggtaactgttcctccttcccctacactgtttctagtttctggtttgttttctcctaatcaacgcacagggttggttgtcctcctggggtgaaggatgggaaggctggagaccttaaaggccagcccgacccccgggaggtgccacccccttcccagagtgcctgcccctcaaacccgcgcatgcggcccctggcggcttattgctgaggtggacttggagtgggggctccaggttagggaaggcatgcagtgtgtggggggaggtgccccaagatgtaactggcataatttggacttatttacacaagttgatggcagggggatgtcctatggctcgtggagacctgagaaggctttttttggggagggaagagttggggggacgggctgtggcccctctctccatcctgggggcccaggttg

SEQ ID NO: 37575 - DNA, 876 bp, Artificial sequence
  DNA replication origin
gggctccaggttagggaaggcatgcagtgtgtggggggaggtgccccaagatgtaactggcataatttggacttatttacacaagttgatggcagggggatgtcctatggctcgtggagacctgagaaggctttttttggggagggaagagttggggggacgggctgtggcccctctctccatcctgggggcccaggttgggggtgaggggcccgggggtgtctgctggcatcgtcatctcggttgcatattattaatgactttttgattttttttaaaaaaacccttttccccaccccccacccccagctcctttgaccttcttcccggtcacccccgagtccccccacaggggggaggggagcgctaaaggatggagggcagggtcgggggagcgcggcgggcggcccggggagagccagggggggtggcaaggggcgcgaggcgcagggacaccccgctcaggcccgcgatgctgctgaggctgcgggatttctcgtaacctggggggtggggaggtgtgcagacacaggggggaagcacgaagatggggtgcagggaagggtcagacagagagacccaaggcagggagaaagagacagagagagaaagaaatggaaggggaggacaacagatacccagagagacagagaaggcaagacagacagagtcaggcagacagagacacaaaaggacggatgacaagagacagatggacagagatggaccaaggagatggagagagaaagtgaacaaatcggggagtcagtcaacatcgatgagaaagggggagacatcggggaggggggagagactccggattaggaggcaggttggtgcccaccgagcctcccccgccccattcccaccacagtc

SEQ ID NO: 37576 - DNA, 1772 bp, Artificial sequence
  DNA replication origin
ggctgggggctgacctagttgtagggaaagagagcaggcagggggtggggtctgcaagggggctgagtggagcgaagctggcagtgcccttggggaatccgatgagaactccaggagcagtgggggggggtggggggggagggaggctcctccagaagattctaaggacggggtcgggggtggggggcggtgaggcggagggctggggagagggacatctttaaagggtccaagaaggctctgagcttctgacgggtgcgggaaggctctcacaggcatctcacagctaatgggactcaagatccagcaacagtgtgtgtggtttctgcaaagcctggggctgcctgcagggttctgcacccccgcagggagctctgtggcttttccaggcaacgctaagggagctgtctggacaaaaggtgtcttgatcgtaggagggagggcttggggggagatttgaagcccagtgtcttggggacaccccctcccagccattcccaattgctaacctggggggaaggggcgggggggaccgaaagtctcgcgaggtctcaggcggtgacaagagctggggacagaaatacacagagtcacgggggtggggagaggatggtcaggggaaaccccccaacacagcctcactgttggggggatggagaaacgccgccgggatcatttcctcctctctggtgttttccgcgggaggggagcagtgaaatggggggcggctgagacatcaaatatggaaggagcttccgggctggctggggagggggaggggaggaggaaggatgggaggagggagagttctggggaggagtgggagccagtgatcaggtgagggcagatgtaggagggaggagcaggggtggaggacaagcctggaggaaaggagggtcttgggaggaccataggggacaattagggagggaagaagcctggcgcagtggctcagacctgtaatcccaacactttgggaggccaaggcaagcagatcacttgagtccaggagttcgagaccagcctggccaacaaaaccccatctctactaaaaatccaaaaattagccgggtgtggtggcaggcacctgtaattccagctactctggaggctgacgcaggagagtcacttgaacctgggaggcagaggctgcagtgaaccaagattgcgccactgcactccagcctgggcgacagagcgagaccccatttcaaaaacaaaaacgaaagggttgggaagggaaggttgtggtaggagagactcttgggggaaggagcatggggggcaataggccaaaggggtcttgtgggagggagggttgtggggctgaaggacagcaaggaaaaggcttggggagggctggagggggaaggatccagggcaccagggatagaagcttcagccaaccccatcagctccagccatgatttgagttcaatgaatggattttggcatcataggcaagagaagcagggacctcccccacccagccacccccaccccaatcctccctcacccataggcccacaccctctccccctcaatcccataggggcccctctagacctgggggtggggaacagaggaaggtaaaggactgggagtgggtgcaagcagggggaggagttagataggagcagggaggggagtgggggggtaatgagctggaaatggacaatgacggggaggttacaaaaaggagaggtgggggggatggaacaagaggagccagacagtcccccctctggactaggagcccggaagcctggggt

SEQ ID NO: 37577 - DNA, 2819 bp, Artificial sequence
  DNA replication origin
aataaagctttgtttacaaaaacagatgctgaaagatcaggccctcaggctggagttagtttgcggaccccttacaatctggagactgtaaaccgtgatggcagattcacgctttgttttatcccaaatttgtagtgcctgcaactgtgttctcaagaatcagttgtggccatgggtggtggctcatgcctgtaatcttagcacttcgggaggccaaggcaggaggactgcttgagcccaggagttcaagaccaacctggccaacatagcgagaccccaacacttgaatccaggaggcggaggttgcagtgagccgagattgcaccattgcactccagcccaggtgacatagcaagacagtctcaaaaaaaaaaaaaaaaaaaaaaagaatcagttgctgaaacagtgaatgaatggattgaatacatgaatgaaaggagctaggagttggcttggattgttacaaggattaaagaatatatgttaaattcctagcatgtggtaggtacttggtgatatttgctgaatgattcgtctactaaatagcaccactgtcttatccccctcacttctgcatggccggcagcccccagtctgtcccttctgatccctgaccccgactctctcggcctcgtcccttcctctccatcctcacagccctggccccagctcacgcttccacctgtcacctcagcctcctaacttccagcctcccacctccagtccatcctcacaagaccccagagctgcccctcccagctcacctgcctcctccccaagcccctagacaaggtggcagcctctcagcccggtgcctgcctcatatctacctgagaatcctccctccacagtctagtctcctaagctctgtcctgcggttcccttcaaccgttcctgtcgatgggatttcttcctctgcgtgtggtcagaactcctgctcaaccttaaggccccactgcagatatcgagtcttccctgatgcccggccccatcccctgggagtttctagtgttcctctcactgtctgtgctccctccattttagcatacatcgcctcaaaccatgactttctaggtccgtgtctgcctcctgctccaaagcggaagctcctgggggcatggtttttgttcacggttgaactccccatgcccagtacctgggatgcgtgggtgctgtctaagcgctggctgaattcacaggggcatggacggatggctgagcctttctctccccattctgcacccagaagtgttctgggtatgccctccgttttcctgattgaatttttaaaaaaaaccctaggaccaaggagggaggcagagatgttgatgggggtgaggatggggtcggtcgtgagggcaggtgcagtgtgggaggcagggttgagttagttcgggggttagtgaggagcagggtgagtcctgggtaggtgggtgtggggtcagtgtcaggagctgggggttaactgggtgcagctgcttgcagtgagggggccgaagtctcggtcagtgggggctgcatgttctcagaagggttagtcaggcaggagtggggagtctgggggtccgggggatcagagggtgggggctacttaccccggggggagggggttcgtccactagggggatatccaggccgcggcgttggcgttgaggtcgggcaagaagcttggggggcctggcttacgccagtcttgggggggcagtgggggagcaccagtggctgggggtgggggaagaggccagagagttggggggaatggacatggaataaagacaggtgaagggtcagtggtgaggaaacttggggcgggggtacagggaagatctgggagggaggcagtttggggccaagggaagggggaagggaagtccaccgcctcctcccccatccccctctcctccctcccctgggcaggggagagagagggagggtcccaggggatcagtagggggggcacctcaccttttcggatggagccatcaggggaaggggcatagtcggtgaggaggaagcaggctcggtcccggctatagcggccacggcttccaggcgtgatggggctcttgtcttccggggacatggcaggctggtcaatggctgggcagtcctcgtgggcaagcgcagctgctgccggatccccattggggcgaggatctgcatcccaagggggtcagacagagagacaaaggagagagtgaggtgcggtgaacacgcggtggggcaagatgtctgcgaggagcagatgctgggatggtcggcggatgtttggcactggaagtggagattcaagggcagggtgatgggaaggagtggccaggagggtggcagggggcacagctgggagagggtatcaagggggcgcggctggggggtgatcatgggggttgagtgctgggaagggcgactgcagttgggaagggtggtctggacagggagttggacagattgtggtggtgcagggaggtgttgagagctgggatgtggtggtggtgccaggtgtggggtgccaggaagggtaggactggggtgggatgctgtttaaagatatggtctggagctggccacattggctcatgcctataatcccagcactttgtgaggctgaggtgggagaattgcttgaggccatgagtttgagaccagccctggcaacatagcaaaactccatctctacaaaaaatagaaaaattagctgggtatagtagtacacgcctatagtcccagctactctgcaggctgaggcaggaggatcacttgaaactgggaggtcggcctgcagtgagccataatagtttcactgcttcagcctgggtgat

SEQ ID NO: 37578 - DNA, 828 bp, Artificial sequence
  DNA replication origin
gagaccagccctggcaacatagcaaaactccatctctacaaaaaatagaaaaattagctgggtatagtagtacacgcctatagtcccagctactctgcaggctgaggcaggaggatcacttgaaactgggaggtcggcctgcagtgagccataatagtttcactgcttcagcctgggtgatagagtgagaccctgtctccaaaaaagataaaagataaaagatgccaggcgtggtggcttacgcctgtaatcccagcactttgggaggccgaggtgggtagatcacttaaggtcaggagttcgagaccagcctggccaacatggtgaaaccccgtctctactaaaaatacaaaaattagctgggcacagtggcgggcgcctgtaatcccagctactccggaggctgaggtaggtgaatcacttgaacccgggaggcggaggttgcagtgagccaagatgtttccactgcactccggcctgggagacagagtgagactccgtcttggaataagaaaaaaaaaagagagagatggttgcggatgaagcaagctgggtgtcggggagaagatgaggcagtgttggggggtggttggctggagcaaacttcagggggcttggctggggtaggggtagcgggtggaggcatggctggagaggatgtggcaagctaggaagtggctgttcagggaagagtgctgggctctgggaagggcaccaaggggaagggctaggttaggtgagagatgggaggtgggacgtgggggtcccctaggctctgactccagctatttttaactggtgtgaaactgggtcagcggctgagggagc

SEQ ID NO: 37579 - DNA, 1271 bp, Artificial sequence
  DNA replication origin
gacatgtaccccaagacgtggtcggggatgctggtcggggcgctgtgtgccctggcgggggtgctgaccatcgccatgcctgtgcccgtcattgtcaacaactttggcatgtactattcgctggccatggccaagcagaagctgcccaagaagaagaacaaacacatcccccggcccccgcaaccgggctcgcccaactactgcaagcctgacccacccccgccacccccgccccacccgcaccacggcagcgggggcatcagcccgccgccacccatcaccccaccctccatgggggtgactgtggccggggcctacccagcggggccccacacgcaccccgggctgctcagggggggagcgggtgggctggggatcatggggctgcctcctctgccagcccccggcgagccttgcccgttggctcaggaggaggtgattgagatcaaccgggcaggtgagcctgggcgtcagggatcgggggcacaggtggagacccggggaggactggggaggtagctgccggggttcagagaacctggggtggttggcgtcgaagaggtgagggagaaaaaaaccaacagcaggagctcaggcgaagaaggaggcacagataatcacacagagacataggtttcatgggaaagagttttggggagaaacagatttgcaagatattcagaggggctggcgaggcagaggcagtgtcatcagctgtgcagagagagggacccggaggagcgtggggctcagagagacacagaaagagggtctcacaggaatcacaggcagacccgaggcagaaccccagggaacgtagcagcatctgagcatccgggagacagccctgagggaagagagactgaagccgatagggtctgaggcggggagtcagaaaccgagagattgtcatggagaccagagagagatgggatgtagattttgggcggaggtgggggcggtcagcggcagagagtttgggttctaatgacagcaagcccaagaggcagacagacttcaaaacggagagtcaggccagggcagatcccccagggcagaacggaaaccagggcctggtcagtcggctttgctgtgggcagcctgggagggtcccaaagagagatccagagaggtgctgctcagaggaagagacaagcgagagatgagggagaagaaagttacctgtgcttctgtgtgtgttcctcccccagggggtgtctatgcctcagaggcagtggcttgggagtctaggaggaaggagaggctggtgg

SEQ ID NO: 37580 - DNA, 723 bp, Artificial sequence
  DNA replication origin
ggtggggcgggggtggcgggggtgggtcaggcttgcagtagttgggcgagcccggttgcgggggccgggggatgtgtttgttcttcttcttgggcagcttctgcttggccatggccagcgaatagtacatgccaaagttgttgacaatgacgggcacaggcatggcgatggtcagcacccccgccagggcacacagcgccccgaccagcatccccgaccacgtcttggggtacatgtctccatagcccagggtcgtcatggtgaccacagcccaccagaagccaatggggatgttcttgaagtaggtgtggttggagcccaggatgtcatcggggtcggcgccaatgcgctcagcgtagtaaatcatggtggcgaagatgagcacccccagggccaggaagatgatgagcagcaggaactcgttggtgctggcgcggagcgtgtgtcccagcacgcgcagccccacgaagtgccgggtcagcttgaagatgcgcaggatgcggacgaagcggaccacccgcaggaagcccagcacgtctttggcggccttggagctgaggcccgagaggcccacctcgagatagaagggcaggatggccacacagtcgatgatgttgaggctgcttttaagaaactccaccttgtctgggcagaaggtgatgcgcatgaggaactcgaaggtgaaccagaccacgcacaccccctccacgtaggtcaggaagg

SEQ ID NO: 37581 - DNA, 767 bp, Artificial sequence
  DNA replication origin
gttcttgaagtaggtgtggttggagcccaggatgtcatcggggtcggcgccaatgcgctcagcgtagtaaatcatggtggcgaagatgagcacccccagggccaggaagatgatgagcagcaggaactcgttggtgctggcgcggagcgtgtgtcccagcacgcgcagccccacgaagtgccgggtcagcttgaagatgcgcaggatgcggacgaagcggaccacccgcaggaagcccagcacgtctttggcggccttggagctgaggcccgagaggcccacctcgagatagaagggcaggatggccacacagtcgatgatgttgaggctgcttttaagaaactccaccttgtctgggcagaaggtgatgcgcatgaggaactcgaaggtgaaccagaccacgcacaccccctccacgtaggtcaggaagggctccgtctccacctccacgttggtgatgttctccggaggtgccccggggatcggggaggcctgggtcaccgtcttgttgctaatatggatgaagccctcatgggtttccaggcagaaggtggtgatggagatgaggatgaagaagagggaggcgaaggccacatactgcagggcagggagggagagagagggggagaggtgacctaggcatcaggttggccataacatccagaagacccttccagtgcccccttccccagcctcctgggcccaaactctgggcaaaatccaggtgtctcagccctgtggctccatcacttccagaatcccattct

SEQ ID NO: 37582 - DNA, 1235 bp, Artificial sequence
  DNA replication origin
tggccccttgctgtttcctagaccacctccccccaccctcctgttccctgtgtcctatttcagggccccccagcagggtccacgggttctgctgtgggacgggagccgccaggcctaagatcacacatcctgtgtgtctcggaggctttagggctcagcttggagctgggcagacgggaagggagaaggcgggcagggaggcagaatcgtgaggtggttaagagtcggcgagcctgggcatgaatctggcttttaacctgtcaaaactgggcaaggagactgagctttctgaaccagaagtttgtagtgggattgttgtgaggattaaattagatgagcgtacgaaggacttggctccaaacacagtgcttggagcagtgcctggaacacagtaagaagacctgagctgttgttagggtatgcaggcagcagttagttggggggcaaggtcaaggcctcacccagagaggacagggcagtggtggtgccacagaggggaggtgggggtccgggcccttaagggaggaggggttgaagggttaagcctgcaaaaatggaagaggagataaaagaggagagtcaggcagggtttagggccctgaagaggaaggagagtcactggcctggacattgtgggaaaaggcagagccagggccaaagagaagttagggcatttgccaaaggggcagagaatgaggggtgaagggtcctgagccatttcaagatgggggataaccagagtcctgccacacagtgatgtgggttttgatgaaggcctagaagaggagggagtggggtcagggtcttggagaaggaaagcaatgggccaggcccctagagatgtcatgggctttatcagatatgcagaggggtgggaggggagaggagtgcattggagagggaaggaagacaggtgttatagtaaagagagggttttaatcctgcgggtagtggaggagggagggcatggggagttttgctattaatcaggggcacagagcacggggaggccactgctggaccacagagaggaccttggactttggggtgggccaagggccagcactgtccctctgtgcaccccccttcctccacaggggttgggctctgggcttgacttcactgaggtgcagagctgggaagtagtgggtggagagtttcggggccacagagaggaccctggacgttggggtgggctgggggccggcgcaggtcctctctgaactcccccccca

SEQ ID NO: 37583 - DNA, 916 bp, Artificial sequence
  DNA replication origin
attccttccacctgccctcttcctttctcgaacctccccccccgccgtgcaaaacccagaacctagcccctcagtctgtccccctccatcaaagtgaaccaaagagccttctctctctctccaaattctagattttccccaaagctctctccatcgctcccagaaaactttcctcaagcatccataacttcctaggctaaatgactaccctccccctgggttctctcctgaaccatttcctcctactaacttcctccctgtcccggggaccccggagggagaatgtggtggaaaaggggggcagtgcaaaatgggggcaattggaaatgggggaaataagagcgatcccaagaccccctcctgggctcctgggtacccaaacacagaggagcaggtcttggccccctccccccaccgtgccgcgtcctgagccgggaaggacgcggagccgcagtgccgcattcgcgccgggggagggagcggggggacgcctggagccaccgcataaagtttggtccccagaaagcgctgagttggcgagatttggggttggatggggggaggtggggaagaggaggtgcggaagggacatggccctggatgccccctcaagacactgagcggctccttcccccatggccggggcgcccttctctcctgtgaccccattgaagggtgctgagatgaggagcgggatgaagttagagttcttctgtgatggtcaggctaggtgttcgggacagctacgggagatactcatttactccgccaatgtgttttgggtgtccaaggtgtgccgagccctttccagcctcccagtgatatggcttgagagagttgggagctgaggccaaagcaaagtggagggtccgaccctacagccccctgcccccgcccccttcctcgtaatcactcc

SEQ ID NO: 37584 - DNA, 1914 bp, Artificial sequence
  DNA replication origin
cctagcctgaccatcacagaagaactctaacttcatcccgctcctcatctcagcacccttcaatggggtcacaggagagaagggcgccccggccatgggggaaggagccgctcagtgtcttgagggggcatccagggccatgtcccttccgcacctcctcttccccacctccccccatccaaccccaaatctcgccaactcagcgctttctggggaccaaactttatgcggtggctccaggcgtccccccgctccctcccccggcgcgaatgcggcactgcggctccgcgtccttcccggctcaggacgcggcacggtggggggagggggccaagacctgctcctctgtgtttgggtacccaggagcccaggagggggtcttgggatcgctcttatttcccccatttccaattgcccccattttgcactgccccccttttccaccacattctccctccggggtccccgggacagggaggaagttagtaggaggaaatggttcaggagagaacccagggggagggtagtcatttagcctaggaagttatggatgcttgaggaaagttttctgggagcgatggagagagctttggggaaaatctagaatttggagagagagagaaggctctttggttcactttgatggagggggacagactgaggggctaggttctgggttttgcacggcggggggggaggttcgagaaaggaagagggcaggtggaaggaatcccagggcaaggtagaaagaattgtaagttattttgagatgaaagttttagggctgatgacttgaggggcctcccagggtttgaggttagaaaaagttctagagcaggagggaaagtcacttagactaggaaacgggctgtgggggctttggatggggggagtcccagggatagagagtgcactgtgcagttaaaatgatggagaggagaagctgcgaggatctatggaggaggaagaacaattctggaggacatgtgagggttctggagaggaaaggcatatgatgggggcatgggatgcttctggaggcactgaggaggagtgtgaaaggcttgggggaagtctggagctttatggggaaagtccttgagatgggagttggcgtggaggttgaagagtgttaaacacagagtgaacacagagggggcctggaggttccaacggagaagatgccccaagactcagtattgcagtgagggggaggtgaaaatgtccaggcaagaacaagtggaggtttagaggggtccagaaggctgtgaggttggggtgggggagttttctgagactctgagagcagaagatactgcaggaagggagtggaaaaaataatcagaagattcaaacttggagagagaggtcttctgggagacgggccacggggtgaatcggggaggtgctgggagagactgagagttgaatagggggccccagagagtctggagaaggcagggaaagtgggggtcagggctcacagggcctaggagaatttgagggctgagaagggatgtcttctgaggggctggggaaggtccaagaaaccaagggctggacggtgaccaagagtagtgagaagagatttgatggggcccaggagacatgagggttggggagggtctcagaggagcccaggaaaggtggggaccgggttgttcagagaagcacgggagattcacggtctggaggaagtgtctaagcgtctagggtggccttggcgggggagggggaactttggaggggtctggaagagcccgaaggttggagatccgtctttggaggatctgggggatggctgcgagaggggggtgtgttcggaggagcccaggagactcaggattggggaagaggcttctaggagactgagaagcctagagggacccggagggttggagctggggcgctcct

SEQ ID NO: 37585 - DNA, 2158 bp, Artificial sequence
  DNA replication origin
agcacgtacgcgaagactcccgggtgccggtcaaagaagaactcgtcggcgcccgggtcgtagtcgaagcgtgccgccgcctcgggctccgtcaggccggccagccgcgtccccggcagggtgcgcagcgtcgagcggtacgtctcatggcgcacgccgcccacgttgatcacgatcttgccgctgtcgccaccgccgccgccgtgccgccccatggccgccgccggcagcccggggcatggctcggcgcgccggtccccgggcccgcggggtgccggggggcccgccggggacgcggcggggccgggctgcgcaggctgctgctgctgcggcggcagcggtggcggcggcggggactcgggcggctgcggcggtggcgccggctgctgcttgctggccccctggcgcccgcggaaggacgagacgcagactgagctcagcattggacggggggcggggcgggaggggcggggacgcaggggcggggacacggggggagagaccgacgggattgggtgggaggaggagcgaggtagcgggggcgtggcttaggggagaggaaccaaactgattggcctgggggaggtggggcggggctgtggctgggaggagtggggcgggcactctaacgcgacccagctggacgagtcggggccgccaatgagacggagcgattggctctttctaagagagcagggaggaggggcggggcggggcgtcaagggaggcgggaccggttactactaattgtgttcggcagcactggtagccaggggaaggcggggctagatacgatagagagagaccttactgaactgaaaaaagtgcgggcggggtagagggaggaggggacacatccaagctatttaaagacgcccgactggcctggaggggcggggccaccatgagagaggccgtcctgattgggctgagaaaggggcggagagaaacaaaacagatcgcacgccctcacctaaaacaccgctaggcaggacctggtggggaggagcattgcttggaagagacagggccgcagaaagtagaaacggtccagatgagactgcatggggcgggaactagagatggaggactttcccgcgcaagggggacaggctggactgaaagaggacacgggaagaacaaagacttagactcggtgagaaggtgttgaaacttgagagagtcctggaaacccgagagggtctggataggcctaagggagggagcggggctgaggctccaaggcgggcctggttagtcggggctgggcccggagaatgagtgtccggatggatgagtggtactgaggaaggtgagtggggtcgacaaatagaaaacgtcttgaggcagggcgcagtggctcacgcctgtaacgccagcactttgcgaggctgaggtgggtggatcatttgaggtcaggagttcgagaccagcccggccaaaatggtgaagccccgcctctactaaaaatacaaaaattagtcgggcgtggttgtgggtgcctgtagtcccagctagtcgggaggttgaggcaggagaatcgcttgaacctgggaagtagaggttgcaatgagtcgagatcgcaccactccactccagcctgggcgacagagcgagactctgtgtcaaaaaataaataaataaaagaaaaagaaaacgtcttgaatgggcggtaggaaagagagactaaggaaggagcggggcttgagggtcttgaaagcaaccagggtaggcgagggcagggcagggctaagggagggtagaggaacgggagaggtggatcccaggggaacaatgagactacaaagagtacaaagctactgggctggatggaggggagggacctggaacggggagtcttcgggatcagaagacctgggagagggcactgcctaaaggtcacagggtctcaaagggcgaggcgagaacttctaacgaacgctacaccgcggcggactgcagattggaggaccgagggtagatgaggactggtgaggagggggcacgcaaggaggcagagaggacgggagaggggagaggccaaagcgccaggaagcaccgtcaagactgaggcaatataggcaggaccgataaaaaatggggtgggctaggagtctcagaggtcgggttctggggaagaatggagtgaggggcgggg

SEQ ID NO: 37586 - DNA, 2652 bp, Artificial sequence
  DNA replication origin
gccctcgcctacgctgcctttcgtcaaaggctcctggctccgtggagcatcacggtcgttgtagtccacgccgtggtcacgccctgacgggggcgggcgcagccacaacatgcgtgggaggcgacaggtcgcgacggcagccacaggtggcagtcgggggtggctgtaattggtaagggtttaccagttcctgttctaaggggcggggataccgttccctcggacctcgtctcctgtttctcctctctgccttggcattccaggaccccggggtccgccataaaggcggagcttgaagcccctgggttgggggagcggtgctgcccctcctccggcggtgatgtcactcccccctctgcagcctcttgctgcccagagctgccggggctgggtcacccctccccccatctcgagccccggattcccccatccccacctcgcctcgacttggggtgagtacgggggagggggcgaaggctcagggtccgggggcggtaagacagcccgaatcctagttttggagacgggggacttgggatccagggacccaaagattatagcggggagattcccctcgactctgagctttcggggccaaggtacttggagggttttaggggacgaaggatcgtaggcagagagtcctcacattttcacctttggtgtccagagaccaaggctccgaatggaaccgggtgggaatgggggcagaggaacaaggaaggggtcgtagaagtcagggagggaagacccttccccaattccagggcctggggtaatgggggagggagggttatcaggggacgccgaagatgacgtagatgggagttggagctttcaggaattttgtgtcttgagggcctgggaacggatggattgggaggagcaggggtggggaaaggaactgaaaacgagacagacgttggcctctcccctcctggtgtccctagtcaagagtcgagtctacttcctcctggtctgtgaacatagctgagtgtccagtatttggagccctcatgaagcttccagaagccccctcctctctaatgggtgggtggagactccaggctcacaaatcctcccatagaccctggtggggtctgtggagggccatgagggagtgctggcatccaagtttcccagggcctgatggaatgtggacggaccagcctgctactcccggcccgctgcctcttcccctcccatggcctctaatcctgagtcgcatcgcacattcctccttattccagccccttttccccacagcccccaccttctcccacacttctgacctctgcaaaaaaacgctgatttagccacttgataccgtgcctggctgctgtgaaaagcagaagggaaaagcagggttgaggggggagtgtggaggaggatggcgaccgaggtccttacctagcccatagtgcctacccagcccttgctcctgcctccaccaccccacccccaattgcccaggagcctcatccagccccagcccagtccctcacctcaggattctctgcttctgcctgggggtgcaccagaattcggggaaggggtaggaagtacctatgtcttttctgtgccctcttggattccatcagaagctgaaggacatgatggattgggtgcaatggagagccctgggtctggggagtgagggcaacgaccttcctgggctgcaggacaggccccacttctgcaactctctctgcagtgacgcagtcccagctaggacgggggttagagagggtgatggggggtctgagaaaaaggaacggagacccagagagagggggacagggtccccaggaagtggagacagagacctagaaagagagagacccagaagaaggtgaaacataggaggaatagagactcagggaggggacatagagaaagtgaagaggcagaaacttagagggagagagagaagaacagagagccagcaagagaaagagcagagacagaggagggaaagagacggaagagggggaaatacaccagagatggggagaaggggaagaaggagggggaaatacaccagagatggggagaaggggaagaaggagggggaaatacaccagagatggggagaaggggaagaaggagggggaaatacaccagagatggggagaaggggaagaagaagggggaggggaaagaggttgtcagagagcaaggaggagacagactcagatgaaagggcagagacccagagaggaggcaggacaaagcgggttgcggggagggagtagaggacagggacacaagacccagggagtgcggtacagagccccagacagagaggcacacccctgataaaatggtacagaaaccaagagaaagagactcgggggagctggggtgggggggcggggactgagacaccagggaggagagactgaggcctagagagaagaggagcaaagactcagaaggagggggacagaatcagagacccaggagggcagatttacaaacgaggggtcggagactcagaggggtgggaacagagacggcggcacaaatactcaagaagggagaaaaagagacgccaagaaacccagaaacgggagcgggggtgggatggggttgggaggcgatacgaatcagccgccgcacctgcagcaggaagcggcgggccagaaactg

SEQ ID NO: 37587 - DNA, 1259 bp, Artificial sequence
  DNA replication origin
atccctggccattcctagggctggcgggggagggctggcgacaatgacctctacactctgcccctgcagggaccctgaagtggctgatggaggagagctggtcctggggggctcagacccggcacactacatcccacccctcaccttcgtgccagtcacagtccccgcctactggcagatccacatggagcggtgagggacttggtctcctgggtctggagctggaggcctggactcctaggaccctgcctctaatgactgcttccttccccctcagtgtgaaggtgggctcacggctgactctctgtgcccagggctgtgctgccatcctggatacaggcacacctgtcatcgtaggacccactgaggagatccgggccctgcatgcagccattgggggaatccccttgctggctggggaggtgaggtcccagtctctggtgggtgtgtcctggggaagatgatggcaattccatggcgaacactgcggcctgaggatgggaagcaggtagctagagcgtatccaggacagaggggactgggcttcttaagtgacatgccagagagtggtgggaggaagcaaagatacttcccaagtgtctatgctaagtggctcagtggatggtgaagtaggggtgggagtggggggggggttgttgggggagatgataatgcagttttgtttgggactagatgagaggagcctaggcaacagggctgtccacacacggtgctgaatacccaggtgctcaatatgaacattactccatggcactggggagccacggacgggatttgagcagagcaggaatctcccatcttcacttgttcctctcctccaccagtacatcatccggtgctcagaaatcccaaagctccccgcagtctcactcctcattgggggggtctggtttaatctcacggcccaggattacgtcatccaggtaggtgtccgtcataatgacgccacagtgatgtaatatgactggagttgagagggtggagctggtagttggacatcactagggccggaaggggccacagaaacatttcttgtccccggggttgggggcggagagagcacggactcccagggaaatggtggttcctgcggcctggacacccagttgccgccttgtcgccttgcagtttgctcagggtgacgtccgcctctgcttgtccggcttccgggccttggacatcgcttcgcctccagtacctgtgtggatcctcggcgacgttttcttgggggcgtatgt

SEQ ID NO: 37588 - DNA, 1303 bp, Artificial sequence
  DNA replication origin
tcgtcaagtttcacgctccgcccctcttccggacgtgacgcaagggcggggttgccggaagaagtggcgaagttacttttgagggtatttgagtagcggcggtgtgtcaggggctaaagaggaggacgaagaaaagcagagcaagggaacccaggtaggtgcacccgagagtggggagacgcaggaggagccccgaacccggggcttctcggcgctccccgcgtactccgctctgcccccttctctccttccatttcctcccctcggtaattcgcgcctcccgcggctgtttccagggcaacaggagtagttcactccgcgagaggccgtccacgagacccccgcgcgcagccatgagccccgccccccgctgttgcttggagaggggcgggacctggagagaggtgcgagggcggagcatgaatggaggaggcggggcggggcatgatgggaggtgatggggcgggacctgcagcgcggtgcgggggcggggcatgaagggaggaggcggggctgggggcggggcatgatgggaggagatgtggcggggcctggagcgaggttgtgggggtgcagtaggaagggaggaggcggggcgggggcggggcatgatgggaggggatggggacctggagcgaggttgtgggggtgaggcttggagggagggatgcatatggggcggggcaaggtgttgggaggcccatgatgggggctttaggggctgaacctggaaggttgagggcggagcatagtaggaggaggtggggtcagaatgagaaatagggatgcttggggcagaagtgaggtagagtcttaagaagaggaggtggggggaaactacatggcatggaggccgtgaaggcagagcatgattaaaggagaatgggccctacctagaaaaagcaggtggattggacctgagggggcggggcctacagcaggggcggggcttaagaccaagctgaaggctggcgtggaacagaagggggcaggtcttgttagaaggatggggagggtttgtaggctggcaggaaccagggttgtggctgagagtagggtctttggagagatggaaaaaaaagggaaagccctgtcaggacctgtaactgacctaacctaacccttcttagccccacaaggctctcaatcccctgtattctacaggctgctccgtgaccccaccatgtcctctcctaccacgagttccctggatacccccctgcctggtgagtgactctcttccccacccagcccttatcacacacgagcagaagctcactgtacctctcccggattccaccct

SEQ ID NO: 37589 - DNA, 859 bp, Artificial sequence
  DNA replication origin
cagttgggccgccaccaactgctggatcattagttcttgagccgctgttagctggacaccctcgccttccccggagccctggctgcctgcctcagatccaccaggggaagccccaggcccagaggctgagctgctgctgccctgcggccccacaggtgactgcgactgtgactgtgactcctgctgctgtttccgaatcttcttcttccggatctgttcttcagaaaggacgcctgtagggggatgcaggcctcagcagaaccccagggctaggcggggggccaggccggcaccgccccctcccgctgcactcacactgctccctcatccctgcctccttgcacttgcgcagccggcactgctggcacttgcgccgcatgaaagcgtccatctggcaggttccgccaccccggcaggcatagcgcctggccccaccacggaccacactgcgccggaagaagcccttgcagccttcgcagctgagcacgttgtagtggaagccggaggccttgtccccacagacacggcaaagctcgtggcccagcatcttcggggctgggcccttctttcgcttgcgctctggttcctcttcgggatctgggatgactggggtgggtaggtagaggccatgagaaagccacaaggagaaacaggaaccagagagatgggcccacaggagatccccaggcaaagagccagaggatggagggagagaggagttgctgctcacattcagggaaattgcaatttagaaagatgtatatgttaaggagaaagcaagaacaaaaagcaaagatcagggcctcccattcccatttctatttctttctcccttcctaaacccctccccaagccccca

SEQ ID NO: 37590 - DNA, 1340 bp, Artificial sequence
  DNA replication origin
tcgggcagacaggtcatggggaggcggagttaagggaatttttcagcaagggggcgaggccacttcggaagctgagagagggggcggggcctgccctgcagtcgaacaagcggggcgtggccttgcccgcacttgggcaggcgggggcgtggcccgtctctgagcgccgcggctctgggcttgcgcgcgcgggagtcaggggtcacggcggcgtaggctgtggcgggaaacgctgtttgaagcgggtgagtagaggggaaaaagggagttcggggcagtgggcctggtagggaacggggcttgagcagccaggcacatagatctgagagacggttgcgagggcaccctttggcccgggggcgcgcaggagagggcaggggccaggggtttcctgggcgagggcgcggggacgagcaggaaaaggccggggtgggggtggaattcctcggcgggcagggggcgcatgcgccgggcaccgtggggcgggacgtggcccgggaggagctggggggactgggtggtgcacgtgcgggcttggtgtcatcctggattcgctgggtgtttgagtactctgtgccaggcacttttctggaagcaggaacaagtcagagaagtccctgtctcgggaagacagacggtagacaagtgatgagttttaatagatcagtaaagcagtgctctggggctgtgagatgctctcagaaggaaactaacgcagggtaacgtgataatgagcgaagagcctgttgctttagctggagtggtccagaatcgaccgctctgggaccctcaagtgcaaagccctgaggtggaaggagcttggcgtatttgtagcaggagccgaggggacgagagaaacacagatgaggtcggagtcatgatggggaactagatcctatagggccttgtaaaacttggtatggaatttctcctttattctaggttcagcggggagccgtgggagggtttgagcgtggaaacaacacgattcgccccatgttttgaaaaactcaccactgagtggaaattggattgtagcaggaataagaatggaaggagggagatctgttaggagggagagcgtcctgcaggcagagaatcaggctccggttacctttgcgggcggagacagggggactggctgatggactgggcgtaggagcaaggggaagagtccaggatgactcctgggtttgtggtttgagcagcaggctggatggggaaggctaagggagaagcaggttggggttgccgctctgaaggcaaagattagtgggggagtgagtgggcagggtttagagcggagccaggagtgggcagggcgatgtcagtgcctcgcc

SEQ ID NO: 37591 - DNA, 1447 bp, Artificial sequence
  DNA replication origin
aggggcctgactcctgcccctcactcccaacacagcagggaggctgcacctgccatctccccggggctgtccccgctgcctgccggccctacgtggctcaccctggctcctgctctgctctcacctccaggccatctccacaccctctgtgctcactccatctggccacatgggctggggtgctcctgccccggcaccttcatgcttgccattccctccaccggacctgcctttccgacccccgacttggcacatcaatgaggcgggcaggagcccgggcccggggacagacctttgcggccggcgcactcgatatcgaagctgagcacgcgcaagggcgcaatgcgctgccatggcccttccggtgggtgactgaccacgtcagaccacagcacgtccgcctccagctggcactgcgtagcctgtgggcatgggtgggtcagcggtggcagcagggtaccagctccccacccagccctgccctgggaagccctgcaccttctccttcagcctcagggcgtatttcccagctgggagctccagccagttgcagccgacgatgtccgtgtccaccatgaacctggagggggctgggggtcagtggacaggggctgcccgagggtggggatagaggccggagaagtgaggcagaggccgtaccggatctcaaagtcgacgttggcctcgtagggcgcgaagctgggcgtgcccaggcctgccacacggatgccctgttccaggagacggcgggccggggccacgaggcgcggcagcgccacggtgatgcgcaggaacggggaggggccgtgcccgtggtacccaaacatgcctgtggatggaagaagctgggaccagccaatggcctcccgaggggaccctccaacccgctgatcctgggggagcactcactctctcgggagcacagttccacagccagcacggccggcccagtcagctccctccccccgcgactgtcccggctgatggccaagttcagctcccgttgcaggtcacccatgtgctcgggcccgaaacctggtgtgggagggatgatcagaggtgcagggggctccagtggctcagggaggggctgggtaggggccactcaccagggggcgctggggtgtagaagtagggagcgaagccgtggatgtggcagcagacagagaacccctcatcggtgaccccgaaggcgcggagcacaggcacggagccgcgggatggtgggggccccccaggcacaggctgcgctgggcctgtggggtcacagggtaagacagcggccatgcctctcagggtcctccaaggtgtgtctccacagcctcgaaataccttggggcctgcagcctggggcactcctgcccctgtaccgttccctgtgtccatttcagcctcccccctggttcccatctccagcctcatcccccaggatccattctccacagca

SEQ ID NO: 37592 - DNA, 1419 bp, Artificial sequence
  DNA replication origin
cgtggccccggcccgccgtctcctggaacagggcatccgtgtggcaggcctgggcacgcccagcttcgcgccctacgaggccaacgtcgactttgagatccggtacggcctctgcctcacttctccggcctctatccccaccctcgggcagcccctgtccactgacccccagccccctccaggttcatggtggacacggacatcgtcggctgcaactggctggagctcccagctgggaaatacgccctgaggctgaaggagaaggtgcagggcttcccagggcagggctgggtggggagctggtaccctgctgccaccgctgacccacccatgcccacaggctacgcagtgccagctggaggcggacgtgctgtggtctgacgtggtcagtcacccaccggaagggccatggcagcgcattgcgcccttgcgcgtgctcagcttcgatatcgagtgcgccggccgcaaaggtctgtccccgggcccgggctcctgcccgcctcattgatgtgccaagtcgggggtcggaaaggcaggtccggtggagggaatggcaagcatgaaggtgccggggcaggagcaccccagcccatgtggccagatggagtgagcacagagggtgtggagatggcctggaggtgagagcagagcaggagccagggtgagccacgtagggccggcaggcagcggggacagccccggggagatggcaggtgcagcctccctgctgtgttgggagtgaggggcaggagtcaggcccctgcatcctcctgcctcgcaggcatcttccctgagcctgagcgggaccctgtcatccagatctgctcgctgggcctgcgctggggggagccggagcccttcctacgcctggcgctcaccctgcggccctgtgcccccatcctgggtgccaaggtgcagagctacgagaaggaggaggacctgctgcaggtagctctcgctccacgccccacaccatttcccggggtccccgccagcctccgcgtcctgagccatcagctcctgggtgctgcgacgcccatgtctgtgggtctgggtgggtgtctgtgggtctgggtgggcccctgtgcaattaggcttgagcacttcccctctgggttctgcaggattttcaggggtggctggggttctagaacattctggaagtaggggaatccgaggcagggcaaccaccagggtgacccaatgtgctcccacccccaggcctggtccaccttcatccgtatcatggaccccgacgtgatcaccggttacaacatccagaacttcgaccttccgtacctcatctctcgggcccagaccctcaaggtgagggctgggcaggtgggaggcttctctcagatgccccaggtgtggcctccgggccctgggcctccttcccactccctctccacatggctt

SEQ ID NO: 37593 - DNA, 2012 bp, Artificial sequence
  DNA replication origin
ctggctggtctcaaactcctgagctcaagtgatcctcccacctcagcctcccagagattacaggtaaaaactgcacccagcctggggcctcaccctttgaggggctcgatgacagtggctcccgtgtagtcctcgccgccctctgacttcaccacgggcatcagcagcccctcgtgcatggcctgggaggggagaaggtgggaaatggagtgggtataggtggggccgtgcggattgggagtggggagaaaaagtgcatccaggatgccattgcctggagggggccacagacgtgcctggtggggggtggcgaggacaagtctcggctactgacctgccgcaacagctgggatacgaccttgacctgctggccacgactgagcaggtagctgaggggcacgccagtgaccctcgccatctccacggcgttcaccagcaccatgagccgctccagcagccgcagtggcaggtaggcatccttcaggcagtacacagccaggcggcggcgggtctggtcgttcccattctggggatgggcacggatggggtcagggaccaggggttgggggtgggaggtggagcaggagaaggaagtgggggtcagggtgaggtagcctggggagggcctgggaggtgaggcgggcaggagggccctccaagtcgtcagggtctgggtggggatggaggtagggttgggggccagggagtccacagggccagagggaggaggagggagcagcctgaaggccaccgtggacctgtggtcaggccaggaaagcagagacaaggtcatagtgacagaggtcacaggagtggagagaaatctggggtcagaggtcaggaaaaagtgggcgtcaggtaaggtcacaggtcataacagcaggtcaaagagtgaggtcagacgtgggggcgtgaagttgaggtcagaggccggggaagggtgaggtggaggtcagaggttggggtgagaggtcagggaggcagcaggcacctgcaggtcggtgatgatgctgtgctgcacgtcctccttctgctcgcccaggaagtggaagctcacggcattgagcgtgtaggagcggagcttgtactcccgcagcagcacctaggtgggtgggtgggctggtgggctgcgggcctgggcagtggccttccaaggacagggacacaccccacctcccgcccatacctgcagcatgtccatctgcacgcggcccaccatgctgacaaccttggtgtcccgccggcccgtctgcttggactggaatgaagagtcccggatgttggagcaaaggccggccacacggcccaggaaagggaatgtttgtacctgaggaggagaggcagggtgtgcagcaggctgcgggtccccgtcacataagcctgaagaacggagattgagaccaaccacaacatccttataacaaccctagggggtcgagagcaaccctgggggcagaaagacggtctggggctgggtgtgggtggctggagactggggagggagtccggagtaaggactaagctgcagccaaggctgggatagcgagagtcaggggccctgatggactgggggccaaggatggagcccagtgtctgcgggctgtacctaggcaggaaacaggaagagatttggggacactgtgagcaggcggccaggtgggggcagaggcaggaggcggcgtggagctgggctgagatggatgctgagggcgctggagggcgcctggctgcaggaggccttgcagggtgctggggcccagcctgggggagactgaggccagaagaagcctgagctggggacagggcagagggtgagggacacccagggaaggggaggaggagtaccatggcccgggcatcagcgccacgctgtggaatatacactgggggtcctaagagtttgttctgtattttagaatggattttttcttgttttctctttaatagaggcagggtcttgctatgttgccctggctggtcttgaactcctgggctccatcgatcctctcgcc

SEQ ID NO: 37594 - DNA, 970 bp, Artificial sequence
  DNA replication origin
aatttattttagggccggggtgttgctctgtcgcccaggctggagggcagtggcgcaatcatcgctcactgcagcctccacctcctgggctcatcatcctcccagctcagcctcccaagtagctgggattacaggcatgcaccaccacgcctggctaatttttaaaaattttttcggccgggcacggtggctcacgcctataatcccagcactttgggaggccgaggcaggtggatcacgaggtcagatcgagaccatcctggctaacacggtgaaaccccgtccctactaaaaatgcaaaaaaaaaaaaaaaaaaaaaaattagccaggcgtggtggtgggcgcctgtagtcccagctgctgtggagactgaggtaggagaatggcgtgaacccgggaggcaaagcttgcagtgagctgagattgcgccactgcactccagcctgggtgacagagcgagactctgtctcaaaaaaataaaaataaaaataaataaaaataaaaaaattttgtggagcaggggcctcgctatgttgccctggctggtctcaaactcctgagctcaagtgatcctcccacctcagcctcccagagattacaggtaaaaactgcacccagcctggggcctcaccctttgaggggctcgatgacagtggctcccgtgtagtcctcgccgccctctgacttcaccacgggcatcagcagcccctcgtgcatggcctgggaggggagaaggtgggaaatggagtgggtataggtggggccgtgcggattgggagtggggagaaaaagtgcatccaggatgccattgcctggagggggccacagacgtgcctggtggggggtggcgaggacaagtctcggctactgacctgccgcaacagctgggatacgaccttgacctgctggccacgactgagcaggtagctgaggggcacgccagtgaccctcgccatctccacggcgttca

SEQ ID NO: 37595 - DNA, 820 bp, Artificial sequence
  DNA replication origin
gtggcagtgccagccgatggggtgggtgtctaggatctggggtgacggcagagcaggttgagggccagtgggggcccagtggccagggccgctcaccctggtggctgagcactgtgcggcagccaatgcagcagttgcggcgtttggcgaaggccaggaggccgcccaccttgcccgtgagcaccgtcttgcagcgcgtgtggtccccccctgcaggagaggaggcaggtggtgggccggtgatctcctctgcccccccagggtgcccccagtcccctggtgcccccgtacgcagtagcacagcctcggcacggccctcgcccaggatgggctcgaagatgcgcaggaggggcttggccagctgctgctccaggtagtactgcgtgtcaatgggcaggctgtgctccagcacgaacagcgggtcctgcggccacatggcagtcacacccgggcagccagggaaagggcaccggggtggacacggggtggtcatggggcctggggcttagggcctaggcctgcctgcgggctgtgacatggggggggcctgggtctgggatggggtcggaggtcacggagtctctgggccacagagtctgtagggctctcaggtcaccacggaagggtcagagttcacaaggggaagcaaggatgaggaaggggtcaggaggtcagaggtcatggggctaagatgtgggtcactgggggtgggggtagagctggaggattatgaatccaagggaacccccggctggggagctgtatgcacaggggagggactggggccccttccatagggaagcaagggaggggtcagaat

SEQ ID NO: 37596 - DNA, 840 bp, Artificial sequence
  DNA replication origin
gcaggagggcacgctagcaagtgttctggggaaatgagatctttggggaccaggaaagataggaactggggggatggagagtccgaagtgaagagggaacagaaccagaaggggcaagagacagggtggacccctcccctccactcccacccaccggccgtgaggagcagagaaaccactgcccatgggtgaggccccacagaggggcagtgcaggtggggaccccgggtgcaggtttgggggccctcacttactgtgcagcctccagggcgagcatggtggtgccgggcgggctgtttgccgcccgctgcagccgccaaccctatttatatcttggcccagcccctgccggggggaggagggtgcccgctggccacaagctcggccctcctcaaaaatcccctcagggagggggtcaggggagggggctggattgcacaacccctttgtcacatggcagggatggcgggccaggggctgtctggatttggggatccccgtggggctgggtttggggggctgaccttgagggctggagatgggacaggagctggatttgggggaaccctgaaaacatcgaggaagggctggggttcactgaagaggagaatcaggaaacggaggatctggacccaggagccgaattccagcaggggcgggctgggggccgaggggcaagcacaagactctccccgggggatgtgtgaggtgacgggagggccgagggcatctgacggcagttagaggctgcggggatagagatgggagtcgctggggggaaacccagacccaaagcccattgccaggaccccgacgtggaaacatcgtgggtgtgtggtc

SEQ ID NO: 37597 - DNA, 1025 bp, Artificial sequence
  DNA replication origin
ggggtagcaggagataccaagggggagctcagaaacaaagtgacaggaagaggtgggaggggaaactgaggcaggaagcaaatgacttctctgagggaggtcactgtgggccacccctccctggcccccaggggccccaactcaccagacagctgaagtgtggcccgtcgagcctggagggggagagacacaggggcatgctgaggctgcctccagccacctgaatctcaaagtggttgggggctgatggggaggcggcagcagctgtgaccaccgcagccctgtgtgagggaccagccccaccacattcaccggactcccccactaccccctgctgggacaggaagtggggggtgggggggaggcaaatgtccccctcctccccagaatttgcatagacaccctggtggggaggggcagggaaagtgagggagagaaagtcccggaaaggaggtgtggggatggagagggggcctgggtcaagtgcggccttggtggcgagtcagttgagtccagcttggaccagaggagaaggatggagagatgtctgggtagagagggggaagcccggagaagactcagatgaggaggctcaaggagaggtgggacacagagaaaggtgtgcaaagggacattcacgcacagaggcggggaggattcctggagccccagatggaggcactgagagtgagggtgaggcagaaggagaccaaaaggcagggagagcgagaactggagacagagacacagagacaggcagagagacagagagcaacaggcagaatgttgagagctgggagatgccagatacagagcgaacagatacgggaactcggggagacaggaggatggacagagtgagagccacggaggacgcccgcaggagggcacgctagcaagtgttctggggaaatgagatctttggggaccaggaaagataggaactggggggatggagagtccgaagtgaagagggaacagaaccagaaggggcaagagacagggtggacccctcccctccactc

SEQ ID NO: 37598 - DNA, 874 bp, Artificial sequence
  DNA replication origin
aggccctggagggctgcccggacgttggcgcccttcccggcagggggacctgtgactttctgaatggggtggctctggacgcggcggggagccgagggggcggggcctggggaggggcggggcttggggacaccaggtgttgtggggaggaaggagggaaagggtgttggggacttagggttaaggctgggggactgcctggctagtaacgcagcgtgagggacccggtgtgaggaaaacaagtccctccgcttttttttcctgttcatcttccccctcctccttttccaaaaccccctacgagccggaaatttctccgcctccggggagcgtccagccaatccggcgtcagttccatgtgatgtcacgggttgccaggcagactgccactgcgctcccgcgagccccgctaagttggggaggggcccaggcctgcagtgccgcggccacctgaagcctcgcgtccctcgctgccagcccgagggctcaattcagagggaaggggacagacacccagacggaaggggaagcggggaggaggtggagaacttcagttggcaggaatagaggaagacataaacggaaccctctgtgcctgcgcgtcaagcctcttatttctcggcattaaggttcagataggttttgctgtatggtgtctttgtgatttgtttgtttgtttttgagacagggtctcgccgtgtctggagtgcaggggcacgatcacggctcactgcagcctcaacttcctgtgctcaagtgaccctcccacctcagtagttcggagtagctggaattacaggcatacgccaccacaccccgctaattttttattttttttgtagacgggtgggaaggggatctcactatcttgccc

SEQ ID NO: 37599 - DNA, 713 bp, Artificial sequence
  DNA replication origin
gctgcgggccagagctctggcatgaagcagggaggggagggacagggtctaggaagccattcttagcatctgcaagtcaggagttttcgggaaaccggagccgggagggagggtccggtttcctagcgtaggcaggacggcggcggggggaggaggtccctgcgcctccggggagggcgccgcggctctgggactccggagtttcgcgccccgggcgtgggcaaacccaaagagctggggccccggccatctgggaccccggactggccgccgcccctcctgggaccgctccccgcgactcttcccggagcgggcacggcaggcaccggacgcgggtagggggtgggcgtccccggtgggggcgggtgggaggctgggaaggccctggagggctgcccggacgttggcgcccttcccggcagggggacctgtgactttctgaatggggtggctctggacgcggcggggagccgagggggcggggcctggggaggggcggggcttggggacaccaggtgttgtggggaggaaggagggaaagggtgttggggacttagggttaaggctgggggactgcctggctagtaacgcagcgtgagggacccggtgtgaggaaaacaagtccctccgcttttttttcctgttcatcttccccctcctccttttccaaaaccccctacgagccggaaatttctccgcctccggggagcgtc

SEQ ID NO: 37600 - DNA, 1241 bp, Artificial sequence
  DNA replication origin
agcaatgtgaggaccccgtgggccagagggctggtggaggggagtggagcttgtgcaggacatgctcctcagaagccctgttgcctgaggcatcaatgtgggcctggagccgggatggagagtgggccctctgaggatggaggttgtgcggggctgctggggagaggttgtgtgaagcagagggaggatgcctggggttgggtggggatgcattagggcttggtcatgtacattcctggcaaggcctgagggggccagggacctgggccccagaagtcctgatgggtcagatatgaggagacagagctggccaccaggtgctgagacccctctcggtctccattggcccccctgtggggtgggggtgaggacgtggagatagagctatgagtggactctgaggaatatggggtggctctagagggtggtcccgtgcacccacacccccggccctggacccaggtgtacaccgtggagctgcacattgggaaggtggtactgggggaccgtgggtattaccgcctcgaggtcaaagccaaggacacctgtgacagctgtggcttcaacatcgatgtggagggtatgctggtgggggatgcgggagcaaagggttctatgtctgggtggggtggacagatgtaccagccaggtgttgggagagtgcacaggcatgggcatgaggtgggcacaggtttttggaggagggagtgcagattctggggtcagagtattcaaactcaaggagacatagcatgggaggaggtctggatttcgggggtgaaagtgtacagggtcttgggatgcacatgcaaaggcttaggaggtgagttatgcacattccacgtttaagaaagtaggcaaaacggcttgggaagtgagggtgtccaggtttagagaagaaggatgtaggggtttagagtgagggtgtacaggattaacaggaggttacacggatttgagggcacatatatgggcccctgagggtgtatgggctctgggggtctgcagcccagaatgtgtgagggcttaaatgtggggtgcacaggaaatgagattgtccaggcctggggagaaagacatggtggcccaggtgtggggggtataggctgctgagagagggtggagcttggcagctggggaaatgagtatgagctggtctagaactagaggatgcccaggcctgagcaaggttgtgctggtccaagagatggagaaaagggggcctggaagaggttgtgcag

SEQ ID NO: 37601 - DNA, 1404 bp, Artificial sequence
  DNA replication origin
tgagtggatggattgatgggttggtgagaaatgactgcgcagttgggtgaatatgttgatgagaagtggccaaggaagtggctggctggctgcagacagaattgatcagtaaatggaattgtcagggatatagttatggggattgatgggcaagtgaagatggataagtgggccagcagataatgcatatgagattgccgatatttaattttttgtggttgttgtttttgaaacagtctcactctgttgcccagactggagtgcagtggcgcgatcatggctcactgcagccttgatctcctgggctcaaacgatcctcctccctcagcctcctaagtagttaggaccacagacacatgccaccatgccctgctaatttttcttttttttgtagagtcagggtctccctatgtggcccaggctggtcttacactcctgggctcatgtgatcttcccacactggtctccaaaagtgctgggattataggcgtgaaccactgcacccagacttcaatcattttttacctgcagaacatcaattttacatagttcaatctaacagagggctatctgtgtggatgggcgtgtcaactgcccacctcttcactggtgaactcagccacctattcatgaacccatccattcatcgtccacccaccccatccatccatccgcttccccacctactgaggcacccatcctcccacctctccaccatgcattcatccgtaccatccacccaccttcccacctgtctatctgcacctgcatctcccaaccaaatccaacatcccattcacccgttatccatccacctacccatgtagctaggctgactgtaatggcagatgggcaggtaaacaggtgggaaaatggtggttaacggatggatatgtgggtagatagattggcaactgggcaggtaggtggatagatgtattagtagatacataaataggccactggttggatggatgggtgagtgaatggatcagtgggtggaaagtggagggatggagggatggatggatgggagggtgagtaggtggaggcataggtgaactagagcctgagtgaacagcagagtgggtgtgagaatggtgggttaaggggtgagaaggtgggtgaactcatggcagatgtttggctgggtggggttgtgggtaggggtctgggtaaatgggtaggtgggtggatgaacaggcagcctgatgggttggtgtgttagatgctgggtgggcagggagtgaacagatggaggtggtagagggataagcagtgggtccaggaggaatcagtgggccatggagcttcacccaccacctcctccccttgagtcccatctcccctctctgtgccaagtccggggctcacctcttcttcaacaggccactgaaatccagc

SEQ ID NO: 37602 - DNA, 797 bp, Artificial sequence
  DNA replication origin
ggttgatgggtgagagagtgagtgaatgcatggatctcagcccaggacctagtagacgggaggcctcagaagatggttgatgggtgagagagtgagtgaatgcatggatctcagcccaggacctagtagacgggaggcctcagaagatggttgatgggtgagagagtgagtgaatgcatggatggagcttgggagggaaggaaggaagggaaaggaacaaagagaggatagatgtggaggtgaatgtggggacatgaatatttgaattgatgtacagaatggtgagtaagtgggctgataagtaggtgggtgggtcagtggaagggtgggtgggaagagaggcagatgagttgggggaagacaggtgggtgggtggatggattgatgggttgggggaagacgggtgagtggatggattgatgggttgggggaagacaggtgggtgggtggatggattgatgggttgggggaagacaggtgggtgggtggatggattgatgggttgggggaagacaggtgggtgggtggatggattgatgggttgggggaagacaggtgggtgagtggatggattgatgggttggtgagaaatgactgcgcagttgggtgaatatgttgatgagaagtggccaaggaagtggctggctggctgcagacagaattgatcagtaaatggaattgtcagggatatagttatggggattgatgggcaagtgaagatggataagtgggccagcagataatgcatatgagattgccgatatttaattttttgtggttgttgtttttgaaacagt

SEQ ID NO: 37603 - DNA, 1314 bp, Artificial sequence
  DNA replication origin
ggataagaatgcaggcatgtggactgcactgagggaagctgattgaggcggtgcagccccatagtggtcccattgcaatctggttcgagccctaccctgctcccccaccccttaggttccacaagctggtgatcgatgacgtccgccccgaggatgagggagactacacgtttgtgcctgacggctacgccctgtcgctctcggccaagctcaacttcctgggtgaggatgccccttcctccttccctgggggctgtaggatccaccctcgcagacccagggcccgggatgtccctctccaggattaaggttccccgagtgcgaatgaggacgacagcaagcgtctgtcccgctcatggctggagtcagaagatggagggagagcgctgaactcgctgccacctgccgcccgggaggaggggtggctcctgggcctgaacctgtctccagcaccccagttcccagggagactgccagaccctgtcacctcttcctctgggctgtgaaggtggggtgaggggcctgctgagtttagacctaactgtccagtcttctttgtcttgcagaaatcaaggtggagtacgttcccaagcaaggtgagcaccacgggctgcgctgggagcgggtctgagggaggagggaccgggctgagggaggaggggaatggccgagggaggataggcagggcgaggaaggatgggcggggtgcgggaggatgagtggggagaggaaggagggggttggggtgctgaggaagggagggaggaggggcggggagctgacagacggggtgggggctatcggccgagaggagggactgaggtcctgagggaagagggattggggacctggatccctgggtctgagggaggaggggctgggggcctagactgtagggtgtgagggaggaggggttggggacctggatccctgggtatgagggaggaggggctgggggcctagactgtagggtctgagggaggaggggttgggggcctggactactgggtctgagggaggagggcttcaggacatggatccctgtgtctctgtcactgttggaacccaactttttggagattctcttgtgggaactgggaaggcccagcctcccactcccagggtccctgtatctcttctgtgccaccagagccaccaaagatccacttggattgctcggggaagacctcagagaatgcgattgtggttgtggctggaaacaagctgaggcttgacgtgtccatcacaggggagccccctcccgtcgctacctggctgaagggagatgaggtgggttggggccgcccctctgtc

SEQ ID NO: 37604 - DNA, 769 bp, Artificial sequence
  DNA replication origin
tatgagaacccaggggctggagccagcacttccagctaagggtatccaggaaggcttcctggaagaggtgtcttctgggtgcttcctgaaggatgaggaagagcttagtgttgcatgcacagggaccagccttgcaaaatctctgggacaaggcagtcttttttttgttgttgttgttgtttggttggtttctttttttctcttttttttttgagatggagttttgctcttgttgcccaggctggagtgcagtggtgttatcttggctcaccacaacctccgcctcctgggttcaagcgattcttctgcctcagcctcctgagtagctgggattacaggcatgcaccaccaggcccggctaattttgtatttttagtagagatggggtttcaccatgttggccaggctggtcgcaaactcccaacctcagttgatctacccgcctcggcctcccaaagtgctgggattacaggtgtgagccactgcgccccgtccagtctggtgcttttaatgaaggacggcatttggagggcgaggagggcagtggagcgagtgaggactctgtgtgttgatggggaatcatgggaggattctgagcaggggaatggcagaggcaggcctgggtttgcttggggacacgatggggtgcaaggccatctggtggctgcgttcaggtattcacgaccaccgagggcaggacccgcatcgagaagcgggtggactgcagcagctttgtgattgagagtgcgcagcgggaagacgagggccg

SEQ ID NO: 37605 - DNA, 2051 bp, Artificial sequence
  DNA replication origin
aaaaaaattagctgggcatggttgcaggcatctgtagtcccagctacttgggaggctgaggcaggagaatggcgtgaacctggaaggtggagcttgcagtgagccaatcgtgccactgcactctagcctgggcaacagagcaagactctgtctcaaaaaaaaaaaaaaagagagagagagaaacgaaggaaatatggacagatggatggatggatggatggatggatagatggatggacagatggatggatggacagatggatggacagacggatggatggatggacagatggatggatggatggatggatgatggacaggtggacagatggacaaatggagggatggatggatggatggatggatggatggatgaatagatggaaatatggatgggtggatggatggataaatggatggatggatggatggatagatggaaatatgagtgggtgggtgggtggatggatggatggaaatgatggatggatggatggatggatggatggatggatggatggacggtaagatgaatggatggatggatggatggaaatatggatggatggatgtacagatgggtggacagatggatggacagatggatggatgggtggatgttaagatggatgaaggaaagattggttagatggataaatgagtagaagaaagaaagaaggcataaaggtaaaagataaaagataaatggggggatggaaggatagatggaatgacagaaagtcactgctgtatggaggatggatgtagaaaggaagaagggagagaaaacacactagtcacaggggggtcccatcccagagacttataacagtacagacacaaaacacaagcaggccactgcacccatctctgtcccacatggtcctattttcagctccctggactggatacccacctgtgctagccaccacccccaccagccctgccagggtcactcacagccttccaggcagtactccaccaggtacccatcgatgccacctgccccgatcctgttcggaggcctccacttgagtgtggtggtggtgtctgtcacatcctccactatcaggtgcaggggttcactcgtgggtgctgcaagcatccagaaaaagaggatatggggggaatgaggggtcaggggtcagcaggaaggggcaggagtcagaggtagaatgattggtcagaaggccagggggtagggtcagagattgatggcgggcaaaagatgggccagaggtggacggggttgatggatcagagtgatccatcattaccaataggcataaaagtgagggaggacattaccaataggcataaaaggcttggtgttcatgctgggctgggagacccctatagcattgacggcgaagacacgcatctcatagaggatgccctcgatcatcttggtggactcataggtggtctctgtgaagacctcaaagttcagcttcatccagcgctgagagcccttcttcttccgctctacgaggtaccctggaggctccaagcagagaggagaagagggaacgggagggcatggggcatgagtcagctgggggagtgagggccacatccagaggatcgcatggccagggcggtccgaggccatgaatcttaggtggatctcaggggccacagagcattcagaggccaccagtcctggagtcaggaatcaagagggggtcacagctcatgaaccaggaggccaggagccatagaaaaacccaggctactggtcaaagtgagaattcccaggtcaccagcgagtaaaggaagcgggaagaccaaagggattgagatgggaaaatggaaaatcaggggtcagaggtaggtcactgaggatgctaagggctctgggaggtcaaggagaaggcagaggctggtgccgtggctgacacctgtaatcccagcactttgggagtctgaagtgggcagatcacttggggtcaggagttcaaaaccagcctggccaacatggtaaaaccccatctctactaaaaatacaaaaattagccgggcgtggtggtgggcacctgtaatcccagtta

SEQ ID NO: 37606 - DNA, 1106 bp, Artificial sequence
  DNA replication origin
ctctcccacccctcatctctcacctcctctcccaccccccatctctcacctcctctcccatccctcatctcacctcctctcccacccttcatctcccacctccttccccacccctcatctcttacctcctcccccatcgctgcccatccctgcccctcccggcctccaggggccctccccagcgcgcgcacccacaacgcggatgcggatggtggcggtgtccttcatgttctcgatctgcacgctcagctcgtactccccggagtcggagcgggccgcctggcgcacgaagaacacggtgtcgaagtcgctggtccgcacgtgcacgcgggaggtgtccagcggggccccgcccttggtccacaccacctggggccggggctttccctgcggggagagggcggggcggggtggggtcagcggggctccacccgcaaaaagggggcttgcggcgagagcggacccccggcccgtgaccccgctcccctgacctggaaggggacgacaaggttgagctgctcgcccactttgcggatgtaggtctggcggagatggcggggaagccggatcttgggtggctctgagggcgcaaacacagggagggggctcagcggggggccggggcgcattccaggggccaatggtgataaggctctctggggaggtcctgtcgacgacacggaaagggcaggcgggacgacgccagcttggtctttcggagcgcagggtcaggggccacgcacccgcaatctccctgatggtgaccggctgggccagggtggccggctcgctgcgccccgcgatgttgaccccaactactcggaagaggattctggctccggtcgggagattcttgacggtgaagccacagcgctccacgggctcggtgttggcagggacccattcctcggctggagagagaggccctgctggcggatctcgtgccctcctcccatcctccgctcccgtttctcccggggacttgggccccacgcagcgagcgagtgagcactgagtaagttcccagtagaagcagcagcagcagctggagttagttaagcattcatcatggccaggttctaagggtggccattctgttcgctcat

SEQ ID NO: 37607 - DNA, 1787 bp, Artificial sequence
  DNA replication origin
aatgcgccccggccccccgctgagccccctccctgtgtttgcgccctcagagccacccaagatccggcttccccgccatctccgccagacctacatccgcaaagtgggcgagcagctcaaccttgtcgtccccttccaggtcaggggagcggggtcacgggccgggggtccgctctcgccgcaagccccctttttgcgggtggagccccgctgaccccaccccgccccgccctctccccgcagggaaagccccggccccaggtggtgtggaccaagggcggggccccgctggacacctcccgcgtgcacgtgcggaccagcgacttcgacaccgtgttcttcgtgcgccaggcggcccgctccgactccggggagtacgagctgagcgtgcagatcgagaacatgaaggacaccgccaccatccgcatccgcgttgtgggtgcgcgcgctggggagggcccctggaggccgggaggggcagggatgggcagcgatgggggaggaggtaagagatgaggggtggggaaggaggtgggagatgaagggtgggagaggaggtgagatgagggatgggagaggaggtgagagatggggggtgggagaggaggtgagagatgaggggtgggagaggaggtgagatgggggtgggagaggaggtgagagatgggggggtgggagaggaggtgagagatggtgggagaggaggtgagagatggtgggagaggaggtgagagatggggggtaggagaggaggtgagacgaggggtgggagaggaggtgagagatgagggatgggagaggaggtgaggagatgaggaggggagggggagaggaggtgaaaagatgaggtgggggagactagataaggagcaaggcaagtaccagggctaggagtggaggagagatgaagatgggggaacccttgagagggagattgggtgaagagaggaagtggggagacatgggggtgaggagaggaggtgaggagggatgagggtggcccaggataagaggaagtggagagactgggatgggggaggccataggcaggaatgggaatggggcataagagaggttagaatcaggagggagggggtgtggagaggggaggggagggaagcggctggacatcccaaaacctggactgacttgtcacacttccccatttccagaaaaggctgggccccccataaacgtgatggtgaaggaggtgtggggcacgaacgcgctggtggagtggcaggcccccaaagatgatgggaacagtgagatcatggggtatttcgtccagaaagcagacaaaaaaaccatggtgagagagcagagggggagatggggaagagccggtgaggtgggcagagcaggtgcagatgtcccccgttcacagctggaagggcagggaggggcccagaggctagaggacgggctggggccaggagggaagccttttagctgagacttggcacgtgatgggttttcattttcttttttcactgaggtaaacgtcacataacggaattagtcattcatcgttttaaagcgaacaattcagcagcacttaggacatctgcagggttgtgcagccaccgcctctacccagtccattttcatcccccagaggaagccctgtacccaatagcgctaccccctggtctcccctggcagccaccgatttgctttctgtctccctggatttacctactctggacatttcatacacatggaatcctagctatgtgacccttgtgtctgactttgttagctcagcacaacgtctttgaagttca

SEQ ID NO: 37608 - DNA, 1624 bp, Artificial sequence
  DNA replication origin
actgtgttagccaggatggtctcgttctcttgacctcgtgatccacccacctcagcctcccaaagtgctgggattacaagcgtgagccaccgcacccggccctggctaattttttgtatttctggtagagacagggttttgctatgttggccagaccggtctcaaattcctggcctcaaatgatctgcctgccttggcctcccaaagtgctgggattacaggtgtgggccaccgcacccgatctgcattactttttcaatgaaaaaatatgacgtaaaggggcagtgtggagtgaggcacaggagggctcaagaaccatgagatccacaatcatgacaagcttggcattccaatcctggcccactctggagccacagtgggaccctgggcaactggctcccggctctctgagcctcagtttagctctttggcggatggggctaagggaccccaccatgtgaagatatgaggtcagaggtgagatcgtatgcgcggcctaggggcgtctggcatgagcaggccctgcggaaatgatcattctcctgaccgctgctggggcatggctgaggactgtccccttcaggtctgtctaatctctgatttctggcccctgagggctgctctgtccttgttctcccgggtagatggcagctcagggagggccggtagcactgccagctcctggccctgggggtggtctggacgaggggaggtactgctgggggctcaggtgcctggagctgagggaggaaggggtctcggctgaggtgggggcagttacccgaagagttgcaggtgtccgttctccttggcagggccggccagaagcaataggtccgggagctccagggctggactggaggctgccacccccatggtgacctcgttggcaacttctcccaaccgagtcacctggggccagaggtcagaggtcggggcaggatagatgtcggggcagaactgaggagggatcagaggttaggaatcttggtaggggaaaaggtcatgaaccaggtgagttgaaaatcaggctgggggccagatatcttgaaattaaagttcaagaatcatatgggtgtgaagtcagggaaactgaggcaagggagttacaggccagggttcacaaagaatctagagaactagaagtatggggtgtcagagatcacataggagttgggagtcgggaatcccacgagatggacgttatgggggagcaggggctttccaagtcaggaggaggtcgaggggcaggccgaggctggggatgagggggttctggggctccctacctgtacgaagttgctctcaaagatggggaagtcccgaaactggtcgaattcgccgctctggaggtagcgttggagccgtctgggacggcccgtgggagaggctgcaaccaggaggcattttaccaggacgaagtctgggggtcgatcctgggaggctgtgcctggcttcccaactgagagggcccggcacagccccgcggagaggacggggtatcagatgcccccgaattgccggccccatcctacttggttccttcaccaggtccaacccctctaggcctggctcccctctctcacctgccatcccacctggttccacctcgccagctccaccc

SEQ ID NO: 37609 - DNA, 1107 bp, Artificial sequence
  DNA replication origin
acctggttccacctcgccagctccacccagggccggcttagggccgcgatcccgcctcattgcaatgtccccgtccgacgggagcggacggaggagcagagggagaaagcgagggggcgggactacgcgcactgtgacgtcatgatgcggagcgggctttatgacgtcacacaagagcgggctcctgatttgtgatgacgtccctggagggggcggctcctggagatcaggccaaaggggcggccccatcctgctgacgtcaggccccaggtgcggacgggtgccagtgcgcaggtgccggggcccagcgcaggcgcacgggcgtcaggatgcggcctgttcctcccggcgtgctccgcggctcttggctcacagccgtcccttcgctggtgggaagaagccgagatggcggcagccagcgctggggcaacccggctgctcctgctcttgctgatggcggtagcagcgcccagtcgagcccggggcagcggctgccgggccgggactggtgcgcgaggggtgagtgctctttagctgtgcatagcgggcgcggtctacggatgtcgcaggtcttgggtctttaggtgagttacagacggaaggaggctgcgcagggctgagagggaagaggtgggagatccctggaaagccaggcctcagtcacgcacgcgcaggaggggcctcgccagtgcaccgggttgcaaggactgggtgggaggacaagcgcacctgtcggaaggctctggctcgggaatatgtatgagggggcggggctgggggtgtggaatcttggagaatccgacgtccgggcggttgaaatgaaagaggcaaggtgaagccgggcgcggtggctcatctgtcatcccaacgcttagggaggccgaggcgggaggattgctctaggccaggagttcaagaccagcctgggcaacatagcgagccctgtctctacaaaaaatactaaaaaaaaaaaaaaaattaggccggtcgcggtggctcatgcttgtaatcccagcacttcgggaagccgaggcgggcggaccacttgaagtcaggagttcaagaccagcctgctcaaaatggtgaaaccccgtctctactaaaaac

SEQ ID NO: 37610 - DNA, 979 bp, Artificial sequence
  DNA replication origin
ggggcggggctgggggtgtggaatcttggagaatccgacgtccgggcggttgaaatgaaagaggcaaggtgaagccgggcgcggtggctcatctgtcatcccaacgcttagggaggccgaggcgggaggattgctctaggccaggagttcaagaccagcctgggcaacatagcgagccctgtctctacaaaaaatactaaaaaaaaaaaaaaaattaggccggtcgcggtggctcatgcttgtaatcccagcacttcgggaagccgaggcgggcggaccacttgaagtcaggagttcaagaccagcctgctcaaaatggtgaaaccccgtctctactaaaaacacaaaaattagctggatgtggtggcaggtgcctgtaattccaactactcgggaggctgaggcaggagaatcgcttgaacccaggaggcagaggttgcagggagctgagatcacgctactgcactccagcctgggcgactgagcgagaccctgtctcagaaaaagaaaataaggcgtgggagggggctcttgaggaagtggagatgagttttgtctcctaaatatgcgtgagtatgcaagtttggaggttggagaaaaggaaagcatgaatcttgaatgtgcttaatagggactgaactcaggctgcatcttggctattgggctgtcaggtgataaggaggccatttgaatattagcatgaaaaagaaggcttgggagagggagagtgtcatttaactcatgagtatttgtggcgcaaggcttggaagtgaccttgggatagttgctttggcaatgaggttaggcatgtttgtagggtctggttttctgggggtgagggagtgcagagtatgaatattcatgaaatgggtggtttctagtgaaataaaggcaagcagcagtgattaacttgaagataaggctcctccctcagcccaccagtctgtctgtcctgggttctgtgggtgactactatgct

SEQ ID NO: 37611 - DNA, 1210 bp, Artificial sequence
  DNA replication origin
agggtggagcccaggcagcaggctccccacctccactgaccccactccccccacagtgctccctggtggagtcgcacctgtcggaccagctgaccctgcacgtggatgtggccggcaacgtggtgggcgtgtcggtggtgacgcaccccgggggctgccggggccatgaggtggaggacgtggacctggagctgttcaacacctcggtgcagctgcagccgcccaccacagccccagggtgagcctctgctgccttcgcggcgctcttgccacctgccccggcccttcctggcggcctcagggtctccaggtccctggactccgggcctcacccttctcctcctctccccttgccccagccctgagacggcggccttcattgagcgcctggagatggaacaggcccagaaggccaagaacccccaggagcagaagtccttcttcgccaaatacgtgagtggggctcccccgcctcccctattcccttcctgacagtcccggtgcctggccaggccctccatgctcccacccagactcccctatggtgctcgggcctgctccttgtcctccgggcctcctgtgtgtcctggtacctgggctgaggcttgtttgcaggaagagggtatggaagtgtggtcaggggaggtcgggccagctctagggcgcagggtcctgggggaggtctcggcctgagctaggttggagccatgaggctggagaggaagggaacagtggaggtttcaaaggaaccagggaggcttggaaaggaggggcgagcaggttcttcagggggttgtacaggaaggagagaggagtgggtccgggagggatgtggcccagggaggggcattgggggcagcagggtgcctgggaggcctcctggagctgaggagggaggggcctgtgctgccagcagcaggtctgagtcccgggggcttagaggctgaggcgtggggtggggaggctggggacagccggaggaggtggcttccacccaggcctctggtccattgagtgtggagactggtgttaggttgtggcacaggagcccaggcaggccaaggccagcgaagaggtctgtgtggcccgaggcaggctaggaggatgctgaggctgggatggctgagccctgctgtgctgagtgccctgcctgagggcctcacccgctccgcctggatagtccaacagttgtgctgcagggaactgaggc

SEQ ID NO: 37612 - DNA, 1804 bp, Artificial sequence
  DNA replication origin
ccaatttttgtatttttagtagagaccgggtttcaccatgttggccaggctggtcttgaactcctgacctcaagcgatccaccttagtctcctaaagtgctgggattacatgtgtgagccaccgcccctggcctctgtaggcttctttaacccatcagagagactccctggtaaggattaggggctaattactggtgcctcttcagctgtcagtccatcctcctttatttgtacccaccttccagtcagcaaggcacaacaatgttgttacaaaggaaacaaactcaatttggcccatttcctggaaatgcaatctcccaaacaggtttgtgtgaaccaaattccattttcctttgtttcccatgtgcagtcccagttgcatttccatgggagccaatccacccacccatagaatgacttgaaaatgtgtgaagttcagaagtttcataccaagaagtttgctgagcatgatgtttgtatattgattaggagtaaaaatgttcatttttacaaaatattacaacttctccctctcccctccttccacccagtatcccctgttcctcccccaggcattctggtcactgttcctttttgttgagatcattctcggtgtctcatatagctgggttgcagctccgttctttgccaggaggtggtaatagaggattccacgcactcagaatgcctcaggccggcgcctgtggcttctctcaatggagggaagtgtcctgcagggggcgctgttggtccttcaggcaaggtcgggttccctcgaagtctctgtcttagcagttgctggtcttcagaaacattgggcaccaattttctcatttctgaaatggaattcaggtgaggtcccctcagtgctgaggtgcttcatgttgtcagaggaagagttgggaagggagcggaatggagcagaaaggcgtcatccgctgctcactgagctcagataggaggccagggatcggcagattcaggagcccactcctggccaaccccaggggccccacccagtcctgtccctgctccttacgtgctgtgtatctttaggcaagttgcttcctgtctctgagcgtcgtctttgtttccgccttcctgggcctacggcaggcctgattcctccaggcagtgtccagagttccggacagatggaaaaggaagagagaatgggtgtcacaaaggtctgtccactcctgggcctcaggcttgggggccctgctcagggctagcctgtttgggcctcggtatggactcctgcctcctggtcaggacctggaaacctgggagcaggcaaggcaggaacaggagagggaggcaaaggcccaccaggcagggatgcaggggccacctggagacggaggagacggggctcccgggagggaggccagtgggagtgagagcttgaaggagagagagccaggagaggagacaggtccagagaggagggaaaggaaaggacagggcagagacagagaaaccagagagagggaaggaagagagacccaagggggagagacagggaaggaagagggaggtgagaagaggaagaggcagattcagaggagagaggagagaaaagaggtggaaatcaaacaggagaaagagggaggagaggagggaggagagagtgtaggaaaaaagcaggaggaaagagccgggcacggtggctcacgcctgtaatcccagcactttgggaggccaaggcaggcagatcacgaggtgaggagatcgagaccgtcctggctaacacggtgaaaccctgtctctactaaaaatacaaaaaaaaaattagcagggc

SEQ ID NO: 37613 - DNA, 1824 bp, Artificial sequence
  DNA replication origin
agacggggctcccgggagggaggccagtgggagtgagagcttgaaggagagagagccaggagaggagacaggtccagagaggagggaaaggaaaggacagggcagagacagagaaaccagagagagggaaggaagagagacccaagggggagagacagggaaggaagagggaggtgagaagaggaagaggcagattcagaggagagaggagagaaaagaggtggaaatcaaacaggagaaagagggaggagaggagggaggagagagtgtaggaaaaaagcaggaggaaagagccgggcacggtggctcacgcctgtaatcccagcactttgggaggccaaggcaggcagatcacgaggtgaggagatcgagaccgtcctggctaacacggtgaaaccctgtctctactaaaaatacaaaaaaaaaattagcagggcatggtggcaggcgcctgtagtcccagctactcgggaggctgaggcaggagaatggcgtgaaccctggaggcggagcttgcagtgagccgagattgcgccactgcactccagcctgggcgacagagcgagactccgtctcaaaaaaaaaaaaaaaaaaaaaaagaaaagatggccagagcaggaggggagagaggaagagggagaaagaaggaaacagtgtagggggtcagaagtggaaagagaagaaaaaacagaagaggaaagaaagacgagggggtgaaaaaagggacaggaaggaagagagggagagggtgggtgccatggctggtgagctcggagaagagggaagcagagaaacgggtgaaggagggagcgtcctagggagaagtgggtgggggagagggtgttgggggagaagagggtgggggagagggggccccgggagagggagggatggaggagcggggagctccagccagagaagaggaaagagaaaggagagagctaggaactgggaaggaaaagagctaggaggagaccatgagacagaaagagaagagggtgaagagagaggatagtggctgggaggagagaggaggagggaggagcacagagggagaggagaggaaacagccagagaatctgctagaagggagagaggagagagaagagccggacagggagagcagaagtgagaaaaaggagggtggccacagagaggacagcgagaaaaagagaacaggaagaggggaaaagagaagaaatgggagagggaagaagggtgggagagaaaacggaacagagagggggcacagacagcggactggaccgagagggagatggagcggtgcggagggggagagagaaagagggagggaaggagggtaggagagggctggagataggggaaaagagaaaaggagggtaggagagggctggagagagaagggaagttaagaagggaaggagagagacagacattagggaagaaggaaaggagaaaggaaaaaatacaaaaaagggcagagagaaaagaacaggccgggcatggtgcctcgcacctgtggtcccagcactttgagaggctaaggcaggaggatcactggagcctgggaggtggaggctgcactactgcactccagcgggtgagtgagcgagaaaaaaagcagaaaggaaagaagaggtgcatgagtgtggaagagcaatatggagagaaagaagggagagaggattggaagtagcgacagaggaccatgcccctccagctgaggagggggcgcccctaagacagcgtcagcccagagaccggggcaggaagcaggaacgtgaagcaggttaggagccagtgtgaggcacggagagggccgggtagctgggcggcgggggt

SEQ ID NO: 37614 - DNA, 967 bp, Artificial sequence
  DNA replication origin
gacattagggaagaaggaaaggagaaaggaaaaaatacaaaaaagggcagagagaaaagaacaggccgggcatggtgcctcgcacctgtggtcccagcactttgagaggctaaggcaggaggatcactggagcctgggaggtggaggctgcactactgcactccagcgggtgagtgagcgagaaaaaaagcagaaaggaaagaagaggtgcatgagtgtggaagagcaatatggagagaaagaagggagagaggattggaagtagcgacagaggaccatgcccctccagctgaggagggggcgcccctaagacagcgtcagcccagagaccggggcaggaagcaggaacgtgaagcaggttaggagccagtgtgaggcacggagagggccgggtagctgggcggcgggggtgtcgtgggcacagcccaggctactgcggggacaggctgccagacccggcgggtccaggttgggaactcggccatgcagcagaaacgttccctgcctcaacagggcgcagccaccccggggccatctctgtgacccagggagagaaaggacaacgaatgggactagacgaggatggggaggaacagagcagctgtggaaggtgcggcagagaagggcccaggagaaaggaggaagggaaggagctggaggggcgggagaacaggagacagaacaggacagagacagctgcccgggaggatgggagaacagaaagagggaggaaacgccgagcactgacctgggggaggggagtaaagagaagtgaagggggattggaagggaactggagaatgagagaagcaacaggcggggtgcgtgtaggagggcgggagagccaatgacaagacagaaaaggcagagaaagcaaagcaagaccagactcctcatccggtaacactgtgtcaggtcattgccctcccaccccgcccccaaccccataactgaaaacaagtaggaa

SEQ ID NO: 37615 - DNA, 948 bp, Artificial sequence
  DNA replication origin
cccgccatcgtgcctgctaatttttgtattttttagtagagacggggtttcaccattttggctaggctggtctcgaattcctgacctcatgatccgcccaccttggcctcccaaagtgctgggattacaggcgttgagccaccgtggccggcccttaaaagcatcaaactacatacaagaccgtaaggaagctgtgggtcaacgcggagggacgtgggaacccatcccggtgaagcggcagcgtcacgtcctttctcccagggatctgttggtcggagacatctggactttcatgtggacagcctgagtgacagggggacccaggggcctcacctgggctacctggggtgggtggaccctccactgtgccaaggtgcagcctgggctcggaggaacatgccctccgcctagtccctgacatccttttcacatccaacacgcagagcaggggcgtgagggagcaggcaagcagggaagggaaagacaatgagcaagagccagcgggacggtggggcggatggcagaggcttcgctgctggaaaatcagacgcagagtacgaaacgcctgtgctcactatgttaataataataataaaaggcaaaaaaccaggctcattgatacactgatattaacaagaacaaagtactgagagagagagagagaggtgaggaggaaggcagaagagggaaggctggctttcctgccgtccactttgtgacctcctgcgtgatggcgcgtccttccaagtcatggggtaacgtccttgtggcccagataatgagctgcagacggacgggaatgtgcaactgtggagacacgcgagcttatggtcccaggacctggcaggacatgaaatgagtttcttaaagggtgaaacagattgcaggaccaatcgtcccgatcgtccaaggcaggataaaaatatcccagcatgcggaggagccctc

SEQ ID NO: 37616 - DNA, 1899 bp, Artificial sequence
  DNA replication origin
aaaaggcaaaaaaccaggctcattgatacactgatattaacaagaacaaagtactgagagagagagagagaggtgaggaggaaggcagaagagggaaggctggctttcctgccgtccactttgtgacctcctgcgtgatggcgcgtccttccaagtcatggggtaacgtccttgtggcccagataatgagctgcagacggacgggaatgtgcaactgtggagacacgcgagcttatggtcccaggacctggcaggacatgaaatgagtttcttaaagggtgaaacagattgcaggaccaatcgtcccgatcgtccaaggcaggataaaaatatcccagcatgcggaggagccctccctgcccagtctcctccgaggggcctcggggcctctgcagctgcagctgttggagtcatcaagaagacggggacgcgggagggggacagggaccaggaggcgaggggatggcgggagtcgggggtggggttgggcggggtggggagaaggctgtcagcgccaggctcagacgagccggtgggagcagagacgaggagagggaagggtcaaggacaatgactggcagaggaactggaaaggaaggagcgggcatggagaggcggagctgggaaggacttgggggactagaggcgaggggagagagcttgtggggtgagggagaaaacggagaggaaagagcgagtgaaggtgaggatggaaaggaaacaggaaagccccatggaggggaggatgggagaaatagagtgtgtcagagacagagagggagagagagatggcgagagatggagagagaaagagacagcgagagagacagagacgttgagagaaacagagatagcgagaaagagtgagagaaagagacagggagacagcaagagagacagtgagagagacagtaagagggagaccgagagagagagtgagagacagacagcgagagagagacagtaaaagagagatagccagagagagacagacaatgagacagaaagcgagagacagagagagacagtgagagaaacagacaaaatgatggcgagagagtgagaaagaaagagacagcgagagaaacagagacaatgatggcaagagagtgagagagacagagcgagagagacagagacggactgagaaaatgagacagagacagcgagagatgggagagacagggagagagagagagagagagagagagagagagagagagagagaagcgccaaagagaagccaccaggagcgtgtggaggggaagccaggtggaactcactgaaggtgcagggagaggaaggggaggcaggagtgagaggaaagaggagaggcaaatccaagggacagaaactggaggcaaaggaggcagaggagggagggagaccaagggcacaggccctaaccacagtgctgccccttgtccccggcccccttgtctccttctgacacagtcggttgctgtggacgggcacagtgagactggggccccatcagcgcctcctctgggggttgggtacagacgatgaggaaatgacagggcggggatgaggaggaggacctagcgcaggggaaggagagggcagaagacagtggggggtggcagtctggaggacaagggagaagattccagaaaggctgagagccacaaggtggacaatcaggaaaaggtggggctgggtggaagcgtgtggaggactggaatatcgcccaagggaggagcagtgtgtgcaagacctagagaggaggaaacactgaggatccagccgaagagaggacacacagggacagggacagcctgtgtgtgtgtgtgttatggatagggggaggaggaggggggagaggaaagaggaggaggagaaggaagaaggaggaagaggaaagaggaggaaggggga

SEQ ID NO: 37617 - DNA, 1572 bp, Artificial sequence
  DNA replication origin
cttgggcaacacggtgaaaccccgtctctactaaaatacaaaaaattagccgagcatgttggtgggtgcctgtaatcccagctactcaggaggctgagacaggagaatcgcttgaacccgggaggcagaggttgcagtgagctcagattgcccccctgcactccagcctgggcgacagagcaagactccatctcaaaaaaaaaaaaaaaaaaagagagagaggcacgggtggaaagtgtgaagcagaccagtaggtgtttgttaagtgttatttcttttccccaagagacaggagaaagtaaaggaggagtgaggagaggaggaagaggaggaagagaaggaggaagaggaggaggaaggagaagaggaggaagagaggaggaggaggaggaggaggaggaaactccagcagagagaatagaagagactgttgtgtgggaaggagacaatatatgtaaagtgactaatacacagtgggtgcctaataaatgcccattctcctccctggcagcaagcacagagaaagcagccaggaggaagggagcaagcggagagaaggagaaaaggagagaagggagaacagagcctgtgaggcaagcagacagtgtagatgaagcggcagcatacagtaggcactcaatacatgcctatttcctccctcaggaaagagctggcagggcagagaggagggggagaagctggtggagagaaggaggcagggagaagagaggaaatgagaacaagtacactggtgaggtggtgggcacacaggaggcactcaataaatgcacattgtcgtccttggaggagcaagagaacaagacagaaatgaaggcacagacaggaatgagaggaaaaggttggcccaggaggcctccgtgggggtggaggagcagagggaggagggatcagtgagaggagtgtggcagaggagaggatacgcagggagggggcattgcaggtaaaccatggggcacacaggaggcactcaataaacacctgtacccttccccagaaaaggacccagagaacagcaaggggataagctggcagagcaagaggggcagcgagaaagaggtaggagatgaggagggatgttaattgcctggcatacagtaggtgccccataattgcttgtctttgtccccgagaaagagccgatgggacagaaagaagttagagataagggaagaaggcgaagtgaagggttaggggagaataagaaaactgtctggcacacaataggtactcaataaatgcccattttcttccctggcacagagcagaaagaagcagagactggtggagtcagtggagactgaagggcaagaggagaggagagaaaggacataattgcttgcataccagaagtgctcaataaatgtagtccttgccttggaagagggcagagagctcagaaacacaaggaaaggacagaagagggaccggggaggaagagagtgaggagagaggtatgtaaggtgtttagtacacagtaagtgctcaaaatgtgtccactccctctgccaggagagagcagaaagtcagaaaggagaggacaccaatagagag

SEQ ID NO: 37618 - DNA, 2624 bp, Artificial sequence
  DNA replication origin
agacgcggttaggggaattgcctgccaagcatcaggtgcttaataattgcccgtttcttccatggaaggagccagaggcacaggaggaacaagtagagggcgccgaggacggcacacccgaggcgggcacacccgaggcgggcacacccgaggacggcacacccgtggcgggagacggagtgtgtgaggagaggcgaggaggcattttgggtgcatacagcaggtactccataaatgcctgtccccttccccaggcagagcagagaaagcaggctgggagtaggtggagaccccaggaagggaggccaggggagaaggagagtctgagggtggaggccgtgggccaggcccgcaggaggtgcaccttccccaacccagcagccgctgtggccgaccctcctccgtggcccagcccacaggcctccccagctggctggctcctccggagccctgacaagggcccattgtcctgggcctggcaccgcctggcctggcctggcctggagggggaggggaggctgtccagccctgaccggctcttgtcccctgtgtctgtttgtgtgtattggagtgggggcgctgtctggtctgtctgtctctgagtctctctgtgtctccctgtctctcacgtgctgtgtctctgtgacctgctgtctctctcatttctgagcttacggcccccatcttgtctctgtctcgctctgtctctctctgtctctttccgtgcctgtctctggttctctctctgcatccatctctgtctctgggagggaggagcccccacccccagctccagaattcccaccccctatacccaggatcagggctggggggccgagctgagaggcagaggagtgaggaaggaaagaaggaggcgcagaagggagagaggtgaggacagaaacagctttattcagcagggaccgcagaggccccggagggcttcgtccagggagctggggagagaggaggagtcagagacaggagagacagacagagatggagagaaatggggggagagacagagacagaaatgggggtagagacagagacagagagaaatggtgggagagaggcagagagaagtgggggacagtcagagatagaaatggggaagagacagagatagaagtgggggagaggcagagacagagagaagtagaggagagacagagatagaagtgggggagagacagagagaagtgggggagagacagagacagagaaatgggggagagacagagatagaggaagtggaggagagacagagagaagtgggggagagacagagacagagagaaatggagagacagagatagaagtgggggagacagagacagagaagtgggggagagacagagagaagtgggggagagacagagatagtgggggagacagagacagagaagtgggggagagagagatagaaatgggggagagacagaagtgggagagagacagagatagaaatggggagagacagagacagagagaagtgggggagagacagagatagaaatgggggagagagacagagagaagtgggggacagacagaggcagagaagtgggggagagtcagaaatagaaatgggggagagacagatagaaatggggagagacagagagaagtggggagagacagagagagaaatgggggagagacagagatagaagtgggggagaaacagagacagagagaagtgggggagagagagacagagaagtgggggagagtcagagatagaagtgggggagagacagagaagtgggggagaggcagagaaagaagtggaggagaggcagagacagaagatggggagagacagagatagaagaagacagagagaaagagacacagagatacaaagccagggagagacagagagatggggagaaaagggagagtaagaaagagaaacagggggtgctgagggagactgagagaaagttggggggaggagacagagacacagaaaagaggtgggaggaagagacagatgagacagatggagagacagagagaaacagacgagaaggaggagagagagatggagagaacgatagggagaatgagagacagagacagtgaggagagggagatgaggcaggagaggagataaagagaactggggagagggacacagagaaagacagatggggagagagacagagacagggagaaagagaaggagagagagacggagagagagaggagagagggagacagcgggaaagagggggagagagagagacggagagagggagacggagagagagagacagagggagagagaaagagggagagagagagtgggagagagagacagagggagagagggagagggagagagaaagagggagagagagagagagggagagagagacagagggagagacggagaaagagagggagagagagacggagagagagagacagggagagagagacagagggagacagggagagagagacacagggagagagagagagagggagagagagagacggagagggagagacggagagagagacagagggagagagagacagagagagggagagagaaggagagagagagagagagggagacagagacagagagagacagagggagagaggga

SEQ ID NO: 37619 - DNA, 920 bp, Artificial sequence
  DNA replication origin
tgcagcctgggggtgtggagaggccactggcatctgtgcggggcgccccagccccctcagctctgggacaggcctggccgggtgccctggggcaagcggtagccctctgagtcctgaggcgctcccctgggaagagcagtcccagcgggtgggggcacaggcgctctgcactgtgaggggcagacagtaagtgcttagttgatgcaatgacctggtctgtcctgcccgctctcacctgccagaatatgggggttggggcaggagggagtgggagcaggaggaggtcagctggcccctctccccccacccccagcgcccccagctcctcctcccggggctcctcactccggaccttatttggccatagcccaggacgcacctgggggccacagccccgcctgccactcaggcccaagaatagcaacactcaggcccccgccagtctgtctgggacctgcgatgggacaggcgacaggcacagggtggcagggaggggcccaggggcactgagagaaggggagagacacagacagaggggagagacagcgagctgaggagagactgagagagaccgtgggagagacagagagacagggtcaaagagacagagaggggtggagagaaatgcccagcaagagagatagagaagggaggctgagacaggcgaagcgagagagggagacacagagacagagggggttagccaggggcccggggccagacacccagatggggcagagagcgagacccacaccagcagaggcgtggggagcccggtgggcgggcaggaggtgcagggatctggatgggatggggccagagccgttcgggagtctgcaacccccagcagtttcccctccggtgctgtctggcttttaactttacgacctgccctttgaccttgggaaaacttgcaaacc

SEQ ID NO: 37620 - DNA, 815 bp, Artificial sequence
  DNA replication origin
ctgggtggctgtgtgaggagttggtaagttggtgggtgggtggctggacagacagggtgatggtggttggtgaagggccgatgtgagttgggtggacggtgggtgggtgggtggacggtgggtgggtgggtgggaggtctggttgggtggccgcatgggtgggaggtttgagtgggcaggtgaacggatgagtgtcgggaaccagggtggctgattaaggaacacctctgggtgggctcaggaggccctcaccaccaccagcctgggccccacatgttcagcaacatttcaccggcgggcggagcaggccctgatggcagtgtcccctccctgcccacacaggcccctgtcccagctggccctgccccaggtactggggctgatcctgaacctgccctcgcccgtgtcgctggggctgctgtcactgccgctgcgccggcggcactgggtggccctgcgccaggtggacggtgtctactacaacctggactccaagctgcgggcgcccgaggccctgggggatgaggacggagtcaggtgagccccacagaggcgattccaagaccaggggcctgaaaccccactccccagacggaatgcccaggctggccgagcctcagtctccccatttctcccacccagggccttcctggcggctgcgctggcccagggcctgtgcgaggtgctgctggtagtgaccaaggaggtggaggagaagggcagctggctgcggacagactgaccatggctgaccatcggcgcccacagcgcagtccctgcgcatccccctccggctgcgcacactgcatgcctgg

SEQ ID NO: 37621 - DNA, 1487 bp, Artificial sequence
  DNA replication origin
ccttggggacagggcagagtcagggcaggagagacaggacttggggacagggcagagtcagggcaggagagacaggacttggggacagggcagagttggggcaggagaggcaggacttggggacagggcagagtcggggcaggagaggcaggacttggggacagggcagagtcagggcaggagagacaggacttggggacagggcagaattggggcaggagaggcaggacttgggggtggatgagttgtggggtctgaagcggggagagtcaaaggctgaggcaacttgtggcccctgggacccccattttgtggggaggcctttccaggggtccccacctcagctctggccacccccactaccaggttggccccagactcccggctgaaccctcatcgcagcctcctgggcaccggcaactatgatgtcaatgtgatcatggccgctctgcaggggctgggcctggccgccgtgtggtgggacaggaggaggtaggccccagagcagcacagcatgtgctgggccgggcacagagggcaccctatagtgtgagcctgttggggggcagggaggggaatgtggctgggggaggttggcatgaatgtgggaagcctggcactgatgggttgaaagggggagatcaggtggtcgatgggctgagatgctgggtggatgatggttactgggtgaatgctgagtaggccgttggatgtgttgggtcagggggagtgaagtgatgggtgttcctgggcaatgggcagcagacaggaggctggggagttgggtggatgaatgggaagttttgatggccggctggccagtggctgggcatgtggctggtggatgaggggtagaccaatggcaggggggtcaagagtgagtgaggattgggggcatggcgagtccactgttgggtgaatggctggctgggtggtggccggctgtgtgggtgggtgggtgggtggtgggtggtgaacagtagatggctagttggatggtgatggtggttgggtggttgacggggaggtggggcgggtgtatatgagggatggaagtgaatgcatagatgggaggtgagtgtgtgaatcgtcattgggaagttggctggtggctgggaggctcagtggggtgggcggatcatgcatggatcctgggtggctgtgtgaggagttggtaagttggtgggtgggtggctggacagacagggtgatggtggttggtgaagggccgatgtgagttgggtggacggtgggtgggtgggtggacggtgggtgggtgggtgggaggtctggttgggtggccgcatgggtgggaggtttgagtgggcaggtgaacggatgagtgtcgggaaccagggtggctgattaaggaacacctctgggtgggctcaggaggccctcaccaccaccagcctgggccccacatgttcagcaacatttcaccggcgggcggagcaggccctgatggcagtgtcccctccctgccc

SEQ ID NO: 37622 - DNA, 1261 bp, Artificial sequence
  DNA replication origin
cagtctgtccctgccttcagtccccacttgatcctagagagtctttctacacctggagatggccctgcctcccctgcctcttgctccaagcctcctccggctctcggacatcttaagagtcccagcccctcagactgattattatggtatttagtcatctcctctatcattcgcaacaaggacccatcagctctttcatacaaaagccatgctggagaccctgagatgactcagacacaagtgccagcctaagggtggtgagggaaacacacacacacacacacacacacacacacacacacacacacgagcgttttcctcccatgtcctgcctgcccagggtccagatagggaacagaggtgcagctgttcagaggcagggcccagagacaagtggtgacaggcggaagagccttcctaggcaggggaagagctggaggaaaggttggcgggggtggggcgggaggcggtgggcaccggggatgtggctggggacaggggaccaggaaggagggtgctgaggctctgaggtgaggccaccagagccagaccacgcagggccttgtgggactctgtcctgggggaaatgaggcagcagagtgggctgtgagcaggggaggggtgagggcaaccccgtgggagaagcaagcagtgttaaatcagggtgatgcgggcagctgtcatcgttgaggtggctcagttcactgggggagcccagacagggccccgatccagcctggaggtcaggaggctcctctcagaggacgtgacatctgaggtgggccttgaaggacagaggaagggactggcggagggacagggactttgtccaaggcattggggagccatgggagagctgagagcaggagagggccagggccgtgtgggaatggactggagggaggctggaggctgcgggagaagacagagcccatctggggccttggggacagggcagagtcagggcaggagagacaggacttggggacagggcagagtcagggcaggagagacaggacttggggacagggcagagttggggcaggagaggcaggacttggggacagggcagagtcggggcaggagaggcaggacttggggacagggcagagtcagggcaggagagacaggacttggggacagggcagaattggggcaggagaggcaggacttgggggtggatgagttgtggggtctgaagcggggagagtcaaaggctgaggcaacttgtggcccctgggacccccattttgtggggagg

SEQ ID NO: 37623 - DNA, 999 bp, Artificial sequence
  DNA replication origin
ctttgcctggcaacgcccctcaccccgcctgcctctccgctccaccgagccaggggtttccgcatccccttcctgggcggcggctctgggctccgagtgcggggcgggcaacaccgcgctgactgggcaggcgggacggactacagctcccggtgatccccgcgcgccggactacgactcccgtggggccccgcgggactcctgctccacacggaacgcccgggccgcgtggccctgaagtcggccgtcgggcctaggaaatgccgcactacaacttccgtcgggctccgcggcaggtcccggaagtgcgcctcagaggcccttctttcgcatacggccgcgcccactactgctcagagattctaggaaacttagtaggtaggctctcgcgatagcttcctggcgccgcgctctcatgggtgctcgcccccggcgatggcgtcatgcgcggtgcgcagacgcagcgtgacgtcacacaagggaaagggatcagagacgccaggcggtgcggggggaggcagcggtgatctttactgagtcagaagggagaccctggggaagtggggcagggcaggggtgggatggtggtggtgagaggccaggcagatgatcttgtctcgggagggaggaggcttctcagcagagatggatccccggcctggaggggagctggcagcaggctgcggggagaggggaatgagcgaatgagacagaggagagatgaggagacagacgcctgggggaggcagtggtgggaggaggggacagggcaggggggcggtggaggaagacccggagagagcgggacagagccctgggggtggacagagacagagagagtctcgatcagaggcgggcacaaatggagacatctacagtgccaggattcaaagtcatggagagaggttaaggaaataaaggtcagaaagaaagaaaggtcaacaaatacagaaccagaactgcagaactagtgagagcccgggacccccaagctctgca

SEQ ID NO: 37624 - DNA, 1001 bp, Artificial sequence
  DNA replication origin
cagaaggccgtgacggtggcggagccggtgaccgcgcctggctcggcagggttctctctgcgggtgtgcacagcaaagcttcggcccgtggggccccggggtccgctcagctctacatccaccacgtgcatgtccgtgaggctgggacaagaggggcagtcagtctggagagcctggactcagcccaacaccctgcttagctctgctcacctggtatcagccacgagcaccccaatcaccccatcgaagcccaggctgggggcagccagggcagccgccgccatggtgttggaatttcgcggggcaaaggggcagagcccacggacagggccttcgtagagcacagtgcaaggcccagggctgtgggctgcagccaggggtccctcaagccggaagccatcggggtgtgtggccatggtgacacgaaggctctggaagcaagagcccgggttagggggagtggggtctttgcaggcctcccctggttcctggggagcccagcaggcctcacccggaggcccccagctgcatccaatctcctgatgtcctcagcgccccacagggcccctcgggccacaaacacggcgtggtcccagtgctgtgaggcctccaagagctgccgctctgtggtctggtcacttagagctgagggggaccccacctggggtggatgaaggaggggagggttgaggtcagggaaggatatccacttcagggtggggtgagaccaagacagaaggggcagggctctgcgtaaatggttggggtggggcttaccaggagattggcatggcgcaggatttgtgccccagattcatggattattttgggatgggccacttccacaaccagatcagggcgcctgggagaggggaaagagggcggagggtcttggagaggtattaggcctcttctccccaaggttccctccgagtctactgagggctgcccttcttctccctgacctgggaggcgaaatgagatgaatgggttcgtcctgt

SEQ ID NO: 37625 - DNA, 859 bp, Artificial sequence
  DNA replication origin
gggtgagaccaagacagaaggggcagggctctgcgtaaatggttggggtggggcttaccaggagattggcatggcgcaggatttgtgccccagattcatggattattttgggatgggccacttccacaaccagatcagggcgcctgggagaggggaaagagggcggagggtcttggagaggtattaggcctcttctccccaaggttccctccgagtctactgagggctgcccttcttctccctgacctgggaggcgaaatgagatgaatgggttcgtcctgtttcacatttgcttgaaccaaggcccagagagggtcagggaacccctgagatcacacagtggctaagagagccaggacaggagcttcagggagctccactctcccatggcaaggtcactgacctttccccaagggcagcaaggttctggagctgcagggaagggggcacgctccctgccattcgtcctgggtcacgattccagacaaaaacaagttctaggccaagttctggtccctgagccaagaggcgggagacgagggactgtcctggggagagggaaaggagagggctagagatccagagagagggggacagagacccagagagagaggaggtggggacagagacccagagagagaggaggtggggacagactcagattgcggggtagggagacagagatgggggcagggcagagacacagtggggtggacagaggcccagagagaagggagacagagacggagaggacagagacctggggtgggggtgcagtgggcagacccagagacacagccaggggcagatagagagagaaaaaagtgtttgtggagggcagagagtcttgggagcttta

SEQ ID NO: 37626 - DNA, 1013 bp, Artificial sequence
  DNA replication origin
acgaggggagaagggggctgggcgcaggcctgtgtgtcctcagggctgtgtccccgaagccacctcagcgtgggaaagcactggaaggccctgcatggctccgtccctccctctgcctcccccagcagcgtgagatggcagccctggccagccccagccctccagggcctgcaactcgggcaccttgaccccccaagagacatcaccaccccctcccccaacccacccaacagctgcccactgtgccagcaaccccccagccaggcccgctcagggtttgctccctgccctcccagggctctgctcctgcccttctgagtggcactgtggtgcccctgccgccccaggcccacccgatccggccctccagcctcccactgaaccggccagaaatacagctgctgtgccccagaggccgcaggcccagcctcccgcttggcctccctccccttcggcaccccgtcctctggagcagccttgagggggtctgcagtggagagacacactctggattgggccctgttgtgggttgaattgtcacccagaaagggaagcgcagaagtcctgacctccagggcctcagaatgggaccttatttgggaattgggtttttgccaaggatggagctgaggttatactggaggtggaggctcctggtccagtctgacctctgtccttgtaagaggggaggttaggcaggctgcagtggcccacacctatagtcccgacactttgggaggctgaggcaggtggatcacttgaggtcagaagttcgagaccagcctggccaacatggtgaaaccccgtctctactaaaaatacaaaaattagctgggtgtggtggtagtcgcgtgtaatcctagctactcagggggctgagggaggagattcgcttgaacctgggaggcagaggcttcagtgagctgaaattgtgccactgcactccagcctggacaacagagcaagactctgtctcaaaaacaaagaaacaaacaaagaaaacggtcaggcgc

SEQ ID NO: 37627 - DNA, 971 bp, Artificial sequence
  DNA replication origin
actttgggaggctgaggcaggtggatcacttgaggtcagaagttcgagaccagcctggccaacatggtgaaaccccgtctctactaaaaatacaaaaattagctgggtgtggtggtagtcgcgtgtaatcctagctactcagggggctgagggaggagattcgcttgaacctgggaggcagaggcttcagtgagctgaaattgtgccactgcactccagcctggacaacagagcaagactctgtctcaaaaacaaagaaacaaacaaagaaaacggtcaggcgcggtggctcatgcctgtaatccgagcactttgagaggctgaggtgagtggatcacctgaggttaggagttcgaaaccagcctggccaatgtggtgaaaccccatctctactaaaaatacaaaaattagccaggcctggtggcgcatgcctgtgatcccagttacttgggaggctgaggcaggagaatcacttgaagctgggaagcagaggttgcagtgagctgagatcacaccattgcactccagcctgggcgacaagaataaaactccatctcaattaaaaaataaataaataaaagagggggagttggacacagacggacgcacacagagggaagagatgagaggctacaggggcaggcactggaagactggggtgatgtgatacagccaccagccaggacagcctggggacaccagaagctggcgaggcaggaagctcccctgaggtatccccaggtttcagagagagcgtggccctccctccagcctccagaactgtgggacgatagatttcctttgttataagtctccacctgggtttgggtgtggtgtggcggtgctgggggaggagtttaggaagaaagggaatcagaccttctctggggtctccagggtgaaggctgaggggcctaagaccacccggaggtgccccgtgcccaccctcccgacggagctgcgaggctggc

SEQ ID NO: 37628 - DNA, 845 bp, Artificial sequence
  DNA replication origin
atcacgttcatggccgcggtgatgctcgtggccttctacaagctgcgcaagcagcaccagctccacaagcaccacgggcccacgcgcaccgtggagatcatcaacgtggaggacgagctgcccgccgcctcggccgtgtccgtggccgccgcggccgccgtggccagtgggggtggtgtgggcggggacagccacctggccctgcccgccctggagcgagaccacctcaaccaccaccactacgtggctgccgccttcaaggcgcactacagcagcaaccccagcggcgggggctgcgggggcaaaggcccgcctggcctcaactccatccacgaacctctgctcttcaagagcggctccaaggagaacgtgcaagagacgcagatctgaggcggcggggccgggcgggcgaggggcgtggagccccccacccaggtcccagcccgggcgcagcctgaccgggacccctccctcccacagcccagcccaccttctgggaccacgcagggaattggggagaggtggcttccagccccatctggggctcggacccccagtaaggacagggtggggctccaggagcggagtctctgggatcctcgcctcacccccgccaatccccggtgacgggaggggacgtgggacccaggagaagtggcctgagttctccgcgtttcctcctcgctctcccaccaagcgttccgggcccgccgccttccaggggagagaggagctttctccaggggtgtcctttcccctcggccccaaacaccttccttttacggttcagtttttgcagtttgacgcccgtccctccctcccactcctccgccctcaaaactgaa

SEQ ID NO: 37629 - DNA, 2167 bp, Artificial sequence
  DNA replication origin
cggtgcgcgtgggcccgtggtgcttgtggagctggtgctgcttgcgcagcttgtagaaggccacgagcatcaccgcggccatgaacgtgatggccacgaagcagccgatgatgattttggtggtcttcatgacgtcgtccaggtccttgagggcgttctccgtcacatccgtgatgggcaccgtgaacgccttctccgtgggccgcgaggagcgcggggcgggtgccgtggtagaagacgaggcagggccggccgcgtccccaggccggcccccaccccagacaccgtctgtcgtgggccctggcggttccttctccgtcccccgcggctgcagggcctcctctccgggctgcgtctccagggtctccacggtcaccgtggtgaagtaggtgtagccgccactgccccctccaacaccaccactgcccccagggccgcccccgccgctgccggtgcccccggccgccacggggtccacggccgagacgttgagcgtggccgaggcggtggtgttgccggctgagttcgtcaccatgcacgtgtactggcccgtgtcctgcacggtgacgttggtgaagttaagcgtgccgtcatgcaggacggagatgcgcacgcggtaggagccgtgggtcatgagggtgccgttgggcgtcagccagttgacggaggtcatggaggtgcccgtgcggcatttgagctcggcagccatgccctcggtgacgttgaggtccgtgggcggctccacgatgacgggcgcatagcaggtgaaatgcgactggtccagctccccaatgtagcgccccttgaggccggcgggcgcatgacagcgggcgcagcacgtcgtgttgctgggcaccgtctccttgagccaccagctcagccagagcacgtcgcagttgcaatgccaggggttgtggttgaggtgcacgcgctcgaggcggtgcaggggcgtgaagaggtcgtggggcagcgacatcaggttgttgtgggacaggttgagctcctccagcgacttgaggtcgtcgaaggcgttgcgctcgatggtggctacctgggcgtgcatgagccacagcttgcgcaggctggtgagaccctggaaggagcccgggcggatcaggtccagccggttgcccgacagctccagctcctccaggcgcaccagggccgtcaggttggggatgtccttgaggttgcacatgcccaggttgaggtagcgcaggttgaccagcccctcgaaggccgcctccgagatgtattccagccgcttgagctcgcccaggtccaggcgccgcagcgagggcacgcggttgaaggcgtaggaggggatgctctcgatggggttgttccgcagccagagctcccgcagcttggacaggtactcgaaggcctgcgtgggcaccgtggtcagccggttgtcaaaaagctccagcgtgttgaggctgggcagcccgttgaaggcgcccacctcgatcttgcgcaccaggttcttgctcagctgcagaatctccaggtgccgcaggtgcttgaacgtgtccgtccggatcacctggggagagggagacacggatcagtcacggagatactgacggggaccgtggggggatcaccaaggtcccgggcgcaggtggggccgtgtggctggatctcccgtgctgtgctgtgacggtacgacctatattgcaacatggtttgatgagtttcttataaagttaaaactggagtcaaggctgggtgtggtggctcacgcctgtaatctcagcactttgggaggccgaggcaggtggatcacttgaggtcaggagtttgagaccagcctggacaacatggtgaaaccctgtctctactaaaaatacaaaaattagccaggtgtggtggtgcgtgtaatcccagctactcgggaggctgaggcacgagaatcacttgaacccaggaggcggagtctgcagtgagtcgagatagtgccactgcactcctgcctgggcaacagagcaagactccatgtagaaacaaacaaaaaaactggattcaagaattttgggggaccaagcacaggggtggctcatgcctgtaatcccagcactttgggaggctgaggtgggcagatcacttgaacccaggagatcaagatcagactgggcatcagaacatagaccccatctctacaaaa

SEQ ID NO: 37630 - DNA, 1162 bp, Artificial sequence
  DNA replication origin
ccagtggggggggcgcggggagacccaagaagcccctgcgccccccccagcacgatctcgacaggaagccctggagaactggggaggcagagaccccggctggccggaggcatgtggaggggggggcctgggcgcagggagaggcccagcggaagccaagccaccagggtgagtgtcccccaccgtggggttgtggggagaaaaggatgggagatggcggagggcggcggggggaaggggagggaggccgagtcgctgcagaagccgtgatgggggtggggggatgcgggctggcagcgggagagctggggacagatgcggaggtagacatggcagcggcaggcctggaggccggggtgggtgccgtgggctcccacaggccctgcggggtcccccggcctcaaatccaggccctgcgctttgggccagccctttggctaagagggtgtgggctggatcatcgccagggtcttaagaggtaggagcccctgacccaggataaggactgggcattgacctccctgttcacattcaggaaaatgaagaccctcaccgcactcacatagtcagacacagacacacggccccagccctgcaggagaaaaatgagcccgggtggacacagaatcaacctctctctctttctctccccagctccctctttcccctgccctctgtctctctgcctctgcttctgtctctgtctctctgtgtctctgtctagccctcgctctcacacatgcactcagatacacagacgtatgcacacacatttttatctgggttaaaatggtcttggaaactgcaggaggagggagtgactgtgtgtgtgcatagccgtgtgcctgggggtgagcctgtgtcgggggtcctgagagtccaccgtgagaggggggtcctgagagtccaccgtgagagggtgtgccccatcactgctgagtgtgtgagtgggtcggtgtgcgtgtttgtgtgacctgccctcctcctggtctcttgggaatggtttggggttggcctgtgttggggcagggcctgctggtgtgggtgtatttgtgtgtactcagagatgctgcgtgcaaaggagagctgggagccagagggtagacccagggccgaagtaccccctctgcgccctcccggcctgctctgtgcccttggacag

SEQ ID NO: 37631 - DNA, 953 bp, Artificial sequence
  DNA replication origin
tgtggtatatcagggttggagtaaaggctgtgtggcatggtgggggttcaaaggagttcctggggtacaggggcatctgcaggaaaacgctgggcaagattgtgtgcctagacccagtggggggtgtgaagctggggggttttggctggaagtgggggcgagggggtcagtggtggcccagcccggtcatgcagccaacgaggctgtctgtgtgccatgaggctccggcttggcacggcccaaccacccccctttcttgggcagcccagccggcaaccttcctcccccgcttcccccgaccttcctcggctgcctcctcggctgcccagaaccaatgggttaattagataacggagcctttgattagcgggggagggggaggcctcccccaggcggcgcagggaagggaggctgaggaggagggaggagaggcgccctccccgttcagaaggagagaaagaaggagggaggggtggggagggagggagctgaggcacagcttggctctgcactgccgtgtgactagaaattgtaatcgcggagaaagagagagacagacagagccggggagaaagggaccaagacagacggacagacagacaacctgactgagacgggctcagggccgatgagagggtgacagggatagagcaagagggaggaatagatggaggagaaggagagaaggggcctgggggtcccgagggaggcaagattgtgaggggggagactcaggagggggttgaggccagaggaggtggacggggaccagaggcggagggggaggaccgagaggggcagagagagagttaagggggctggggtcggtgggtggagagaaaggaggctgcggtcgggggagagtcgaggtagaggtgggagagggggtggaaggagaccggaggaggcgagcggggaggggagcagagaactgctgcagtggccaaaggaca

SEQ ID NO: 37632 - DNA, 2375 bp, Artificial sequence
  DNA replication origin
tagccatccgggtggtgctggggcacggagggtgacccagggcatggagggtgacccgggacattggtgtccagctgacgtgagatgtgtgcttcctcggccaggtacggtggcccacacctgtcatcccagcactttgggaggccaaggcaggtggatcactggaggtcaggagttcaagaccagcctggcccacatggtgaaacccccgattctaacttaaaatacaaaaattagccggggtggtggtgagcgcctgtagtctcagctactcaggaggctggggcaggagaattgcttgaacccaggaggtagaggttgccatgagctgagatcgcgccactgcactccagcctgggcaacagagtgagactctgtctcaaaaaaaaaaaaaaaaaaaaggtgctgcctctgccagcaggcctcctgggatggaaggggacctggggaccgagggtgtccagggctgggagcctgcattgtgcagctattgcagtgcggcctggctcggtgtgcagaacggagagtgggggtatctgtgtgtgagcgtggggggaaatagactcacagtgatgataacgtacccatccgtccctgcacccagtgtttggtgagcaactgccatgtgcccagcactgttgtgggtcctgggaaccaaatagtcacaaactgactgccctcgggaaacttgccttcaagcgcacggacccatataaaagctcagatgctgataaatgtcatggagaaaaaggaaacagagaaggttctggagagggataggggtgctgtttgatgcggggcggtcaggacggcctcactgagaaggtagcattggagcacggacctgatagagagcagggcaagagccctgtggacaaccggcaaagagcattccaggaaaagggaagagcaggtgcaaaggccctggggccggggtgtgcacggcctgttctggaaacagcgagtgagcagggggaggagggaagcgatgaggtcagaggaggagctggggtggagagtggagacctgaaaactgaagtcctcatctctgctctgagtgggacgggagctgtggaaggctgtggagcagaggcggggcagggtccatggggtgttgacaggatacccctcgctgcccgtggggaacgcacggggagtgggggtgaaggcagaaatggggaggctggaggggaggacactgtaatcgttcaagagggagatgggagccaggtcagggaagtagcctgggcgtggggagaaagatcctctgattctggggtctgattccgcatatgttgtgaagacagaactctttaccaaggatttagcgatttaatccccacagtggccctaggaggcagatactcccattatccctgtttcacagtggagggaactgcagcttgggagaataagccaccggcccgaggttacacgggaagtggcagcagagtcaggactcaaacccaggcctctcggcactcaccaatgtgccccactctcgagaggtgccttttgtggcccatgggtgtcctgggctagtgtctagcacatagcagggactgggtagacatttgttggacagatggatggaaggatggatgggtggacggatggatggatggatggatgggtggatggatgggcggagggatggaaggacggatggatagacggatggacggatgggcggatggatggacggatggatggatggatggatggatggatggatggatggatggacggatgggcggatggatgaatggatggatggatggatggatggatggatggatggacagatggatggacggatgggtggacggatggatggacggatggatgggcggataagttgaatgaatgaacgtggctgccctgcagattttgcagaagtgtgtcaggaggtggatgtcaggatctggctaaggtccaagggagaggggttcctctaggggtgggggcctttgtggcatggagaggggctggccctcagccacgggacggggtgacggtgcagggcgcaggttccagtgccggtatatcaggtgtggtatatcagggttggagtaaaggctgtgtggcatggtgggggttcaaaggagttcctggggtacaggggcatctgcaggaaaacgctgggcaagattgtgtgcctagacccagtggggggtgtgaagctggggggttttggctggaagtgggggcgagggggtcagtggtggcccagcccggtcatgcagccaacgaggctgtctgtgtgccatgaggctccggcttggcacggcccaaccacccccctttcttgggcagcccagccggcaaccttcctcccccgcttcccccgaccttcctcggctgcctcctcggct

SEQ ID NO: 37633 - DNA, 984 bp, Artificial sequence
  DNA replication origin
tgctggagggctgtgtaacctttggcaagtgccgctcacctctgaatctgtaaaatgggcacaagaaccatcccttcctcccagggccgtggggagaagccagcagcttgaggagtggatagcatggcacccacatgtaatcagtatttcccatcactactaggggtgcgtgggggcagagggcagtccatggagcctctgccagccgggcgtgaagccgtggtggggtgtcgggcgtgtgatatcctgtgcagtgcgggtgactgcaggggctgaggaagggtggctgttcagcatgcctgtggccttgcctgcaccctgccccccacacacaggcagcctccatgggaattgttgctgctgtcaggccacacttgggggtctttggggcccctggactctggcaaggctgacctaggaggggccacttcctagccgtgtgtttcgcattaggcaactaacagtacctctgtgtgtctcagctttgctagctgggaactgggtgtaatagcagtcttctctcagagggttgatgtgaactgcggtggctaatgcaagtaaagctcccagaatggtgcccagtcagtgccagatgtgtgttggacgttaccacctttggtggtgtcattattcagtgagttcacgcaagtcagatgtgtgtgcggaagagatgaggttagccagcattcctgttatccaggtcagagggctctatctggggacaactggggccaggtgccctctcagtatgcagctgtatccaggagtgtagctcacgcaggtggtatctgaggtttgggcagagtggtagctttcctctgggtgcacggagctgcgctggggacctcctgtttggaacctgaggtgtagtatctgggacttagccatccgggtggtgctggggcacggagggtgacccagggcatggagggtgacccgggacattggtgtccagctgacgtgagatgtgtgcttcctcggcca

SEQ ID NO: 37634 - DNA, 1504 bp, Artificial sequence
  DNA replication origin
attctgggagctttacttgcattagccaccgcagttcacatcaaccctctgagagaagactgctattacacccagttcccagctagcaaagctgagacacacagaggtactgttagttgcctaatgcgaaacacacggctaggaagtggcccctcctaggtcagccttgccagagtccaggggccccaaagacccccaagtgtggcctgacagcagcaacaattcccatggaggctgcctgtgtgtggggggcagggtgcaggcaaggccacaggcatgctgaacagccacccttcctcagcccctgcagtcacccgcactgcacaggatatcacacgcccgacaccccaccacggcttcacgcccggctggcagaggctccatggactgccctctgcccccacgcacccctagtagtgatgggaaatactgattacatgtgggtgccatgctatccactcctcaagctgctggcttctccccacggccctgggaggaagggatggttcttgtgcccattttacagattcagaggtgagcggcacttgccaaaggttacacagccctccagcagcacagccggcattggaaccccagtcccagaacttagccaggtcaccacggttgcctctcccaccgcagctgccccgggagaggacccatcacaagggtacacctgttctcctccctcacctggtgcaaggaacaagccagaggtgcagacacagaaggaccccaaagaggagaagtacgaggggcagagagtggcagagtcacagggagacagacacaggcatacaaaggggcatgaaaggggcaggaggacaggaggccccgagatggagctgagatccaggcgaaggcagaggctgggagggcccgggcactcgaggcgtgaagctgagtcctcaccggcttcgccatcctccccagccccagctctgagagatctcgggcactgtgcctgggaggattcaggcagatggcagatcggaaactcggggacccaggagaggcggggtgaggagaaatgggaggcagggaacgttcctgtcaggcgcactcattttttggggtggggtggggggctaaattcagacggccagagggaagataggaaattgactaccattgcagcaagaggcctggaggttagagctagagaagaacttccccactgcgagggactggggcagaagtggagcctggagcccagagggtggagagggattgaagccggggagggatgagcccttctgtccctggaagccggtcctatgggagagacccgggttctgggggaggggacaggcagcgctggcgttctgagccaatccatgtcctgaatgctttcaaaataaaagcagccccacagcgccgagaattgtcaggcttctatgtctggaggtagaagaaccttagggaaagggcagtccaggccccctaggagctgctgatgaggaagcaggactaggggcttggctcagctcacgaatttcccggg

SEQ ID NO: 37635 - DNA, 816 bp, Artificial sequence
  DNA replication origin
cttcacagctcgtgtcacggccacccagcacctgatgctcggtgatttgttcctgcgttcattgcctgccttcctgctaagaggggagcccctgagggctttgccgcggcgtccacggctgcatcctcaaggccggccaacggcgctggcccctccgagcctcagtatttgctgcaggaacgagcgagccagcgccccctaccggcagttcctctgctggcacccgaggcaaggagccctgggtctctagggaggcaagtgtgggggtgggggagccgtccgagggctaagtgagagggcgggcacagggtgggccccggaacgtccaggagggaagccgggaggagggaatgtcgagctgttacagaggccgtggcaatgggccgggggcgggggggccctccttcctctcacaacgggctgtgacaacagaggggcaggctcagctctggtgggtgaaggacccctctgagtggactggagcggcgcggctggaggccagggaggagctgcgccaggggtccgggggtagaggatgaggccgcggctggagccacggggatggagagaagggaaagagtgaacagataaagcaaatttgtaaaagtggcagaacctggaggcggtgtaggaggtgagggagagggaggagccaggctcttcttatagatctggggtcaaattccaaaagccagaagaggatgtggggcgggaagcagttacggggagaagagaatgcaaaagtccctgccacaggccccccagccccaatctccactcacaggcggtgcctcgctctggtcacacccacagggc

SEQ ID NO: 37636 - DNA, 898 bp, Artificial sequence
  DNA replication origin
caaagtgaggcttggagttagggcaaactgatggggggatgaaggaggaggggcagagagaggacccggcaagggaaaccaagggaaggagagtggagagggtgacagggcacaaagagatggagcagagaggaagaggagcaaacagcagaggttgcaaactcctctgtctatggagcccagcagggaagatgatcccgatgctggttagaggggagagtggggagtggtggccctttgcacctgagcacaacccacagttatccagggggaagacgattccaaaagctgacagtctagatttttatgcaaaatctctaatttaaaaaatgttggcaacaaattaaacatgttgaaagcactgggggaaaataaccctcttgggccgcccggaggaccccaggtaagtgagtcctcagggatgtggggagagggagccacggggaaggagcaggggaggcggggaggcagacaggctggcaggaacagcagcagaggtgagggcgagtgacacagagggacaaagaagggaggcacagagagcggtgtcgagcagagacagaaatagaggcaggtttcacagcagatggggtgggagagggaaagactgatgaatgagtccacagactagacggatgggccaggtcagcaagacattgggggctgggagggcaaagggtcagtcccagggaagatgaggggagatggagaggcgagacggcttgacagagacaggaggtccaggtgacacctcgagacagatgcccggccagagagagtggggtgagaagggatgaaatgcagggagagaggatggagagagagaaccagtgtgagctacacagcaggtgtcctagcaggtgagacaggtgattgagggggtggggaccctggcaag

SEQ ID NO: 37637 - DNA, 1420 bp, Artificial sequence
  DNA replication origin
ttggacaatccggtggccaggaggagaggagccccagggaggaggaggaggaggaaggtgggaaggcgaagtggaggctgcggaaaggcaggttagaaggcgaaggctgcggaagatgctacaggaagagggaggtgcggtcctggccgcggtccgggggtggggggcgggagttttcaggctcctggaccaggagggaagccggctccggctactcccagctgcctggagcccgagttcctgtctggcggctgcgcggccgggacttgggatgtgaggcgcatagcaatggggcgctgcggaggcgccactgcagctcccagctggagaggggggcggggagggggccgaggggcagccccgaggctcccttccccctcccccttcccagctgggctctccccaggggaattccccaccccgacagaaagtcaccagaggctgcggggagggggcagggaggaggggagggcgcctaggaggagagcagaggtgaggaggtctggggaaggagatgggggtgcagagaggaggcgaaggggtggaggggtgggcaagaggccatcctgggctctggagactcgagtcctggagagagactggctgggcccctggcaggacaggaccccagggaggcaggggcatagagatggggggaaccctgagagcccgggattgatggtgagttggaaggagaggctcccaaaaggagagagctaggattgggggggtctgagactggggagtactatggggtgaggagacaacgatggagggggtctctgggtgatgaaaggtcatagaaggatgtttcagagagtgatgggctaaggagaaggcgactgggggtgttggggagaaaggggagaggctggggtgcaaggcccaaagaggggcggggagggagtgggaggagggagctagaggagagggcggctgaagtgagggtctcctggacagaaggtctggagagggatatctgggggattgtcagagatgggggttagagaaggctgaggagcagatgccgtgtcttagaaggtcctagaagagcaggtgtgagggtcggaagcctggggaggaggcagcaaatggggggcgggggtctccaggaggagaggtttccaggaggggagggcggagggaggtgggagaggcagtggtcctggagagacacgtgcccaaggatagaaggccccaaagcctagtggggtcagggaacgggggtcttggagagacggaggggcaggggtccgagccgcccaccaggagaggcggggtgaccccagagggagaagggctgaagactggggagggggttgtctcactccccaatcaccccctccgtctttcccattttcacttcccaaactccccggttctccccggttgccacggcaaccgctcttgccaggcgcgg

SEQ ID NO: 37638 - DNA, 2359 bp, Artificial sequence
  DNA replication origin
cgtggggggaggacccccccaatgaggctcaggaatttggggtgcaaggcccgctgcggggaggcgcggggggcggggctgcggccgggcctggagcctctcgcgctctcccccctccccggctcctgggtggggagggggcttccgcagcggcggcggtggggctgggggggccgctctgcctcctcgcctcgcgcccgcctgccgtccggccccgcgccctcgcccgccgcccgccttccttcttgccttcctttctttccttctttctttcctggcttccttccttccagccttccttccttccttcctccctcctcgggcccgccggcgccgctctccccccaccccacccccccccaggccccggccccggccccggcccccgcctcggacggtgcggcagcgaccgagagcagccgagagcggcggagacgggagcggaatactgatgatggtgggagcgggcgggcggagggagggagcagggagggaggcccgggaggagaggaaggggggagagagggaggggagggagggcagcgtggagagggaggaaggaaagaggggggaagaaccggagaggatgggagagggagggaagaaaggagagggagacgggagggaaggggaagggggggaggaaagaagagggaaggggaggaaagaaggaaggaagtgggaagggggtggaagaaagaagagggggagaaaaaggggaggagcaggggagagaggagggaaaggggagagggtgtgggaggggaggggagaggagggggtaactcctgcaataaggtcctggatgaaggggaggggagggcggggggcagggggagtgggtagaggaagaggaaaggagggagaggaggagtggagggggagatgggtagagagatgggcaggagaggcccaggggcagggaagtgaggggaaagaggaggtagggaaggcctaactttgagggctgcaggggacagaggggcctggagggcggcgggggctgtggggagaagaatggggggtgcggtgtgcgttgtcaggaagagcaggggaagctggcaggacccggaagaggcaggaggatctaagtgggacagagatgagaggatggaagagggagggaaggacccgtcggggggaggggggaggagaaagatctcgggggagaggagagaagctggggagctggagctttgagggcccaagactgggtggcaagagcccggggagtagacagagtgggggaggggacagagggcctttcttgaactccgctgtatgcccgcttcgtccgcccctccacctcatgaagagaagaaccttcaaacccattttccagaagagaccactgagctcttggaggagccaggatggggtttgaatgcagtcttgggctgggggtaccctgagggagatggagaatgggtcagttcctagctttcgtccctggtccagacttggcaggtggaggcacctgggaggggcagagggcacagcctgcagcctccctactcactctcctctcacctcccccaggtgttggcagcgggtgctggggacgcatttagagctgtgaagctgagctgcatcttgggtgcagggagggggagggcagatgcagaggcctctgggaggtcaccgtgaccctcccctctacctccccggtccactaccccaaaagcttgggccccaaggaagggggacatcgggaatcaggggcggagaaacccagaaggaggggtggcccctgtccaggacactgaagatccttccagatgttaaaattagcacagaagtttcacccctgccttgttatcccccaaaacgctgactaataactgaggactcaggagagagagaagaaagatgaaggttccttctttcagtgccaggggacccgggacagactctccctcttccccttctcctcggagagccccagggagggaaagtgtggctgtacccctgcaggcagagcctggggagagtcagggttggaagctggaaggaaagtgggccagacacatctataatgagccagggttcccgagagaagccaggtcacagatgggttcggaagaggcggttttgggtgggcgctggtgggtgctgagccctgagagctgccgagaggggaaactgagaaggggctgggcgagggccagggagtggcaggtggctgtggtgcttcgggtttcacccgcccctggcgccgctcaagtctagttcgtgagactggaccagtgaatgtgtgtgtgcaccagggtccagcacagagtaggccaggaccgatggtgataccagcaaaacagaatcacatggtggcagcccgcggttcctcctggtctcccacagg

SEQ ID NO: 37639 - DNA, 1003 bp, Artificial sequence
  DNA replication origin
atcgcttgattgcgggaggcagaggttgcagcgggccgagattgcaccactgcactccagcctaggcgacagagcgagactctgtcttgaagaaaggaataagaaaggaggaaggaaggaaggaaggaagggaggaaggaagggaaggagggagggagggagggagggagggagggaaagagagaggaaagaaggaaggaaggaaagaaggaagggagggagggaagagagaagggaggaaggagggaaggaaggaaggaaagaaggaaggaagggagggaagagtgaagggaggaagaagggagggaaggaaggaagggagggaaggaagaagggagggagggagggaggaaggaaggaaagaaggaaggcaggaaggaagggggaaggaaaagaagaaagaaggaggaggaggaggaggagcaaccagccggaagatccagctggcctaactttaataccaaaatctgacaacgagagtatgataggccaaaaaaggaatctacattttgttttttcccatgatgacttctttacaatatgaaacttttttcaagaaagaatttgggcgagcccacactttgctggtttcttgagcatgtttgtggtctgcatcttaggttatccagcatcggctgtaggcacagggaggagcagggacaaaggagcatgtttggcacatttgagggacagacagaaaaccaacatggctggaaggagcctaatgaatgacggtgagagggactccaaacgagggcagagagacaagtgacaaatcttataaggcccggtggccacagtgagatcctgcttttgtattctaagaggggagggaagccattgaaacactctctataaaaagcaagctaggagcttgctcaggtgaatgcaggcagctgtgccaacaggaaaaagctacctggggaccaggcatgttcaacatggaggctccatctttccttttctttgtcgaccacgtgtgcagtaaagaagcaggtaggtc

SEQ ID NO: 37640 - DNA, 1756 bp, Artificial sequence
  DNA replication origin
gcgccccctggcgctgggaaaggcgcggccgtctactccagcaagcgcgcgctggtcgaaggcagccagtaaggcagggacaagcccctgcgacgtcactagtcgccagccggccgccgcggcctgcgagctcgcgcgtgagttcgtgtgagctcccgccagcccgcggacccgccgcgcacacctgttccagagtggcgattgggccctaggcgctgatgcttccgactctttttattttttatcctgaagggaaagataaagggcgggaaagggcgtcaggcgaggcgaggcgagaggctcgaggttcgaaggagatggtcagactgactgatggacctcagggcgacccctctgccccaggacaggcctagaagagcatgtgaccccctaggaaacacccagagactgagcggaggaaacagctcccaggggcagagctcccagcaggcgcaaacccagaggagcagaggacgattcggagaaggaaggaaagacgctgggaaggagccagggatgacaggaagagaaggagcggggaagggccctgaggcgagggaggcagggcctccgaccaggagcgaccagaggggatgtgacagagacggaagtgacagaaaaagactccacggtcacaggtggagcggccgacggcacaggggactgaggcaggggatggggatggcgacaggactgtgagaagacagcagcgaggacagtgcagcagtgggatcaacagcgacgaagaggatacagtccgaggcaaaggggagaggaccagagagagaagacagtgaatctgctgggagcgaactagagaggggacgaagacaaagatcccgggggccaggacagagatcagggagtctaagaaagacgcgagagacggccgagcgcgagggcacacccctgtaatcccagcactttgggaggccaaggcgggaggatcacttgatgccggaagttcaggaccatcctggccaacacggtgaaaccccgtctctactaaaaatacaaaaattaggcgggtctggtggcggcgcctgtagtgcctgctactggagagttccagctactggagaggctgaggcaggagaatcgcttgaactcgggaggcaaaggttgcagtttaccaagattgtgtcactgcactccagcctgggcgacagggtgagactacgtcaaaaaaacacaaagcaacaacaacaaaagaaaaaaaaaaaaagaaaaagtgagagaaagagagaagaaggagagggagaggagagggagaaggggaaggagaaggagaaggagaggggaagaagaggaaggaggaagatgggagagataccaaggggacagtaatagaaacagggaggactgtgacagaagggacagagactaagggacagtgataggggagaaagagataaggggatgtggccgacacagagaaggtgacagccatagagacagagaagacagagacccaaaggctataaagatatagtggacagtgttagacacatggcagagataacagaagtgatacggggacaagtgacaaatatggagatggtgccagagacaaaatctgaggcaacagcgagtgaggcaaagagaacaaactcagatggatggggcagagataatggtgtcaatatcagagattcaggaagcaatagtagattaagagtgcacagagggcacagagagctggtggcaaatagcaaagacaggccgggcacggtggctcatgaatgtaatcccagca

SEQ ID NO: 37641 - DNA, 1213 bp, Artificial sequence
  DNA replication origin
ttccacgtccacatccccagtgcttgcggaagaaatcccgctaagagagagatatgcgaaaggtagggaagatccatagttccaggcatccaattatatacaagccttgactcaccaagcatccaatcagagtaatggatccaacgaactgcagcaggcatccaatcaggtaggacagggttgccaggatgacacgagtctctccatagggctcccagggtcagtgagctctagcgctgagcgccccctggcgctgggaaaggcgcggccgtctactccagcaagcgcgcgctggtcgaaggcagccagtaaggcagggacaagcccctgcgacgtcactagtcgccagccggccgccgcggcctgcgagctcgcgcgtgagttcgtgtgagctcccgccagcccgcgggcccgccgcgcgcacctgttgcaaagtggcgattcggccctaggcgctgctgcttccgactctttttattttttatcctgaagggaaagataaagggcgggaaagggcgtcaggcggggcgaggcgagaggctcgaggttcgaaggagatggtcagactgactgatggacctcagggcgacccctctgccccaggacaggcctagaagagcatgagaccccctaggaaacacccagagactgagcggaggaaacagctcccaggggcagagctcccagcaggcacaaacccagaggagcagaggacgattcggagaaggaaggaaagacgctgtgaaggagccagggatgacaggaagagaaggagaccgggaagggccctgaggcgagggaggcagggcctccgaccaggagcgaccagaggggatgtgacagagacggaagtgacagaaaaagactccacggtcacaggtggagcggccgacggcacaggggactgaggcaggggatggggatggcgacaggactgtgagaagacagcagcgaggacagtgcagcagtgggatcaacagcgacgaagaggatacagtccgaggcaaaggggagaggaccagagagagaagacagtgaatctgctgggagcgaactagagaggggacgaagacaaagatcccgggggccaggacagagatcagggagtctaagaaagacgcgagagacggccgagcgcgagggcacacccctgtaatcccagcactttgggaggccaaggggcgagatctcttgaggccagcagttcgagacc

SEQ ID NO: 37642 - DNA, 1232 bp, Artificial sequence
  DNA replication origin
aatccggctaagagacagaaatgcgaaacgtagaaaagatccaaatttccggcatccaattatatacaagccttgactcgccaggcatccaatcagagtaatggatccaaccaactggagcaggtatccaattaggtagggcagggttgccatgatgacacgagtctctctatagggctcccagggtcgcggagctctagcgctgagcgccccctggcgattggcaaggcgtggccgactactccagcaaacgcgcgctggtcgaaggcagccaataaggcagggacaagcctcggtgacgtcactagtcgcctagccggccgccgcagcttgtgagctcgcgcgtgagttcgcgtgagctcccgcgagcccgcaggccaccgcgcgcacctgtttcagagtggtgattggggctcatgcgctgctgcttccgactgtctttttttttttttttttttttaattctgaagggagagataaagggcaggaaacggcgtcaggcgaggcgaggcgagaggttcgaggttctacagagatgatcagactgactgatggacctcaaggtggccgctctgccccaggacaggcctataagaggctgtggtcacctagaaaacatccagagactaaatggaggaaacagcttccagctcccagaaatacgtttcgcatttctctctcccaggggcagagtccccaacagccgcaaacccagaggagcagacgacgattcggagaaggaagaaaagacgctgggaaggagccagggatgacaggaagagaaggagacggggaagggccctgaggcgagggaggcaggggaggagcgacaagaggggttgtgacaggcaccgaggggacagaaaaagaccccacggtcacaggtggagcgcccgacggcacaggggactgagaaagaggatggggacggcgacaggactgtgagaaggcagcagcgaggacagtgcagcagtgggatcaacagcaataaagaggatacattcgtaggcaaaggggacaggaccagagagagaagacagtgaatcagatgggagcgaactagagaggtgacgaagacaaagatcccaggggccaggacagagatgaaggggtctaagaaatacgggagagacggccaggcaaggtgcctcacccctataatcccagctttttgggaggccaagaggcgaggatctcttgaggtcagaagttcgagaccagcctccgcaaca

SEQ ID NO: 37643 - DNA, 1586 bp, Artificial sequence
  DNA replication origin
cagacgccgcccctcgctgatcagggaggccttcacgtaggggtctgggaacagcaatgaagtaaggaacagagactcactccctcagacctaggggtccaggaccccaggccccgagcccctcctccctcagacccagaggtccggggccccaggcccccagtccctccttcctcaggcccaagagtccagaccccaggtcctcctctctccgacccaggagtccaggcccctggcccctcctccctcagacccaggagtccagatccccagctcctcctccctcagacccaggagtccaggcccctggcccctcctccctcagacccaggagtccaggcccccagccctcctccctcagacccaggaccctcacctgagaagccagtgaggtccatcgctttgaggttagaggctttgatgatggtcacggtgaggcgcccggccgtggggaggtagcagagtgagaagttgagctccccaagatctgctttttcctgcagttggggaaaaggtcagcgatatcttgcctcagcccctcttcaactctccctgattttctctccggtcggagcctcctgctttacaccctgacatccagggctcaggcttcccatccacttagcaatctgactcttgggacaaggcccagtaattccctggccacagctgcccatgaccatcaaagcttatttgttctgcaggaaagattggaagaagcatgagtgaggggagagagagaggaggggagagacagagaaggtgagagagagagaaaacacaaagagaaatagactgagacagaagccaaaacacggagggatacagctggaaagacagacccacaggcaaagttctcaagtcagagggacagaggcccagagacagacacagagagagacccagagagagggagacagagacccagaaagagagggagacagagacccagagagagagggggacagaggcccagagagagagggggggggacagagacccagagaggaggacagagacccagagagagaggaggacagaagcccagagagagaggaggacagaggcccagaaagagagggggacagagacccagagagaggaggacagacccagagagagaaaggggcagagacccagacagagagggggacagagacccagagacagagagatagagacccagagagagacagaagcccagagacagggggtacagagacccagagagagaaagagagagagatatatatagagagagactcagagagagacagaggcccagagagagagagggacagagacagtgggttgggggtgcataaagacccagagagagtgatagttacctagaattagagtggaggggcagagaccagagagcgagagagaaacctagactcagataccctactccctgcaccaagagaaagagagagagagagagagaggctgactcagacagagtgggacaaagaccaagcagacacacacacataaaccagcctgagagagggcaggagattcatcaacctccaccgaagtttccaggactgcccccaaccctgacacacaggctggagcca

SEQ ID NO: 37644 - DNA, 1041 bp, Artificial sequence
  DNA replication origin
cagaagaagagtcacttacctacagccatgcagttattaataaagtgagggagatgggacttgaacccaaacaagtcagtctgactcaagagcctgacatttgcacaagatgcagagagatatctgaagggggcatttggtggtggtagtcggagggaggcccacagggcaaaactcaaaaagcagaccacacagctccttccccttggatcagagatttgggagaagggcagcagcaggcagaatgggggcaagacgctacgagggactgaccccacaagcaatggaaagctgagcagttctgctccgagtctcctggccatagtgcaagcagggggctggccaagacaggcaggggtgctgacctgcatctggaccccggggatagcctcggattcggtcattgaactcctggcacctgtcgttggtgtcagcatctcggacccgcgcacagaggtccgagaccaggatgagtgcccgccggcagaggtcatcctcgtagtctcctgacatggtggccgtctggtcctgtgtgtgggagggatggggcaagggtgcagatgggaaacagaatgggagtgcagggtgggcaggtgtggagataagggtggaaagagacaccgagaaaaggaaggatgggcaaaggggacagagattaggggcagatggattagggatggagattcgaggaagaaggacaaggtgacaggtattagggatggacaaggaaaaggaattaggagtagacagacaagagggcagaaattagggatggagatagtagcagggactgggtaagtcaaggggacagagatgggcatgagtggagtagaggacagagaacagggacaaatgaacaaggaggaagagatggagaagggcagtgaaggggctaagaatgaggatgcacaaataaagggatggacagatgaggaaacaaagattagggctgcacagatgaaggaacaggagttagggatgagcagacaaggtgccagccattcatcattcattcattcaacaaacatccatccagcacca

SEQ ID NO: 37645 - DNA, 1264 bp, Artificial sequence
  DNA replication origin
gcagtgaaggggctaagaatgaggatgcacaaataaagggatggacagatgaggaaacaaagattagggctgcacagatgaaggaacaggagttagggatgagcagacaaggtgccagccattcatcattcattcattcaacaaacatccatccagcaccaactacgccctacgtgctgtgctggttgctgcgaatccagcagagaacaaggtcctggagttccctgacctcccggtgtcacaatccaacgagaggagacatagagtaaacaagcaaacaaaaacacatacacaaaccggtcactgtcagactgtctgtgagaagcgctccacaggacacagctggagaatgtgtcacaaaggaactcagaggggggcggtcagggagggctctcccaaacctgaaggatgacatggagccagccacaggcggggggcagtggcgccaggatgggaaaagcattttaaagaaaagcattttagacagtaggagcaggatgacaggggcttagggtaggaaagcagttggagggtccagggaccaaggaggccagactggggtagacgcggggagggccaggagagaaggatggatgtgggtagagagattggaggtggataggtatggtgggagctgggggtggagaggtggagatgcagagatggggaccaagttgagggagggagagatacagggaggggagacagagataatgtgaagggcagactgaggctccgaagagatggagaggtgaacaggcaggcagaaggaaagtcaaggattgagacttgggatggacagtgacaaggaatgaaccgagatgtaattaattcacgggggcttgagagacgagaggacgagagacggtgaagaggggcaggcaggagtgtgggcagaaatatctttgaaagagaaacggtcgaacgggaggatggatgggtgggcaaggacagcagatgatggctagagatcgcagatagacaaaaggagacaggagggctgggcagacagacatgggttcataagggaaggttcaatgagcacataaatgagaggaggctaggaaggagaggtggatgtggggagagggggaattagtgacacatggctcggagccaggcatcaagatgggttgaaggggatgcaggggaattaggaacagacagaccagggctcacagatggacaggtgtcgtgggggtgctgcagaaggccaggactccaagacaggcatggccacactcacctgcgcttatctctgccg

SEQ ID NO: 37646 - DNA, 624 bp, Artificial sequence
  DNA replication origin
accgagatgtaattaattcacgggggcttgagagacgagaggacgagagacggtgaagaggggcaggcaggagtgtgggcagaaatatctttgaaagagaaacggtcgaacgggaggatggatgggtgggcaaggacagcagatgatggctagagatcgcagatagacaaaaggagacaggagggctgggcagacagacatgggttcataagggaaggttcaatgagcacataaatgagaggaggctaggaaggagaggtggatgtggggagagggggaattagtgacacatggctcggagccaggcatcaagatgggttgaaggggatgcaggggaattaggaacagacagaccagggctcacagatggacaggtgtcgtgggggtgctgcagaaggccaggactccaagacaggcatggccacactcacctgcgcttatctctgccgtgtcctgggtggcagccgaggcggcggcgggcggcagcccatgggggttctagggcggacaaggggctgtggacccgttcccacgcgccgggtaatgagagagaatgtctgatctaggggctgaggccgggagaaaaagctcagcttaacagtcacatcttgccctactcgagcc

SEQ ID NO: 37647 - DNA, 858 bp, Artificial sequence
  DNA replication origin
ggggaggggaacgatgtccgggacttcgaaaagccacggagccctaagtccttaggggccacggaatgaggaaacgatccccccgcgctggggatcggtgggcgaggggtgggatacacccaggtgtttcgggacccccttccagggccacgtgcccctcccccggggtggccagagagcgctgcagcgctcccactccccggcccgagatccacgcgcctctgcatctaccccgcccccatgcgccggggccgaccccagggatttgactggggctggggctgtggcaggaggagggggaggagcggactcacccggagccgccgctgccgccgctgccgccgccgccgccgccgcagccccgcgcgccagccgcggtgccggctcggctcctcccctcgccactgtcgcaggtccgcggctcctccccctgcaccccctccttcccccactccgaacccgcggcaagaaagccgaaatcacttggcctcagcaaggaagcagggagattgcccgggactaaggcagcagagacccagtgggtttccacactggggacccagagatctaggatcacgacgtgctgcttctccagggtccgggggcccagttctccgccccgctatctcacagaggtagaagtccggggaccccaggcccctcttcccaggaacccaggacttcaggccctccaacctgagccgctctgaaggccggtggtaggagcggaagctgagactcaaaggtacagtgccacagccaggatagaggtactagcagggacctgggtttgaatcccacctgggccaactcctgcctgtgtgcgcctcttgctctgaggccccgtttcctcatcag

SEQ ID NO: 37648 - DNA, 1134 bp, Artificial sequence
  DNA replication origin
taatgtgtgccaggcatttttttttttagacagcagggattcatctgggaacaaaatagactaaaattccagggttggaagagctcatggtctagtggaagagacagaaaataatcaaataactacacatactaggatcctcatactaggatcaatgctaggaaggaacatccattgtgctgtgtgtttgagagaggtcagagaagttcctgagcaagtgacttttcagctgagctcagaaggatgagtaggcataagccaggtggtgaagatgagggaggggaggggaaatgctccagggagaaggaacagctcatgtaagacctgggggcaggagggagtttggcaccttgagggctgtcaagcacacaagccccgtaggagtagcactttgttttgttcatagctgtgtcccagctgcctggcacagtacctggcgcatggtaggcactcaatacttattggttggttgaatgaatgaatgaacatgtgaatggataagtggaggaatgtgtgaatctatgatgtattgatggatgggtgcatgactggatagatgctggaaggatagatgaagggatggacagataggtggatgagtgaatggctggatggataagatggatgttggaggaatagatgaaggaatggatagatgaaagagtggatggttgggtgcatacatggatgattggatggatagatgaagagttagagtggggatggatagatggatactgcagaaatagatgaagggatggatgagtgaatggctggatggatagaggatagattggtggatagatggatggatgttggaggaatagatgaagggatggatgagtggatgagtggatgagtggatagttggatgggatggatggaagctgcagaaatagacgaagggatgaatgagtcagtggttgaatggatagaagatggatggatttgtggatgggtggatggatgttggagaaaaagatgaaggaatggatggatgagtggatgataggatggatggatgctgcagaaataaataaagggatggatgagtggagggttgggtggatggatggatgattggatgggtagatggagaattagataaaggatggatggattttggagaaatag

SEQ ID NO: 37649 - DNA, 985 bp, Artificial sequence
  DNA replication origin
ggaacaacagacagtccagagaccatctggatgtggagaaagaggaagagaaagagatacaagtaacagagacaaagactgcaaggacagacaaaacaaataagcgaaggtccagcttcctctcccacaattcctgcagagagctctgcagacccagagaaagggatgctgaacaggcacctacacggctagaccccttctctctagcacgagaggccccgtgagaccccagacccagaagtccaggcccccatcctctcctccctcagacccaggagtccagaccccaggccctcctccctcagacccaggaatccaggcccccacccctccccctccctctggaggcaccatggcaaccaggccccctgcccaccatcccctccccactagagaacccactttcgttggaatctcgcctgtttctaaccagttcctggctggggcagggatgagcagagggcaagtgggaacagaaaggggatgacagaggggagggggcctcaagggggcagtggaggcagctaggagaggatagagatggggcaaggagactggtgagaggtgggaagacagagagagggtgacggggttagggagaggcagaaaacgatgaagacaaggagggacgggggcctggggagatgctggggaaactgatggagactgaagagatggagcccaggagagaaggagggaggaggagggcagagaaatcaagcaaaagagtggtggagacgtggggacagaggggaggaggcaggggggcagagagatggggagagaatgaggaagggaggtggagagagaggggtggggaaagggactctaggagacagagagagataggaggaaaaacagggaaatgggaaagaagggattggggcacacagggagtccctgaggtcaggggaacccagatctccacatggtctcagccttccagttcctctgtaattctaccccggggcttcaaagaggaggt

SEQ ID NO: 37650 - DNA, 1268 bp, Artificial sequence
  DNA replication origin
agccaactgttcattgactttggggcaaattggcttggtgagaattgatttttttggagaatgacctagagtgatagtagatgctttcccatctgagagataatctgtcgtctcctttgaccatagcgacagtaccctgggattaagagcgatccttgcccctcaaatgccacctggaactctgtggcaggttctgcaggtggggtctagggtggtgacttctgaacccaaaatgaaccaggaggccacgggctgaggttctctctccgacacccgcagcccgaggaggattttacccacctggaggtgctgcaagccctggaggcccagttaccaggggccatggagagcgggcgcgtgagcagcatccgctttgagaacatgaacgtcatctgtgggactgctgggcgccggaaccggtgagtaagcggcgggggcggggcctggagcgagcgggaggggcggggcccggggcgaccgggtaagagcgtggttggttttagagcgctgagggacgtggccaagagtgaaagcatgaatgggcggggcccggggcgactagataagagcgtggttggtgtaagggtgctgaggggcgggccccggagccactagataagagcgtggttggtgtaagggtgttgtgaggcggggcgacagtggagtgacagcttgggggggcggggccaggagggactagataagagcgagattggtgcagagccactgaggggcggggccaagagtgagcgcggttggaggtaaggtccggtgagatcagagagaaggagggatctcgagtgagtaggggcccgagtttgagtgacccagtagtgaccgggatagaggtctgagcctggaaaggcagctgtgagggggtggaagagactgagcacatagtaggtgtggggccaggggtgatagggtggggacaggcctggagtgcctagggtagagcgcagcctgcagtcgccagtggagggtcgggcctttgggcggtttgagatggagcctcgacagacagtgattaggacgcagaaccaggctaagagagcgtaaggagcctagagcgacccaggcgagagggcagggctggaggggagtttagggacggagcgatggtccgctggaccagggcctgtaaacgactccagggaccaggcagggactcttcgacgatcaaagccagggctgaaacgacctgcgagttccttttccgtccccaccccccttacaggtggctcatcgcggtcacggacttccagacg

SEQ ID NO: 37651 - DNA, 749 bp, Artificial sequence
  DNA replication origin
aggggggggcgctccgtccatgaggggagggggctgcaagccccctcccctcaccatgtcagggatctgcggggaacctcgtgggagggtcgtgggaggggggaggggtggtgagagaggggcagaggccgcgctggacccctacccgccccctcccccttgtcggatgcccccagtccgcagggggcctgcgcggcgcccgtctatcaagggctcgttcattctggatgggtgccgcggggttggggagggtgtagggggtgggggggggaggagaggtcggggtggggagtggggagggaccgaatgcggggacagcgcggggtggagaggagagaaaaagcaaaaagaggaacaataacaaaagaagaaaatataaaaaacagaaaaaaaaaacacaaaacccctagaacacacaaaaaaatccagaaaaaaaacctgaaataaaagcccgagaattgtcttccaagggggggtgggaggggaagaggaggggggcggatgaggacgtctgattctcgctgagacagggctcggcacgcgctgaaagccccggtgcccaggtcttccctttcgcgggcttcagttcatccctcaagggattgggacccaggcgtccacgtacagggactggaggaagattagggacgcgggattataacatgggggttcattcctaccccccatcacctcccttcccctgactccccaccaagattttgcagagagaaatggcttttgtaccaggt

SEQ ID NO: 37652 - DNA, 2110 bp, Artificial sequence
  DNA replication origin
ctctttttgctttttctctcctctccaccccgcgctgtccccgcattcggtccctccccactccccaccccgacctctcctcccccccccaccccctacaccctccccaaccccgcggcacccatccagaatgaacgagcccttgatagacgggcgccgcgcaggccccctgcggactgggggcatccgacaagggggagggggcgggtaggggtccagcgcggcctctgcccctctctcaccacccctcccccctcccacgaccctcccacgaggttccccgcagatccctgacatggtgaggggagggggcttgcagccccctcccctcatggacggagcgcccccccctctcgggggtagggggcagcagagggggaatgggcttggggaaggagggggagctcccttctttggcagctgaacatgggggggggacctgagggcaacgccctcccccctttacccacagcaggggagggggcttttcagggggaggggtggcttaacattcccaagccccgggaataagcggagagaggaagcgtgcgggaaggaacagccatgctggagggagagggagcttcttggagtggacaggttaggagagggcaatcttcgtgcaaaagggatggacagatggcccaggaaagacagaagagggaggatgtgaggaagggtgagggctggaggcagggagaggctcgagtgtggaagcatggtgagcaggaagccagtgtgcatagggtcttctctcaccaggaagagaaagagcttaaggaggtaagagaatccgaatgagaatggccgcaagagctgcttgtcaacaggaataaaaaataagcgtgtcaggaaaagaaatgacagttacagcccaagagtgcatggaatgagatgagtgtgcaaaaggaaagaagtggtagagctctcatccaggtagaaaagacaagatgcggtgtgcagccatgtcatggtgcgcaagaacattattaaaggggagaaacaaggcttccggagagcactgaaaatgctgggggggggggcgcgtgtgcaaaagcaagtgtgcaagagggttcacaaaagaatcaaaaatgcagaagggcaaagatttcaaacagaaaggggcaagggagtgggagcctggcaaagaagaagagaatgagcatgtgtgagagaaacagtttctgggaggcaagtgtgcaaaaggcgtgaccaaaagtgacggtgcaaaaggggcaagagggaaggcggggggtggggggctaggagtgtcatggtgagaggggagagttggggagtggaagaatctggggtttttaagaataagaagggaaagtgcttcaacgtaagaaaatggaggtaagagtgtgtcaggaggggtgcataagatagcaagtgtgcaagggctgagcaaagagcagggcactccagagaatgaatgatgtgcatggagtctgtgagggggagggaaaatgtgtcccaagtgtgtctgcaacaagggtccagagcgagcggggaggaggagatgtgaaatggagtgtgtaaaggagggccctggtaggggaaaagtgtgtaagcagcaagaagcagagaaggaggcatggagcgtgagaaaggaaatgcagcgtgtgcgaggagagcagagtgtatttgagcgggcctcgccagccagaagcaaaggcagaatgtgcaagacagcgagagggcaaatttgtgcaaaattgcagcccggggacgggaggggagagaggtgagcaggcgtgcaacggagcgtgcaagaggctgaggggggcagctgtgtgtgctggggagaggggaaggggggagagctgaggggcctggagagagtgggaagggttgttagaggggtggcaggtggtggaatccgagggcacccccttcccctgcggcctgggggacagtccccatccaatcgggctcagggctgaccctctatggctctgtctatcccctccccccagaataggcccttccctccttctcaattcccctctgtaatttctcctatcccccctccgctccccgcttcacacacacacacacactcttgtgtcagctgccccccttcagtgaggtgcaaatgtccggc

SEQ ID NO: 37653 - DNA, 976 bp, Artificial sequence
  DNA replication origin
ttgtgcaaaattgcagcccggggacgggaggggagagaggtgagcaggcgtgcaacggagcgtgcaagaggctgaggggggcagctgtgtgtgctggggagaggggaaggggggagagctgaggggcctggagagagtgggaagggttgttagaggggtggcaggtggtggaatccgagggcacccccttcccctgcggcctgggggacagtccccatccaatcgggctcagggctgaccctctatggctctgtctatcccctccccccagaataggcccttccctccttctcaattcccctctgtaatttctcctatcccccctccgctccccgcttcacacacacacacacactcttgtgtcagctgccccccttcagtgaggtgcaaatgtccggcctggattgggccacctggtgacctctggccttgggagatgagggcagggcgcagtttgaacagagtccctggcccggggagagaatgacagtcaggggtcagaggtcaagaggccagcaggctcaagagttctgtggacggggctggtccgtccaggccagccatcacctctccaggaagaatttgagagcccggtcgatgttcatgcggtggcccaccctggtcacacctagatcgacgtagtcctccttggtcaaggcgggcaggtgggagccatcgatctcgtggtccaggaactgggctcggtgctccgccaaacccagccactccagccaatcagccacgtcgaacttggtccagaaccccagaggtttagcgccaaacggcttgtccgggggcagcgagagcaggcgggtcggtgagagggagcgcgaggcccctgacaaggctcccccgagccccccggatatccccgggtgtggcggcacaaagactggggcgaaggggtcagccgagcctcctgcccctccagttggggagccacggatgtcaaagaggcctgggtagaggggtccgg

SEQ ID NO: 37654 - DNA, 1444 bp, Artificial sequence
  DNA replication origin
ccctggtcacacctagatcgacgtagtcctccttggtcaaggcgggcaggtgggagccatcgatctcgtggtccaggaactgggctcggtgctccgccaaacccagccactccagccaatcagccacgtcgaacttggtccagaaccccagaggtttagcgccaaacggcttgtccgggggcagcgagagcaggcgggtcggtgagagggagcgcgaggcccctgacaaggctcccccgagccccccggatatccccgggtgtggcggcacaaagactggggcgaaggggtcagccgagcctcctgcccctccagttggggagccacggatgtcaaagaggcctgggtagaggggtccggaaggcaggatgggcagggacgagggcctgggcgcagggctgaccttgtgctccgaggcgggcagcagcgaggggctgggggcccggcggagcagagggggccgcatctcgaactccacgccctggaggtggcgggtggacgtggaggaggaggaggctgagggtgaggtggcccctggggccgcagcggctgtaggggagacccctgttccggtggggagtggcggcagaggtggtttgggccagttctgaaacaggctgctgacaggcttggagaggagtgaggactgggagtcgtcggagagtctggaatgtgacaagggggcagtgggggaggacagggatttagggggcaagggcaggggtgagaaagaggcagaggtcaagatatagggagagaggaggagagacataagggtagggggagagacggaggagagacgggaagaaatggagggagcaaggggtaagacggccggccgtcgaggaaagaaatgaagggagagaaagatgagaggacagggagagggcgacagttaagagagatgaaagaaaaagagacattaagtgataataataataatcgtcaccgcttactgatgctcacgtgtgccaggcattgttctaagtgctttacatgattgcatctcagtttaatccccacgacagccctgatgcaggttactattattatcagcacagagaggttaaataacttgcctaaggacacacaggaagtggcagagcccggttatatggcaccaaagtctgagctcttcaccactattctatactgcctttcaggttatggccagtcgtagcagagtgaaagatggggagacagtgagagagagacaaaaagagggtgagcatccaggggagagagatggaagggacaggggacacagagagagagagatgaagagagggagatgaaagagagaagaaacaaggggagaaaaaggttcccctcatccctttcgttccctcccctccagcactgtcccacctcagggcctttgaactggctgctccccctgcctggctcactcttgccctgggcagctgctccctctccactttca

SEQ ID NO: 37655 - DNA, 1089 bp, Artificial sequence
  DNA replication origin
ctggcccggaccctccgcctggcacggattctggcatcgaggaggtggacagtcggagcagcagtgaccacccactggagaccatcagcagcgcctccacgctgagcagcctatctgccgaaggtggtggcagcgcagggggtgggggcggggctggggccggtgtggccagtgggccggagcttctggacacctatgtggcctacctggacggccaggcctttgggggcagcagtactcccggcccgccataccctcctcagctcatgactccctctaagctccggggccgggcgctaggagccagcggaggcctgcggcctggccccagcgggggactccgagaccctgttacccccaccagccccaccgtctcggtgacaggggctggaaccgatgggctgctggccctgcgtgcttgttcaggaccccccacggcaggcgtggcggggggtccggtggctgtagagccagaagtcccaccggtgcccttgccgacggcctcctctctgccccggaagctgctgccctgggaggagggcccgggcccaccgccaccacctctgcccgggcccttggcccagcctcaggcctcagccttggccacagtaaaagccagcatcatcagtgaactcagctccaagcttcagcagtttgggggctcctcggcagctggcggcgctctgccctgggcccgaggaggcagtgggggaggcggagacagccaccacgggggagccagctatgtccccgagaggacctcctccctgcagcggcagaggtaagcgggggctggtggccaacaagggaggccagaggtgttgatggcatggctgtgtccctttagggtctcagggtggcagaaaggaaacagaaaccaggttggcaggagtttgctgtcacagaagcatgctttcacaaatattttctttttctttttttttttttcttttcttttcttgagagggagtttcactcttgttgcccaggctggagtgcaatggcgtgatctcggctcaccacaacctctgcctcccgggttcaagcgattctcctgcctcagcctcccatgccaccacacccagctaa

SEQ ID NO: 37656 - DNA, 768 bp, Artificial sequence
  DNA replication origin
gacggtggggctggtgggggtaacagggtctcggagtcccccgctggggccaggccgcaggcctccgctggctcctagcgcccggccccggagcttagagggagtcatgagctgaggagggtatggcgggccgggagtactgctgcccccaaaggcctggccgtccaggtaggccacataggtgtccagaagctccggcccactggccacaccggccccagccccgcccccaccccctgcgctgccaccaccttcggcagataggctgctcagcgtggaggcgctgctgatggtctccagtgggtggtcactgctgctccgactgtccacctcctcgatgccagaatccgtgccaggcggagggtccgggccaggctgtggggcagcgggagccggtgctgctggggcaggcgggcctggtggatgggggtccccaggagcggcggaggccccctgggtcagggtggccacctcgctgtcataggatgtcaggctggatgcggtggagtccagggtgggaggggctgcggccacagccgggggtggcacagggggtaacggggtggcaggggcaggtgtgtcgggcagcgggtggggaggcccaggcgtgaggggcgactctggcttttcgaagctgttggagaattccagaggcggaggcagcggttccacgaaaaggaattcgccatcttccacatccaccgagggggcgggaggcggcaggaccagcaggggcagcccgttctcttcgctggccctcggggaggt

SEQ ID NO: 37657 - DNA, 991 bp, Artificial sequence
  DNA replication origin
ctgcggggaggccggggacgtgggcgacggcgcgggcgggaggccgccgcccttctggggctcgccttccaccttggtctgcttgaccagcgggcccttgcggccgcggcccgagcgggcgggcacgtacatggctgcgctggccgcccgcgggggcagctggaaatagcgtagagccgggccctgggaggagccgccgcccccgcccgcgctgccgtggtgcgatggggacggggcccccggggtcgggctgggcccgccgcccctccagcctcgcaggctgggctggggccccagagccaggcggggtggagggtcgtcgggagagccgcctgtctccatctcgggaggatgaggggggtgggcgtggtggtggtggggctgagggggcggggcgtggtggtggtggtggtggggcgggtggtggtgggccgggggcaggggcccactgtggtacaggctcttctcgcggctccccacgcgagtgtcgggaggggagggcccgtcaaaggatgcaggggaggaggcggggagggggccaccagagccagggttgaagggccctccccgaggggagggggtgaggcgccctgaggaggaggggactggaggtgtgctgtagggaggctccggtggggacgtggtgggtggcgggggaatgtcctccgaaccaggcacagacaggctgcggctgaatttcatggctgggggtgctaggtaaggtctgtcatcttctgccgcacctggggagatacagaggctcaaggagggggaccctggcggggagggtctccctgctccactatcccatagaaccgcaacaatactaatgacaagaatggcaccccgtatatgccaggaacttcacgtggactcgcccagctcttccctatttgaggtaaacccaaatctgcttcatacagaggtacaggttgtgcactgcacaactgcaaaccgcaaggaaggtgaggaaactgaaattcagcagaac

SEQ ID NO: 37658 - DNA, 1485 bp, Artificial sequence
  DNA replication origin
aaaaaaagagtgaaaaaaaataatggagtaaggtaagagagatagggagtgctgggtagggggcagggtgcaggtttgagctaaaacctatagatgggccaggcacagtggctcacacgtgtaatcccagcactttgggaggccgaggcaggcggatcacaaggtcaggagttcaagaccagcctgaccaacatgatgaaaccccatttctactaaaaatacaaaaattagccaagcgtggtggcatgtgcctgtaatcccagctactcaggaggctgaggcaggagaatagcttgaacccgagaggcagaggttgcagtgagcaaagatcgcaccattgcactccagcctgggcgacagagcgagactctgtctcaaaaaaaaagaaaagaaaaaaaaacacctagagatgaagtggggaatcgtgaggctccctggggttgaggcattccaggcagagcgaactacctctgcaaaggtcctgaggtcgggctgagtctggtgcgtttacagaacagggaggaggcctgtgtagcaggggccaagtgagcactggacatgagggcagtggggggacagggtcccgatcctgcagggtctggggagtcatggtgaggacttgaacctttgccctgagtgaggtgagtgaatggcagggctctaagcagaggagggacatgagctgacttcggttttaacagaaaccctctggctgctgtgaagggactagattgaaggggatgagctgggaagccgggggaccaaagaggaggtgacagctattgctatccagataggaaatgatagtggctggcccagggtgttgactctggaggggtgagaagggattggattccggatatgttttgaaacaacaggatttgctggtggattggatgtgggtgacttgaggaagaaagctaagagtggctgcaaggttttcagtcttagcacctgaaaggacagagctgctgtttgctgcggtggtggggagggaccgtgggctgggaggagtctgttggtgaggagatcaggagcttgggttggagcgtttggagtctgagatgcccgtgagacagccagctgggtgtgggtatttgaatataggggcccagagctcagggcggaggatggggccccaggcataaacgtgggcgtcgacagcagaaaggcagtgaatgaagctggtcactagttgagagggagtagtcagaggtgagaagaggttcaaagaccgagccttggcagtgaagtaagcaaagacttaactcctgcacgcctcctggagttgtttttccctgattggattcagctttccccaactcctggcgttcaaagtccaccagtgtgagtcttacactcccactgagtgtggggtccacctggctcgcatcgtttacctgatttttttttttatagatccaatcccttttaaactttagcctcatcataagtggttctctctgtagaatcacagctttgatg

SEQ ID NO: 37659 - DNA, 1680 bp, Artificial sequence
  DNA replication origin
gagacttcctatctcatactttttttttttttttttgagatgggagtctcactgtgtcacccaggctgaagtgcaatggcactatcttggctcactgcaacctccacctcctgggttcaagtgattctcttgcctcagcctcctgagtagctgagactataggttcccaccaccacacccagctaatttttgtatttttagtagagacaggggttcaccatgttgcccaggcttgtcttgaactcctgacctcaggtgacccacccaccttggcctcccaaagtgctgggattacaggtgtgagccactcatgcctggcccccatacttctttaacaagagagagataaaagcatttttcttggtcaagccaccattatttgctttttctccctcaggtgcagcagaacccaattctgctagtctcctctttcaaatgtaaattctctaaaggaagttactttgtttgactgattcactcttataccttgagagcccagcagcaggtccaggatatagtaggtgctcaataaatatttgtagaaggaagaactcattggaagcaatacaagacaccctgacaagatgtggcgagcaactccagggcaaaaccccagcctgttcctctgaacatccccatcaaacagcacagggccagctccaagcaggcttcaggaggtgtcgcctgaaggcatccctgctttgacggatttcctgccatgctgctcttctctaagcgcttctcagcctgctcaatccttctccactttgctgaatgtttttctgaccccctcccccacctccttcagccacagaccaatactctgcttggctttctgtcccgtcctgcagctgtgtggtatcagagagcagaaccttgcaaaagataaaggcagtagagaagtggcaagtggaaggagacactcttgtgtgagccattttacctgctatttttcgtatgtgtcctcactggatcctcacacctgtgagttagggtggattatacccatttggatgataatgaaagaggccgtggatcagagagaaaaggtccttatcctagaccagccagcgagtaaggaggagattcaagatgcatcggagaaaagaggtcagagtggctcaaaaaccctgagataaaatgggaggggtacgaagagccaggagaagggggtgtgaccagtcaggaagcacacggggactgctgaggggcagggctggagaggacagcaagaacagagtccaggcaggagaggacagctgggaggaggggaggaaggcaagggaaacacctgcatggggcacgggggcaggtggtgggggccagagggagaggcgagggtcaggtgacaggtgagggtgaaggtgatgaggcagggatccgagtgacagtggaggggttgatgtgacagtggaagggtcagagtgacagggaagggaccagggtgatgggggagaggtcaggatgacagggaagggtcagggggacagtggagaggtcaatgtgacagagaaggggtcaggtgacagagtaggagtcagagtgatggggaagggtgagggtgacagggtgggggtcagggtgagagaagaggtaaaagagagacagtggaggagtcaaagggaaaacggaggggtcagggtgatggggaaaggtcagggtgatggggaggggtcaggg

SEQ ID NO: 37660 - DNA, 1029 bp, Artificial sequence
  DNA replication origin
gaagggtcagggggacagtggagaggtcaatgtgacagagaaggggtcaggtgacagagtaggagtcagagtgatggggaagggtgagggtgacagggtgggggtcagggtgagagaagaggtaaaagagagacagtggaggagtcaaagggaaaacggaggggtcagggtgatggggaaaggtcagggtgatggggaggggtcagggtgatggggaggggtcaagatgatggggaggggtcagggtgtggggaggggtcaggatgatggggaggggtcagggtgtggggaggggtcagggtgatggggaggggtcagggtgtggggaggggtcagggtgtggggaggggtcaagatgatggggaggggtcagggtgatggggaggggtcagggtgtggggaggggtcagggtgtggggaggggtcagggtgatggggaggggtcagggtgatggggaggggtcagggtgatggggaggggtcaagatgatggggaggggtcagggtgatggggaggggtcagggtgtggggaggggtcagggtgatggggaggggtcagggttacaagcattacaggtaaggggtgagggtgatgggggggtgtcagtgtgacggggaggggtcagggttacaggcaaggggtcagggtgacgggagagggcttagagtggcagggaactggttagagtgagggggaggggtgtccccgacagaggagggtgcagagtgacagacgcctcgtcagatttgcaagctgacaaaagacacttcagcaccatgtggaagaagaagggacaaaaatgggttagcttgacataagaagggtcagggtgacaggagagatgtcagactgacggaggaaccataacaatctgatggggcatcgcactgactccccagggagcacctgaactccaccaaccaacgggagcattcgctcccgcgcagaagggacagccaatcagagtgcgcagccttgcatgacgtcactggctgccgggcagactccccttcagtccgccgcccaa

SEQ ID NO: 37661 - DNA, 1233 bp, Artificial sequence
  DNA replication origin
ggggggtgtcagtgtgacggggaggggtcagggttacaggcaaggggtcagggtgacgggagagggcttagagtggcagggaactggttagagtgagggggaggggtgtccccgacagaggagggtgcagagtgacagacgcctcgtcagatttgcaagctgacaaaagacacttcagcaccatgtggaagaagaagggacaaaaatgggttagcttgacataagaagggtcagggtgacaggagagatgtcagactgacggaggaaccataacaatctgatggggcatcgcactgactccccagggagcacctgaactccaccaaccaacgggagcattcgctcccgcgcagaagggacagccaatcagagtgcgcagccttgcatgacgtcactggctgccgggcagactccccttcagtccgccgcccaaaggcccagttctccgtcacctcgtggtctggcgcctcagtggcagcgcatgtcctgccgctgaccagtggctggggaactcctgctaaggaggcagccctgagaggggataggggagagaatggacggggagacaactgaagagacagagatggggggacagagatagacagagacagagagagggagacaaggagacacagagacagacgtagagagacagaaaaagagagacagagatagagagacagagacagacagacaaaggcaaagatggggagagagacagagatggagagacagagacagagacaaaggcagagatagggagacagagatagagagacagagagacaaaggcagagatggggagatagagatggagagacagagagacaatggcagagatgaggagacagagatagagagacaaggagagagctagggagacaaggagacacagagacagagatggagagacagagacaaagagacaaagacagatgggggagagagggaggtggggaaacagggagggatgggaagagaaagatagggagagtgagagaggcgaagagcgacagacagagatggggcctagaagggggagagacaaggactgagagatgagaggggaaatgagagggcgatgggaagcatgggaagcaggaagagcccagagaggaaggagggagggcagctctgactcagagagggcctgcgcagccccaggagggaaccccagaagtggggagtgcaactgagagggagcaatgacgtctcagactgagagatgagggg

SEQ ID NO: 37662 - DNA, 1259 bp, Artificial sequence
  DNA replication origin
gggtggacgggcagtcccgcttggagacacaatctcccagcccagtgggcagcacccagggtgggaaggggtgcgggcagggaacggggcagccgtcgggagagggcgggcggagggaggggaggtgggatcgcagcctctctggggcaggaaggtgaggggcgccgtggggttcatggtgggacagggatgcagcgggtgccggggctggggcccggcatcccgaggagcagggctgggccgtcttactgagagccatctgatacacggtccgctttttctccatgctgggcaccggcgccggctgctgctcgtactctgtgggcaaagaacacggatgacgcccagggagcccccgggggcggggcggagcgggctcggcctgtgggcgtggccagcaggtgcgggccagtgggcgtggcgggcgcgagaggggcagtgaggggccggggtcagggaggggcgagtccgccggcggggtcgggagacgggggccctcccgccagtcctgtgcccactcaccactcttcttcttccagggggagactagcccgggggagaggcagtagaggagccaagagttaggacgtcaggggaaggtgaggggccccctgtctggaagcccgcctccctcggggccccggggtgggggcggtcagctgtccgaccagccccctgtcaggggaaatgggacccccaggtccactcggccttgtctggagggaggggctcgctttcctctgttattgggggttggggggagctggtggagggagagatgttgaatggggctggggggtgaggtgggacaaaaggaaggagacagagagacccgcagagagggtacatacagaccctgagagagaccccaacggagaaacagatacaagagcacagaggaaagtcgtctctcagacaccccttcccagagacacacacacacaggccagagtccgacccatggactggggacaggatgaggacaaggacccctggtcactaacaacactaacgaactcaagggatggtccagccctccttcccctctccccccggccccctggcctcagcagccccgcaggctcacccatctcctccagctctgaggtcatagatttggaacgcagggagatggttgggggcggcagccgcttggcctgctggggtgctgaaaaggtgatgaggggaggcatcagtatcatgggggagatgcccccaccaccctctaccaccacagggctcccagggctcagagaata

SEQ ID NO: 37663 - DNA, 880 bp, Artificial sequence
  DNA replication origin
cccagccagcctctgctttccccagcgattccatctaaaggcctctgaggcatctcaaaagagtgacacagagctgtccccaacacatacacaataccgggggatggccaggcacagcggctcacgcctgtgatcccagtgctttgggaggctgaagcaggtggattgcttgaactcaagagtttgagaccagcctgggcaacatagcaagatcctgtctcttaaaaaaaaaattagccggtgctgtgtgcctgaggtcccagctattctggaggctgaggtgggagaattgcttgagcccaggaagtcgagggtgcagtgagccatgattgggccactgcaccccaacctgggtgacagagagagaccctgtcttttaaaaataaaagtaaataaataaataaatactggggacaaggagggagggggaagtgaatagggtaggctgagcctctcccccaaccctggggccagggagggtgggaaagggggcttgcccagggaggcggtggtatgaagggtcggagggagaggaacatagcccagagggccatggacagggcagcgcaggaggcatcctccttggggtctctgaagctgcaagcacccctcccctcgtctactctgtgtgatctgggggtgtctgtgccacaggtgaacgggcagaatgtggtgaaggtcggccaccgacaggtggtgaacatgatccgccaagggggcaacacgctgatggtgaaggtggtgatggtcaccaggcacccggacatggatgaggcagtgcacaagaaaggtgctcctgcggccactctcgcagccaccccactgccaccaggctcagccctgcgggagccccagggctggttgctgctgcccaaggcct

SEQ ID NO: 37664 - DNA, 2187 bp, Artificial sequence
  DNA replication origin
tgacttggagcgacagcgaggctgtctgggactgtgtgtgtgtgtgtgtgtgtgtgtgtgtgtgtgtgtgtgtgtggtgtgtgctggagtgggtctgtcccagggactgcggctgtgcttcccaacacccaccctcctgggcctggcctacccctcccccacaggcccctacttcaagggtccatcctgtgtctctgtccccatgtgctcctctcccctgcccccttgcccccgggggtctgtgcatgtcaggagtacttgagtcactggctctgccctctgcccatgtggggcacgtgtgctgagccccggctgagctgcatggggagccgcatccgcttgtgtgtgccacttctcagcatggggaggggggctggcgtccctctgtggtggcctctgggcaggccatggacacgggtacgtgggaaggggctgagtgcggggttgggggtgcgcccgtgcacagcagcaggctctgggctggcggaccctgggtgtgtgagagggacgttggggtggggaggggagtgcaggccgctgcagtgcccctgtgtgtgggatccagtgaacaagagctggctgctgagctctggaggccgctcagggtcgcttagggatggcctggggaaaagcattgtgtgggctcctgcagggcaggtagtcagccagagggagcctgaatggggtgctgcaggggcagccaagatggggggcaagggggagggactagaggggtctgggtaggaggtgcagggttgagaatggaacaggggagagtggggacactgaagtgggggaggggtggcggctggagcaccgagggttcggagcagagaaatggggtggggagggaattcagggaatgtgggggggtatttgggggtggggatttgggcagtagggggagaataccaagaggacacagggaatgtaaatgaaacgcagctgccagtaaatgcaggcgggagggcatgtggtgaagtgagtcgagggggcagaaataggtggaggtttccacggatgcaaaagagggtacccaggaagtatgaaagggaccagaggtactttaggggagccagtgagattacttacggaggtgcaggagggtgtgggaagggtgaggccaaaggatgagggagaggtcgcaggacaagggtgaggaggtcacagaggtctgaggaggatgtttagggggaaaggggggtagggtgtgtcaggggacacgggaaatggggggatggctccatagggtgtgaggagggcttgtgggagtcagggatgaggggggtgggttagggcgatgtggaacctcaacatggcatggaggagtagggagtgaggtgcagagaggaggggtacacaggagttggggagagggagtttagaggtacatggagctgtgggagcaagagagcagttgggaagttcaaggagactgtggtgggatgagggcaacaccacgtatgtcctagctggggattgggtgagggagtcatggagcagagaggggaatggagcatgtgtaggatagggggtggttgagaagcagaagcaggaacagggtgggtctggatgtggttggacccccctccctgcctcagatcaccactggtgtgtgtgtgtatatatatatatatatctggtgaattcaaatcttggctttgacatttttctagctggtgtcatcttgagcaagttatttctctgtgcctcggtttccccatttataaaatgggaagaataacagtcaacccttccctgggttgttgtgaggactaactgaatacataaatggaaatatataaatgcaaagtgcttggaatcatggctggcattcagtaataattcgataagtgttcctcattgtcatggtgttactgccacaccctgggataaactccaggtgctgcagggccgagctcagggtggattccgagcagatggatatatgtgctcaaggtatttcggtgctgtggagtggagggtattaccactgcagttacccgagtattctcttgggtattgttgaagaatgatactcactgtgtgaccttggacaagttacttaacctttctgtgcctctgtttcctcacctataaagtgaaactagggctgggtgtggcaactcatgcctgtaatcccaacactttgggaggctgaggtgggaggcctgcttaagtctagga

SEQ ID NO: 37665 - DNA, 1339 bp, Artificial sequence
  DNA replication origin
ggctgactacctgccctgcaggagcccacacaatgcttttccccaggccatccctaagcgaccctgagcggcctccagagctcagcagccagctcttgttcactggatcccacacacaggggcactgcagcggcctgcactcccctccccaccccaacgtccctctcacacacccagggtccgccagcccagagcctgctgctgtgcacgggcgcacccccaaccccgcactcagccccttcccacgtacccgtgtccatggcctgcccagaggccaccacagagggacgccagcccccctccccatgctgagaagtggcacacacaagcggatgcggctccccatgcagctcagccggggctcagcacacgtgccccacatgggcagagggcagagccagtgactcaagtactcctgacatgcacagacccccgggggcaagggggcaggggagaggagcacatggggacagagacacaggatggacccttgaagtaggggcctgtgggggaggggtaggccaggcccaggagggtgggtgttgggaagcacagccgcagtccctgggacagacccactccagcacacaccacacacacacacacacacacacacacacacacacacacacacagtcccagacagcctcgctgtcgctccaagtcatacagagacagacgctgtcacacagggacacacagatggacacagttggggggtgggctgggagcccaccatctctccatttctctctctcacacacacacgcacacacacgcacgcggctgcaggcagtcacacacacgcacatcgacacagccacactgacacacgcaccgtcgcacagtgacacgcagcggaaaaagaggaggggaggggaagccgggggcgggatgcgtgtgtgatggaggggggatgactgtgaatgggagagaggggtatgaatggggggacttgccaacaccgtgaagaggtgtggggatgtggggatcagagggacaggggcctgggatgtaggcggatgcgggtaagccacggtggctccccacagggagggctccggggaatgggggcgctaagggcggcagaaaggcgagtgggctccaaatcctggaggggggtcggtttagggggcctgctgggaggaaggtcttgggggaagagcagaggggggcctggaagggcctgtgagggggtggaggaaaagattcccagggctgacgagtgcgtattaggggggagggtcggggagaggattccagggaggaagatggagaggagaagggttgagaccaggggcccgaaagggatttcgggctgagagaaggttagggaaga

SEQ ID NO: 37666 - DNA, 680 bp, Artificial sequence
  DNA replication origin
ccgcgccgggaggggggagggggagggggcgcgcaccccctcccgcgggagggagggcagggccgggggctcacatgccggggggcgcgggggcgcggggcgcggggtcgggccgcggcggtagcgcgaggaccgcggacggcgccggcttcagcaccgcggacagctccggaggcgggcggcgggcgcgaggcttaaccccttggcgtcctgcgccgggcggcggagggggccgggcaggggggagggggccgggaggggaacgcgggggcccccttggcgggagaagggggaggggcgaggcttggaggggggaggagaaggggaggcacttccggtctgggcccccccttaatccccctcccccctccagagccctcccgcgcaggtgcagagctagagagcgcggggagagggaggcacaacatcacacaagatgcctcgcagccgcgtgcacggacgcgcggacggagccccgcttccccggcagggacaccgcgggtgagagaggccccaggcggggacacgcagcccaccaccacagaccaacacgcaacgcacctcgacacagtcggcaagaaaggccaggacattcagactgggccccaaggccatgagcaacacccctcccccaccagagaagcccaggcggaggggcgaacacaccaccacagctcccc

SEQ ID NO: 37667 - DNA, 1914 bp, Artificial sequence
  DNA replication origin
cccttggcgggagaagggggaggggcgaggcttggaggggggaggagaaggggaggcacttccggtctgggcccccccttaatccccctcccccctccagagccctcccgcgcaggtgcagagctagagagcgcggggagagggaggcacaacatcacacaagatgcctcgcagccgcgtgcacggacgcgcggacggagccccgcttccccggcagggacaccgcgggtgagagaggccccaggcggggacacgcagcccaccaccacagaccaacacgcaacgcacctcgacacagtcggcaagaaaggccaggacattcagactgggccccaaggccatgagcaacacccctcccccaccagagaagcccaggcggaggggcgaacacaccaccacagctccccgagagagcgtggaccccgagccagcgcggggagggggcggcacacgccaggaggggagacacacggaaggaccgcccagctccggcagggaggctggggttgggccctggctgccgggcgcacggcacagcacaggccaggccagcgcagacagggtccgggaagagcggggaggcaggaggaggggaagctgagacgcaccacacacacagcagcacgtgggagccagcgagaggcacggaggagtaggggaggaagcccattgacaagacagagtagaaggaggaagctgagggtgacggggaccacccgcattcagctggtaggacaagtgacccccacagacggaggccaaggagagacccagagagacactggtagacaagaagcagaggccgacatagaagctcggggtgtgggggggtgtaccccaatactcacccggtgcccagagcaggagacgcgccaggcaaacacgcacaacggtcaagcgcctcagacactcggggcgcagggtggcaccccagccccaccctctctccccatgttgccatttctctgtcccccccatccccgacccatccccactggccagaacacagacacgtaggtttggacacatttaatggaaggatgctacgcacaaggggactcttccctggattggggggagcagtggaggagagtgtcatattttagacaccaaattatgaccctccctcccccacagccctgtccttctggaggcccaagccctggaatcctcccctcctctgcccttccctcccccaacatcccaggtcctgaatctcagatcaatcagacagacgcacatgcatgcacacacgttaatgtgcgagtacacacgcacagtgacatgcacagagagggacggatgtgtgcagagacccacctgtccatgtgtgtgagcagactcactgacatgccctgtggtgcttgcccacggattcagagaagcacagatgtgcagagccagccccacagtcatcatagccacaaaggcaccagtatatacagagcagggcagaccctccagccccgggcataggtacaggtacatccaggccacacatgcacacagatgcgtgtcatgcacacctacagagacacacgttcacacaccaagaaacctcagctctggtcgtgcacacacgttcacacgccccccaggcaccccgtccttcccctcctgaccccatcccctccctgcccctcgcctctcacctccctgggccaatcccatccattaagcttccgaagcaagtcagccagcagccagggaggggaaaggtgtcagtgcacccatctcctcaccccaatcccacccagccctgactgcaccctccccacaccggtgcatgggacacacacattcccactgcacatgactgcacagagatggggcacatgaaggagacaagggcctccagccagccagacataagagcgccccggcccccccaggcatccccaccctgccctgacc

SEQ ID NO: 37668 - DNA, 2020 bp, Artificial sequence
  DNA replication origin
cgctacctctccatgcaacggcttcagtgcatgacaagggcaccagtggcaaacacatggtcttccatttctccggcatttttcatgactctgcccccattcagcccttcacatagtttccttcctcgttcaacccttgtgcctacccaggtaggtaacaactgtttttccattttatagacaaagaagctgaagcgaatgtggagaaaacccttgcctggagatggctccagctatgctaggggttgagttggggccatcagatgtattcccctccacaaactgcctcccttgagagcatctggggagaccaaatgaggggaagctgaaagtcatggaagagagcaggagatgggttgtcaaggggactgggttcttggctggtactgccatgcctggcttggtggtcttgtaatcaatcatttgttcactgtaaaaatatttagttagtgccagtcatgagtcaggtaccagggtagacactgttgaatataatcaatgttgttccttcctttgaggagcttccagagcagtggccaatagaggcataactatacaagtgactgtatgattggaagttggggtcagagctcaagggaaaataagagggtgtttggagagaagccagatgggagtatataacttataatggcaaaggggtccagggaggtgtccctgaggtgtgacacataggttgagacctgaaggatcctaggagctggggaggcaaagagagcatggaagagttccaggcagaaggaccagcatgtttgaagagtttggtgtacaagaaagcttgggacattggaggaatggaggggttggtatatcggaggactggagaattggagggctcagggcattgggggattggaaggcttggggcattggaggaatggaggggttggtagcactggggaactggaaggcttgggcactgggaggattggatggcttgggccattgggggaatggagggcttggggctttgggagattggagggattggggcattagaggattagagggtttggggcattggaggattggagggctcggggcattggaggattggagggctcggggcattggaggattggagggctcggggcattggaggattggagggctcggggcattggaggattggagggctcggggcattggaggattggagggatcggggcattggagggttggaaggctcggggcattggaggattggagggctcggggcattggagggttggaaggctcagggcattggaggattggagggatcggggcattgggggattggagggctcggggcattggagggttggaaggctcgggttggaaggctcgggcactggaagattggagggcttggggcattgggagattggaggactcggggcattggaggattagagggtttggggcattggagaattggagggctcggggcattgggagagtggaggactcggggcattggaggattggagggctcggggcattggaggattgaagggctcggggcattggaggattggagggctcggggcataggaggattggagagctcagggcattgggagattggaggacttggggcattggagaattggagggcttggggcattggaggactggagagtaggatgaggtccctggaaccttgtgggtgaaaggaagagtcgcatgagatgaggttgacaaggtgggcagagaggcagcttggaggccaggtgaagactctgggctgtgattctgagagtagcaggagtcagctccctcatcaggctgtgtgaagctcagtgacatcgtggatgtgggtgtgctttgaggcaattaagtccctcttaatggaagacgaggatataaaaacagaaggcagtgtgttctctccctgcgtagaagcattgagcttgtagctcagcaagatactgcccatggtcctctgcctgcccggaaggtcctttacctctggcctcagctcacctttcttttctcccatctcccccaaccccacgtg

SEQ ID NO: 37669 - DNA, 1017 bp, Artificial sequence
  DNA replication origin
acctgacccaggaggaagctgggagtcgcggaaggctcgtgagcggagggatgacacagtcccagctcagcctcaggaagctgaatcaggcggtgcgcgcaggaccgtgggagggggcagagccggaagccaggaggcaggagagggggctggttggggcagctgcgggcaggcagagggagcccccaaatgccctcttccttggaggacgccagtgctgggaaaccccccctcccccctgatgcaccgtcctcttcccccacccaaggacccctgtcctcccagaggtgtcccctccctccaccctcccctcctctcatgccctctgtgtacgcagctccagcgggacaccccgggaagggccagccgggggcacggggggctcagggggccccgggggctccctgggcagccgcgggaggcggaggaagctctactcagcggtacccggacgctccttcatggctgtgaagtcctaccaggcccaagccgagggggagatctccctgagcaagggcgagaagatcaaaggtacccagggtggaagcagggcctgggctgggctgggctgtgggggcgatcagggaaaatgtggagcagagagcagaccattctcgggcacctggagtatctcatgcactctggagacctcagagagccccaggacaccccttgaggcttggaggaccatagagtgtagctcagatgaccctgtcaggaggcagtgaagtgagccgtgtcccactgcgggacactgatgccgtgtgcagggcatggctggaacttctcaccaaatcgtctcattagactcctgatggccctttctggggagggaggtcatgggccccattgcatggttgaaggaacagaacctcacacaggtgaagccacttgcccaaggtcctcagtccaagcccacagtccttcctgccacctggtgcagagcgtgaggccgagcagccttaactttgcctcctgcatctgtccaggggtcctcaactgagagacaggcaggga

SEQ ID NO: 37670 - DNA, 1143 bp, Artificial sequence
  DNA replication origin
ggagcaattccaggcccccctccctttctcatctctgtctttctccctcatgcctctctcccaccatctcttgcccccgcatggccccctgcttgccttttctcccctaacatctgccccccgccgccactgtgccctctcagtgcccttccaggagtcccccaagtacgcggcccggcgacgggggcccccaggcacagggctgacggtgcccccggcgctgctgcgggccaacagtgacaccagcatggcgctgcccgactggatggtgttctccgccccgggggccgcgtcctctggggcccctggccctacctcagggtcccagggccagtcgcagccctcggcccccaccaccaagctcagcagcgggaccctccgaagtgccagcagcccccggggtgccagggcccgctctccatcccgagggaggcaccctgaggacgccaagaggcagccccgaggccggcccaggtaggggaggcagccctggctccacagtccccagccccgtcaaatcccctctccagatcggcggcttcccccgaggccagcccagctgccttcctctgtaggccctcatccaagtccctagtgtcaccttggggtaaagcaaggccttgggagctactgtcccgactccacccccggtgcaccacatgttagctggatgtctgctccaggacaggggccccaggcagagggtaccccaaagaaacatgggccccagcccctggggacagacagaatgacagggtgaggtggagggaagctgaacaggaagaggatggggggggtggcagggacttgagggggacagagaggtcactctggagggaggatgaggaaggggcgggggacattccggggtcaggaagcccacctggctagaggagggtgagaaggaggcgaaggccagccaggcgtgtcccgaggaagtgggggagaggctggcaacggcgggcagaggagttggacctgacccaggaggaagctgggagtcgcggaaggctcgtgagcggagggatgacacagtcccagctcagcctcaggaagctgaatcaggcggtgcgcgcaggaccgtgggagggggcagagccggaagccaggaggcaggagagggggctggttggggcagctgcg

SEQ ID NO: 37671 - DNA, 1399 bp, Artificial sequence
  DNA replication origin
gtagctcccaaggccttgctttaccccaaggtgacactagggacttggatgagggcctacagaggaaggcagctgggctggcctcgggggaagccgccgatctggagaggggatttgacggggctggggactgtggagccagggctgcctcccctacctgggccggcctcggggctgcctcttggcgtcctcagggtgcctccctcgggatggagagcgggccctggcaccccgggggctgctggcacttcggagggtcccgctgctgagcttggtggtgggggccgagggctgcgactggccctgggaccctgaggtagggccaggggccccagaggacgcggcccccggggcggagaacaccatccagtcgggcagcgccatgctggtgtcactgttggcccgcagcagcgccgggggcaccgtcagccctgtgcctgggggcccccgtcgccgggccgcgtacttgggggactcctggaagggcactgagagggcacagtggcggcggggggcagatgttaggggagaaaaggcaagcagggggccatgcgggggcaagagatggtgggagagaggcatgagggagaaagacagagatgagaaagggaggggggcctggaattgctcccccaccaccatccagacatttttggtcctctagggttttctccatcctatcctggcccccaagtcaggtcccccaactcccccatcccaccatgaaacctcaaccgccccaggttctctgtgcagtccgagctccctgtcactcacccacatcctgttctcggtggtttcggatcagctcccccagctcaaaattcccagcaatcactgccacctggagggagggggtagaggcaggtcggccaggggggcccaggcagcagagagagggcagggaacgtggcgaggtccctggcccgacccaaaccttccactccgacaatgccgccctctgtcttcttccagctccccctccacggcctgtctccttgctttcctcattgtccccttccttatccactgggtgtcactgtcaccctttccttagccctggaaactccagcacatcccctgcagccccagacctggaagggggtctgtccgttgttgttcttcacatccttgtcggcacctcgatacaggaggatcctggcacaggtctcctgcgggtaatggccagtggcacaggacaaagagagagagaaaaaattaagatcaccatgagtggatgcaggttctgtgctaagagcctcaggaataaatactccaccctaaacccgcaccactgaggacagcagccacctgccaggtacggaccaggagcactttagtttaaacgtggccggcccaaacggagatgcaccatgcatgcgaactacacactggattt

SEQ ID NO: 37672 - DNA, 1043 bp, Artificial sequence
  DNA replication origin
cccccacttgaaggacagctctgggtgtggaaggctggcaataatgaacattaataggagaaagtcttggcagcaacctcgtgtgaggacagcctgtagcagtgccacccaacagaacgtttcccccatcatggggatggtctgcaactgcaccaccctatatggcaggcacgtgtgggcccctgagcacttgaacgtggctagtgagcctgaggaactgaaattttaattttacttcattctatttaatttaaatttaaacagccccaggtggccagtggctactggcttggatagcgcaggtctggaggctgggaggggcgtgtgtgagcaggatgtgggtttgggggtgagtgtgcatgggagatacatgaagaggatctgttaactccaggggtatactgcagatctttgtggctggcatctgactgcattaggggctcttcaggaaagcatctgagggagagaagggaggggccgtttagctggagcagctgtgcgtcggggtgcttctcaatggctgtctttgggggcagcccatcctgaccctcatgtgaagagcaatcaggtgtcctggcgggggcagggggagaagagtattttaaaattagactgtgcagctgccgctgtgtatgtattttgtgggtgtatgggtttgtctatttgggaaagtgcatttgaggctgtgtacgtggggaaggggctgtatttgcatgtgagagaggagggaggggagctggtgcagtgctggtttggaagggtagctggggggctgttttcagggtgtgtgtggaggggctctatctgggggcatagcagggagctcacttcgtattttaaggaatgagaagggtttacaccttggggagacagaggcagatttggtattaagctgggccacaggggatggagacgttctgggtgtttaggggaggaggccgtgcccgggtctgtgtgatgtcagctatagcccaggtgggtgcatctggggggcctgacaagggtgacaataggggctgtgtctcagtctatggaaaggggct

SEQ ID NO: 37673 - DNA, 1523 bp, Artificial sequence
  DNA replication origin
caggggttcgagaccagcctgagcaacaaagtgagacccttatctctacaaaaaatgcaaaaaactagccaggttgtggtggcacacgcctgtagtcccagctactcgggaggctgagctggaaggatcctttgaaccctgaaaggttgaggctgcagtgagccatgattgcaccactgcagcccgggtgacagagcaagaccccgtctcaaaaaaaaaaaaaaaaaaaatcagggtggttgggggtgaagtgttagttgtgttgaaattcgtgttaatgatatatgttatttaactgatatagctacaatgttactgtttcaacaggtaattgagatgaaaattattaatgaggttatttaacttttttttggtactaagtctttgaaacccagtgtgtatttcacactcacagcgagtcttagttgggaccaaacacactgcaagcactcaggagccacacttggccagtggttcccaaagtggaccgtgaaagtctggagggatggaacatttaggggaggaaagagttcaatgcatgctgtggtggggagagggtagacaaggagggactgggagtttttccttctcaaggatcaagagttcttcatttctgaccaaagcagttcccgatttcctcccagctctcaccatcgagacacaggacagacaggggctgaggactggcgggcaaggtaccaggaggacagatatggctggaaaggggggtgtaatggttggattttgcagagattcaggctatgaggttgggagaaatgtagcctgtctttgaaatagactctaggcagaaggaccttcagtgtcagggtcctaggccaaggtggggaagtaaagaggccttggatggatatggggggaggcaggggaagagaagggagactcaaaggaggccaggtgggaatgatgtgggcccaggcagagggatgaagggcaaaagaggaaagtaagaaggggttgtgatggggataatggggggtatttgtggttgtctcaaatgtggtacagcatcccaagttaagcgggggcagtggccagagggatcgctggcttggggaatgtggaggtctattgggaagaggtggggagagaaagtggttgggtagggggctccagtggtagggggctataggggatagatgccagcagggttttctcaccttcgtgtgcaacttggccagctgcttctcatccaggttggtctgtttgtaaactcgggtcttgtatcggaactgaggtcaagggtagggtagtgagagagacacagagacttggaatcaggggcctggggagaaggcttggggtaggggaaggtctgatccccttctaattccccggggtagctcagggtgggagtgaaaacagccctggaaccttggtctaggcggtagatgggtggcagtggcttttccgacagtgctgggtattatggtatatgtgcactgcaacccctgccttgaaggaggaggagtctggaccccacagggaatgttctagagtgccta

SEQ ID NO: 37674 - DNA, 652 bp, Artificial sequence
  DNA replication origin
atcgctggcttggggaatgtggaggtctattgggaagaggtggggagagaaagtggttgggtagggggctccagtggtagggggctataggggatagatgccagcagggttttctcaccttcgtgtgcaacttggccagctgcttctcatccaggttggtctgtttgtaaactcgggtcttgtatcggaactgaggtcaagggtagggtagtgagagagacacagagacttggaatcaggggcctggggagaaggcttggggtaggggaaggtctgatccccttctaattccccggggtagctcagggtgggagtgaaaacagccctggaaccttggtctaggcggtagatgggtggcagtggcttttccgacagtgctgggtattatggtatatgtgcactgcaacccctgccttgaaggaggaggagtctggaccccacagggaatgttctagagtgcctactgtaattgggaatcctcccccaatttgatgggtgaggagaagcttggggcaggaaagtgacttggccaaggccacttagctggtcagaagcagaacagatggtaatttgaactcaggactctctgacttccctgtgatgcttagaaggtctggactcgcacactgggtgccccctcgttaaggtttcg

SEQ ID NO: 37675 - DNA, 763 bp, Artificial sequence
  DNA replication origin
gccttgaaggaggaggagtctggaccccacagggaatgttctagagtgcctactgtaattgggaatcctcccccaatttgatgggtgaggagaagcttggggcaggaaagtgacttggccaaggccacttagctggtcagaagcagaacagatggtaatttgaactcaggactctctgacttccctgtgatgcttagaaggtctggactcgcacactgggtgccccctcgttaaggtttcgagtgtgttaaaaagtgggtggggggcagatgtgttttagggcatgccttctcttatcagtgaaggagttggggaagcttcacctccaggtaggggacccccttctcaaaggactgggggtactcccgcagcagcctctcctcctccaggaagttggcatcgcggccggaggtggccggttggaacaggccatagttgagcacatcctgcaggctctcgctcagggcacagagcacctgctgcttggccgtccagatggtggcatcggggttgaagcgaaggcatttctggttggggaagagataggggctagggtgggccaggggccagaggagagcctgaggtgggttgggaagtgagccaggagctgagtgtgggggtgattcctgggaggatacccagcaccagtggactccccatgtcggttggggcactgtccctctcctgccgctggccagtgggcaggtactcactgtctggtgcaggtccgggatgccaatcctgaagaccatcatgctgaagt

SEQ ID NO: 37676 - DNA, 765 bp, Artificial sequence
  DNA replication origin
cggggttgaagcgaaggcatttctggttggggaagagataggggctagggtgggccaggggccagaggagagcctgaggtgggttgggaagtgagccaggagctgagtgtgggggtgattcctgggaggatacccagcaccagtggactccccatgtcggttggggcactgtccctctcctgccgctggccagtgggcaggtactcactgtctggtgcaggtccgggatgccaatcctgaagaccatcatgctgaagtgggcgtcgtctgggacggacattgagcggccctggaggcctctaacagaggccaggctaccaggtgccccactgccctggccccgggtcccccgggggcctcgacctggcccgtctggggagctgtcggactctgagcccccctcgggacactcgctggcactgtggcgttcctcgtcctcgcttgtcgcggggctgtgggtcattgtggggccacggggcgacgggggacggcagcatcacaggcggctgcaggggccaagggcggccatcagactaggagcccgggacccctcagaggccgcaggcgctattcggtggtcaagcggtcaagggcagcctacccccactgcccaagataggcaggaaggaggctggacacaccctcggcctgcacggcctcccctgccgcctcctcccacgctggcacgcacacacccctgtccctgacatgcttctggcatgtgtctccttccctgcccttggccccgcttgcagcccgccccct

SEQ ID NO: 37677 - DNA, 1305 bp, Artificial sequence
  DNA replication origin
cattgtggggccacggggcgacgggggacggcagcatcacaggcggctgcaggggccaagggcggccatcagactaggagcccgggacccctcagaggccgcaggcgctattcggtggtcaagcggtcaagggcagcctacccccactgcccaagataggcaggaaggaggctggacacaccctcggcctgcacggcctcccctgccgcctcctcccacgctggcacgcacacacccctgtccctgacatgcttctggcatgtgtctccttccctgcccttggccccgcttgcagcccgccccctgcgccccactttgctggtgacccagcgtggccgtgtcccagaaaccgcagaatcaccgcgggagctactggcccactttgccaggccacagaaaatgcagctaaaattagctaaggacagacaggtggacaaactgacaggcatcctgccctcctggccccagcctggcccctcatcccagggccggggggtggggttggggagaagctgaggctgacactgagatgtagtaagggggagagggaggtgtggtgagcctggagcgggtggagctggtgacttcactcaagtgtggctgacaacgcgtggcatgccgaatagtgctggggaatctgccgtcccaggggagcaaggggcactgagatgggggtgtcatgggcagagcatttggcctagggtgtccccaagggaaccacaagaggtggcttttggagactggggcatcttgagagggtgtgcgggtaggtggggaggtcggcctggggagtgctgtccaggtgacagtggtgtggtggcccgggtagatgtgggtggctgcagatgacctgtagctcttttctaggactgcagggtgggtgggctggcttgctgggtactaggggctccactctgaggactgggggtgttaggagggaggctaagaagtgagaggagggtctggggaactgagtgggggatcatctctagatccttgctgttctcccttgaggtggccttatgagggtggagccccttccaaatggggtccgcctcccttctgttctcccccaactcccaccccagcaccggaaaccagaatgtctggtctggtccctccccccaacaccaggcccggttcctgcaccgttgccatggagatgggaagcagtggagggtactgctgactttgggggagtggggatgggctggggggttgggaaagggaagactaaatgtgtgtggtgggaggagagttccaggaggtgtgggcgagcgagcctctaacccagggccggcggac

SEQ ID NO: 37678 - DNA, 1263 bp, Artificial sequence
  DNA replication origin
agatagaggcctccccaggctgagcaggcacctcctccagctcatactcgggtaccccggagagcctgcagctggaggggaacccagaagctgcctagaactgccccctgcaggccctggaggtgctgttggagctgggagaatgaggaagcctgggctaaggggacactcaccactcactgctgccctgtgggatctgctctgtccctgtgggtgcgtcccaggcatgaatgagctgtctgcctgcagctggctgcatatgcgtgcctacacagacatgtgcaaactctgaggagacggttgggtgtgtctgtgtgtgatgaataaggatatgcaactatgaggggatatgcccagtagtgcaccatagttgtcaagtgaggactttggagccagcctacctgttcctgatccttgttaccacctccttacagctggatgaccttgggcaagttacttagcctctctgttccttggtttccccctctggaaaatggggatggcgaaagtccctgagcctggcacacagaaagtgctccaggaatgtcagcagtaactatcctggaggggaaggatggcacggtgttgggcatgtaaacgggtgagtgcgagccagtgcaatggacagcacggtgggtgggtgtgatgggaaggcgtgcacacgtctctacagtgctgtaactccgttttggtgttgagagatctgggcatgcataccggggtgaacgcctgtgtgcgtgtgtgcgcgcgcacgtgcgtgtgtggtgggcaaatgtgtgcatgtgctgcgtgtgtgcccgggcacaggggtgtgacaactgcatgtagctgggtgtgtttgtagctgtgtaccccaggtgcattgtgtctgggcatgcatgcgctggagagtgtgtgtatgtggggactctgcaggtgccgttacagctggtgactatgcacctgtgccttggggaaatgtggcctggcccaggtatgtccacgtgtgccctgacccagtgcttaaatggaaagggtgtgtgtgtgtttggggggacagggtgggaatctatagccttcacacttaaatttgggggtgtagagtctggcaacaaatatttattgtgccccactctgtgtagggcggcggggagctctctgggagggggtggtcctgaggtgtgtgtgggggggcaccttatgggggcaggaccccttcctcggggtatgggagcaagcaggggcggagtcaggatttggggactcggaggtggggaggagtgg

SEQ ID NO: 37679 - DNA, 1088 bp, Artificial sequence
  DNA replication origin
ctcctcctttgaagagcaggcccagtgatccttggctggtgtgccccatgcttgttggcaccaccagccaggcctgggcgggaaaagccctgcatgactcatgggcctgacatagaggggcatggcatggcattgttcttccttgcctccaagcctctctcccactgccctcaccacctctacctaccctgccaccaccaccctgggaacttgggtgccagcaaaccaaagaggtgaagcttccaggcctttgaccccaccaggaacggctaccctctcgcccactcaacaggttgattgaacacctactatgtgctaggtaggccttgtgctaggagatgcatcagtgcataaaaatccctgctttcattggcagggaacagacataaacaaacaagatcatgccagtcttgattataccaaaaagatgaaatggggcattttaataaagtaacttgcggaatagataaggtggttggggaagacctcctggagctgagacctcgatgatgagaaggagctggggaaagaggcttctagaaggaggaaagggctagtgcaaatgctctgaggttgtaatcagcttagtatttggggatgagccaagaggccagggaaggtggaggctgggggtgggtgaagggaatgggggtgatgaggctgcagaggtgcaaagggttcttccttcccagcccccagcatggtaggctgcgctgaggactgaggcccgggcttggcttccctcctgcttatgatgggaaggtgggggagcaggggagtggggagtgatgtgatctgatttatggtttggaaggattgctttggctgcggcaagcagccgggattggaggggctcaggaggaaggagggggagggcgagactgcagtggtccaggctgaaatgaggtggcttgctgaatgctcagagctccttgagcacacaacctagcgtctgtcgatttcacctcctggagaaaccttccctgactgctccgccagactcctcaccctctcccatctccagccccctcatccccggagctatctggctgctggtctgcaagcagctggagtccccagcatcaccc

SEQ ID NO: 37680 - DNA, 874 bp, Artificial sequence
  DNA replication origin
acctcctggagaaaccttccctgactgctccgccagactcctcaccctctcccatctccagccccctcatccccggagctatctggctgctggtctgcaagcagctggagtccccagcatcacccagcccacagcctggcctgcaggaggcttctagtaaagtggccaattaatccccgagccccgtcttccagggtcatgcacacagtcacacgcgtgctcttcacatgtgtcaccctgcccccacacacactcacttggatctccagacaagggcttggagggtaggatgggcaatctagggggcaggaggggccctggagtctcctccattgagtgtgcaggcgatggtggccacagggtaataacaacctcagcgagaccctgaggtctgcccctccttaggaatggccaggcagggaagaagggagcagtgctcggtcccagcatcccaccactgccgagatggttctgagcgggttcctgggctgaggccggggcctgtgttttccaagattccttggagagccagctccatcctcttcctgattatctgatctttgggctacagcagaaggaaagagcagggcggaagcgagctctggaaagtggaaagaggagggtgtgcgaggagacccaaggcgggatctaggctttggaacgttggaggtttccggccacagaggcagggcctccggggagccaagaggggcggggagagacacacacagagaagcagaggagaccaacggaccggacagagacgaggagaggaacaggaagagagaagctgggagaatcgggaacctgggggctagtgacctgcacacagggcaggggcactcggcagttcccagaggccacccctcccacc

SEQ ID NO: 37681 - DNA, 1247 bp, Artificial sequence
  DNA replication origin
gccgagatggttctgagcgggttcctgggctgaggccggggcctgtgttttccaagattccttggagagccagctccatcctcttcctgattatctgatctttgggctacagcagaaggaaagagcagggcggaagcgagctctggaaagtggaaagaggagggtgtgcgaggagacccaaggcgggatctaggctttggaacgttggaggtttccggccacagaggcagggcctccggggagccaagaggggcggggagagacacacacagagaagcagaggagaccaacggaccggacagagacgaggagaggaacaggaagagagaagctgggagaatcgggaacctgggggctagtgacctgcacacagggcaggggcactcggcagttcccagaggccacccctcccaccccagacatccagacatctggaactttgggtgccaagagtccagcttaatgcaggcagcctggcttttgggggctttggtggtcccccagctcttgggctttggccatggggctcggggagcagagagggagtgggagggaggctggggaggtgcccaggaggaggagcgggagagggaggccctgatgctgaaggtgagctctggagtgtcagggagctatgggtggtgaactgtgggtctgggagggggtattgcaaggttagggaaatggacaatgaggagcgattgggatagtctcagaggagtgggagggtgatgggctcagagacaggactcaggcagcagagaatgagttatgagttggaaaggggtgaatggggcatcttggtggcaggctggggctcaccacccctcccctgccccagcatctgcaggaagccctaggactgcctgctgggaggggggatgagaatcctgccggaactgttgagggaaaagaggactgggagatggaggaggaccagggggaggaagaggaggaggaagcaacgccaaccccatcctccggccccagcccctctcccacccctgaggacatcgtcacttacatccgtgagtaaccagaagccctcacccccaaactcctaggccgccgcggtcactttcgcaaaaatgaagggtcggttcactgccaagtggcctttcagttgtccattgcccagcccagagcccccacacccctaggagccccaggtccacggccatgcctcctaaaggcctgggccactcgaccctaccttccaggagtccggggtgccccccccaccgcca

SEQ ID NO: 37682 - DNA, 950 bp, Artificial sequence
  DNA replication origin
ttcgtggccaggaagggaagggagattccggaggagggtgggcacggcgcagggaaaggccgggtggtgggatgggcagggaggcggggtaccggccccgctagaaggggaactcgcagacgtagtagagacgccgctggcagtcgtggtcccaccaggagccgtcgtcagaggcctgcgccacgcagttctcgagcgtgccaccgttgggctggtccgggctgagcggatgcggcgaggcgctgggctgggcgccgagctcggggcggggtgagcgatgccaggcgaagaaggacacgcgctggccgttttcgaagaggtagaggccctcggcgcgccgatcgtgcacgcccagccacacgggccagttgtagggagcgagcgccgcgcgcaggtaccgagtgagcgcctccatctgctggcggtctgccggctgcgccaggctcccgccccgcgccgtgcaccgcgcctgcgccgccgcctgagcttcgaagtcgcgcgagagcaggaagcacttgtggcccaggcgcagccccttcaggcagcctgtgggcggggccgggtagagaaggaggcggggtcatgcattcagagtctggaagggggcgaggacaaaacatccgggggtggagggaggcggggccaggaactcatggggagggctgggaggaggcgtggtcagaaccgcgggagccaggaggtggagagtctggtccgccaggggcggggccaggcggtgggagctggactgtagggggcgtggtgctgccccagtcgggtccgcgcgggtctggagtgcccacccgctccctgcattcagcctcccagctctctaaccccgtccgctagcacacagcagctctcccgaactctcccgccccggacacctagggtcaccttctcaaccagtcccattcctggcccagatagtctcatttttttccaccccg

SEQ ID NO: 37683 - DNA, 1277 bp, Artificial sequence
  DNA replication origin
cagacagggtcacatccccattcctaggctccctgatgtcagggtcacgcccatgatgccaaccttgggggaggtactagggtgatttccaaagagcctctcctctagacagagctggccactatgctgaggccccggctggcggactcctgggtgtcttcactgcccccagggagtaaaggtatgaaaaatggtgagggagagccaggcactgtggctcatgcctgtattcccagccctttgggaggcccaggagggcagattgcttgagctcaggagttcaagaccagcctgagcaacgtggcgaaaaccaacctctataaaaaaatacaaaaattagccaggtgtggtggggcgtgcctgtagtcccagctacttggggggctaaggtgggaggactgcttgaacccagaagattgaggctgcagtaagccatgattgtaccactgcactccagcctgggcgaaagagcaagaccgtgtctcaaaaaaggaaaaaaaaaggtgaggacggaaggtagtgtgtggctcaagttcagccaccaccaaatgcacactgtcctggtctcacctgaacatcccaagagccgcacaaagtaggagggattgtgcccacgttcagatgaaaaacccgaggctcacagaggggaagggactggctcctggcctcactggcaggaagcagaggagggaaaattgggaggaagtctaagcttcagggttgggtgagtccttaagtccatgtctcaatatatcatcccaacaagtccatgaaaccatatcatctggggaaacaaattggacacgccacttaaacaaattaaacgggctctttcctgccggacttgtcagagcctttagccccttcacgtttcccaaatctctttgaccaggaccaagaccaaggcctgggacaactggcaggccctgggtcccaaaggccgagagagagggcacgatggaggtgaaggtgtctacagcgtttgtacgcgtgtactccggccatctgtgcacagaacagatgaccgtgtgtacatatgcacctgtgtttctccatcactccatctggggctcaaatgacatctgtaaaaagcagaacaggcatccaaaggccaggacacgcgcccaaagaccagggtctggcccttcccggcttcccctgcaggagataaagtccaagactgccttcactgcccctcaagtcagattccacaaggatttattggcaccggacctagcctggtgcccgccccttcaaggaaagacactaacaaggag

SEQ ID NO: 37684 - DNA, 947 bp, Artificial sequence
  DNA replication origin
gtagcacacacatgtaatcccagctactcgggaggttagggcaggagaatcactttaacccgggaggcagaggttgcagtgagccgagatcacgccattgcactacagcatgggagacagggagagactattacaaaaaaaaaaaaaaagaatataacatttgagcaaagttttggaggaaatgacaaagtgaggcacatacgtatctggaggaagagcccttcaggcagaaccagcagcttgtgcaaaggtcctgaggcaggacggtgcctggaatgctcaaggaacagcagggaggccggtgtggctggagccacgtgggcaatgggaagagaggtgagacgtgaaggcagagagggaagcggacagatggagcaggaccctgtgagtcatagtgcagactctcctggcctttcctgtgagtgagatgggagttacaagagactgttgagcagagaaggaacaatatctgacttaggtcttaacaatcactgtgactttaaggttgagactagactgagggggtgggatggaagcaggaggccgggaggaagctgctgcagtaacccaggtgggcagtgatggggatggggaccagggtgatgtcagaggagggggtgggaagcagattccagggtcaaggtggagctggctagatttgctgctgggctggatgtgtgaggtgagagggagagcagtgtcggggtgactgcaggacttttgaaccgatggaagctggagttgctgtgcactgggatgggggagactgcaggagagcaggtttggggtaagaccaggagctcaggtttggggtaagaccaggagctccgggttggtcacttcgcctttgaaatgcctgtaagacatcccggggaaagttcacttaggcagctggataccggcagcaagattacaggagggggcccagcacagtggctcacgcctgt

SEQ ID NO: 37685 - DNA, 764 bp, Artificial sequence
  DNA replication origin
gtgagccgagatcacaccattgcactcgagcctaggcaacagggtgagactccatgtcaaaaaaaaaaaaaaagaatataacatttgagcaaagatttggaggagataacaaagtagtgaggcacatacgtatctggaggaagagcccttcaggcagaaccagcagcttgtgcaaagtcctgaggcaggacggtgcctggaatgctcaaggaacagcagggaggccggtgtggctggagccacgtgggcaatgggaagagaggtaagaggtgaaggcagagagggaagcgggcagatggagcaggaccctgtgagtcatagtgcagactctcctggcctttcctgtgagtgagatgggagttacaagagactgttgagcagagaaggaacaatatctgacttaggtcttaacaatcactgtgactttaaggttgagactagactgagggggtgggatggaagcaggaggccgggaggaagctgctgcagtaacccaggtgggcagtgatggggatggggaccagggtgatgtcagaggagggggtgggaagcagattccagggtcaaggtggagctggctagatttgctgctgggctggatgtgtgaggtgagagggagagcagtgtcggggtgactgcaggacttttgaaccgatggaagctggagttgctgtgcactgggataggggagacggcaggagagcaggtttggggtaagaccaggagctcggggttggtcacttcgcctttgaaatgcctgtaag

SEQ ID NO: 37686 - DNA, 1163 bp, Artificial sequence
  DNA replication origin
agctggggaaaactgagtctcagagaggacagccgtgtgccttgccttgggtctcacagcgggtcgggggaacccgggctctcggcccctgcgtctttgtcgcagtttctcccagatccaggagagcagcgtgggccggggctcaccctggtctggacagaccagctcgaggacagtcttgcttctcggagccagctcaggcggccagacccagagctgcctctctctccacccgctccctccctcgccacacgtgggtccagccccctgaccttatcctcagccacgggcaccgtgtgcaccgggatcggcctccagcgggcctcggggctccctggagcagcctcgggaaacagcccggcaaggttggcctgggcactctccagcgtgcggtcaaagtccgtgctgcggatgtacacctggagcggggtggagagagggcacgcggggggtcgtggttggggacagaggtcagctgtcgtggcaaatcagaagcctcagattcactttggagtaggggtcagacactgagaatcatgtggccttcgaagttggaagttgggatcaagggtccagaggctaatgtcaggagcagttgggctggacgtcctaagctggacagccatgttggatttagggggtcaattgagtcaatgagggtcaaaaaggaagatcagaatcagtagaggctggaggttagaggtcaagtttaggagggcagcttggaggacttggagtcagagttcaatacatgttcttcagaggttaggaggactgtctgtagctgggggatgtcagaagacataggaggagacagaaaaggtaggtcagaattgataaagcgtagaggttaaaggttagaggtcaagagggcaagttacgtcaacaagggtcaaagatcgaaatcaagtttggggtcaaatgtcagaggccagaggtctgactggagtcaatgggacttagaaaacagagatggaggccagaaaataaagtcagagttgatggaggtcagaggtcgagatgtgacaggttgagatggggtcagaagtcagtgtgggttagtcagtgtatcgggggtcagagattagaggtagagggcaagtcaggttgatggaggtcaaaggccagaggtggaggcccaaagagagcgttgtagtcagtgg

SEQ ID NO: 37687 - DNA, 1201 bp, Artificial sequence
  DNA replication origin
cctgacctcatgacccacccaccttggcctcccaaagtgctggtgtgagccactgcactcggccaagtactgacatttctaattcaatcctcagtacgtttccatgtggtagcaaattttgtcctgatcctacagatgagaaaactgtggcttggagagatgaagtagcttgaacaaaatcacagagctgctgctgctgatgggacaggatttgggatgaggttagaatgggaaataggattgggtattgggtagaggttgaagtttgagtgttagaggacgaggttgagagtggtgtcaggaataggttgcagttgggatgggttgtggttgaaggtgggtcgtagttggggtgggttgtggttgggggtgggttatggttaggggtaaggatgggttgaaatggggtagtttgtggttgaggatgggttggaacagggatggtctggttgggggtgggttgggatggggatgggttgtggttggggatgaggatggggatgggttatggttggaagtggattgttgtggggataggttatggttgggggtgggttgtggatgggatggttgtggtttgggttggttgtggttggagtgaattgtggtggggaagggttgtggtggggatgggtggtggttgggggtaagttgtgatgggagtgggttgtggatgaggataggtcatggttggggatgaaaatggattggatatgggtaagaggatggagtggggaatggactagattgagtttggcattgaagttcacaggtgatagaattgggttgcatttgaaacatatgttgaggatggttgggatgctgcaaagttggttgttgagatgtttgaagaggttgcggatggtaatgaggatggtttggtgattggaaagaatgtagaattgggatggagtaggggcatgagggaaagggatgtgaatgagtttgagatttgttggtgatggagatgggacttgaagtggaggctggtattggggctggagatagggttgggctggtggttgatgttttttatgggaatgggttagagatttggaaggagatggggttgggattgcggatgatggtcaggatggggatgggattggagtgtggtggggatgggattgggtttcatgattggcactggaggaggtactcctcgccttggttcctgagggaagtgccatgcctgtcagga

SEQ ID NO: 37688 - DNA, 1080 bp, Artificial sequence
  DNA replication origin
gcagatgcctggttagctctcagaagccagttcagaggctgagtcccctccctcagcccttccagaccctgggggcagggctgcctcaccacacaggtgtctttgccaccttccaggtgtccgacacacagcatgaagtctgtcaccttctggacgtgggcttttttgcactcatcattaggcaggattttgaggtccacacactggagatcatctggaaatgagactacgaacccgggagaaaaagggctgcagcccgacctcacctgcttccctggccctttctcccttggacgcaggagtccccatccccgccttgggctacacagtctgcccccacatacaattctctggttcgatgctgccccagccggaagccaaacaggtgctccccacttcgggttcctcggtgggcaactccacgaccttcacagcatctgtgatggtatcagcaggctctgtcaggcggagcagcatgaggtcgtggctgtagtcctcgtctgcttggcgggtgtggttctccaggaggctcatgttgaagccagggtgtgggaagctctcactgacatgaacaaactgggctgtgttttcgtcgtcaaacaagttgtggcgacccagccagagctggtaattgctggggaaagatgggaatggagggatgagaagacgggaaggggaaaaggggatggggcaggggagcatgggggagggtccccaaagagagaaagggaaagagaaaaatgtgggtgggcggagacagaggaagaaagatatagttatggagaaatacagacagcgaatgggaagatgaaagattttgagagtgcaaaaggcaaatgaagagacagagcaaaaaagagctcaaaaggacagaggggtgaaaaaggcggaggggagggcagtgagaaacagggtgagcaaaaaagaggcagatgagaaggataaaagacagggacagcgagaaacaggcccagggaagagggaggaagagggaacagaacacggaagggagcgagaagcagacaaatgaaaaaggacgcgggacgtcagagtgagaactagaaacagaggcagagagga

SEQ ID NO: 37689 - DNA, 773 bp, Artificial sequence
  DNA replication origin
gcgagaaacaggcccagggaagagggaggaagagggaacagaacacggaagggagcgagaagcagacaaatgaaaaaggacgcgggacgtcagagtgagaactagaaacagaggcagagaggaagcaggagtgaccgagtgtgggagagaaaagggagggaggccctgggggagggtgggggcaggtggggagggtgggggcaggtagggaggaggggaggcctgagagcggctcagctgcagctggggctgtggtgcgggctccccaggggcaggtggcctggcctgaagtccaaggtcgaggcccccttcccttcccagcaccctcccgcgcgtttctcgccccgcctcctccttcctcctccctcagttgccccacccagctcccgctgaaaccagcccttccctgtgtctctccagagtggagggatatcctgtggggcggggagctggacagagggagaggcgccccctcccaggcacacaagttggggataaagcccttcctttactctggggcctcccttaggtccatctgggtgtgtgtttagtagggatgagggagcggtgaggtagagacccagagagagagagatgggtagagagatggagggtgagacacagtgacagagatgccgcagagagactcagagacagacagagacaggggagatgcagagacaaggagacagaggagagagaggaagacagagaccagaacacagtcacacagagacacaagcagaaccagatcccaagagacccaggcagcc

SEQ ID NO: 37690 - DNA, 2360 bp, Artificial sequence
  DNA replication origin
ccgcagagagactcagagacagacagagacaggggagatgcagagacaaggagacagaggagagagaggaagacagagaccagaacacagtcacacagagacacaagcagaaccagatcccaagagacccaggcagccttggagaggggtgtccagcccagctctgccctgccaggcgacctgcgccagagccttcctctctgcctcagccccccagtcttgcctgaggttatccaaggggaatgccactggcctgtcaatcctgtggcagcatagatgccctcctcccagaccccaggcccctactcactcgctgatgcaatgagcagctgtgagcacccactggcggtgcaccaggatgcccccacactggaaagtgctgaaatggtacagagccgcctgccagggctgggaatgctgctcacactcccagcctcccacaatccgggactgaatcgggggcgcagcacctgcagaggcggtgctgggtcaggaagggcagggttggcaggagaggccagggacaaggctaggagagggagctgggctgtgggtctgaagggacattgcgggtagaggaccagggctggaggttggggacatgggcaaggggtgttgggaaggggtgggactctggactgttccctgggcttttggagtggtggctggacctggtggggagattttgtgctctgacagtagagcagcctccagggatcagggtaggagacaggagacagtgtctggagcagacactgcatctgggcgtcaggtcatttggggtctggggctgggggatgggaggtggtgggttaggggagtggaaagggattctggaaaccagggatcaaggcgccaagggtgggacaggatcagaggctcactgaggaagaatctggagggctaaggggctcctaggctagggaaacaggacctgggttgggcttttgaggttcaggaaaggatgcagctttagggaaccaggtctgagaggtaaagaagagcatctggactgaagagtttgggggtgacttggggtccctacattggggttggaaggggccagcttggctgggacagttagatttcagggcttcctggttaaagggtaaaagaaagggctatggttaaggctagaggtgggcttccgagaggttttggggtccttcctgtgaaccaggaatggcaatctgaggggaggttggggccctgagaacacagttgcggtcaggactgggacggggctcaggaggagggaggcgtgagtggcagtccttctcggacagggtgaaggatgggatcttcgtttctcatggggatggggttcatggtctgagggtactggaaggatatggggtcctcttggaggcaatcctaggaagaggattggagaagtggtgagaacaggcgccaagcagctgtgggaatgcaatgcaggacccacttgacgtgaggttgtagaatcacatactgacttgggggaggccagggcagaagcgctggctgagaaggcattcaggatccttggggtggggttccagaaaaccagagctgtgtaggaacaattcaggcagagaagggctggggcctggggcgggatggaacttccccaaggaaaggagcatgtggtgggagggtgtggtgtttttcctgggagagctgggggtgctgggtgggaagggacatttgcagacccccccccataccagatgggggatcccacatgccagtttgggaagcagggttttctggtgaaatttgggggaccctggaaggactggggagaccagatgtcagggtctggaggacacagttgagagcggacagctggatggaaaaagtcactggagtgtggtgggatttgtagactcaggagccaaataggtggccgcagggaactagggggcaggaggggatgatcagagtcctgtggggtgggggaagcccatgggagggttggggtcctccagagagagacagagatggcccagaatctgcccctttggtaaagcggtgggacagggcgttggctagggaagaggagaaagtactgaggcttcctgggaggagcaggaatctggtgtgggagtgagcactatgacaacatggaggagcgggggtggaagtttagggtggggccgcgcaagatagataagagccggggcaccccggactaggatagactgtgggccagagggatgagggtggggtgttggaggggaaggtcttatcggggggggatgtgaggccagcaagagaatcagggcccgttccccctcccacatccccccactgtctcaccagtcccccccagggacagggcgaggcacagaaccaggaaccacatggtgacagaggtg

SEQ ID NO: 37691 - DNA, 1341 bp, Artificial sequence
  DNA replication origin
cgggtcattccacacccgcgctacgaagcgcgcagccaccgcaacgacatcatgttgctgcgcctagtccagcccgcacgcctgaacccccaggtgcgccccgcggtgctacccacgcgttgcccccacccgggggaggcctgtgtggtgtctggctggggcctggtgtcccacaacgagcctgggaccgctgggagcccccggtcacaaggtgcgtgaaaggatggagctggatgcgaggcctcaaggaatcctatgctccagggctcttgggcggaggggacaagggccggaatttatggatctgctccaagtccactgtcttccccagtgagtctcccagatacgttgcattgtgccaacatcagcattatctcggacacatcttgtgacaagagctacccagggcgcctgacaaacaccatggtgtgtgcaggcgcggagggcagaggcgcagaatcctgtgaggtcagagcctagaggggccatcaggcggaagaagagggatggggacaggtgtgggagtccggatggggttggattttctttgctttgggccagagaagatgctagggttaggcttggagatggagtaggaagagaagttagaataggggtgaggttggagttggggttataggtggggattgcgttgtttgaggtggataatgtgatagttagtttgagatggcatgggttggggttgagaatgggaatggtttggtttgattctgggtgggaaatacgtcagggttgaattgggatgaggtagattttgtttggaatgcagaagacatgaagattgagattggattttgagatgggcatgggtttgatttgattttgaatggtgaggatgtgggctgagttggatttaacttagtacagttgcactggagttgcatgggggtgagattggatataggttgggtgagttgtattgagctgtgttgaattggggttggggttggggttgggttggctctgtttgggataaactgggctgtattgagttgagttgggttggggttccctgggatggggatggattgggtttggggtgagattgcaaatggtgattaggatgaggatgaatccaggaggtttcactcaacctgagaccccctcttttccccacagggtgactctgggggacccctggtctgtgggggcatcctgcagggcattgtgtcctggggtgacgtcccttgtgacaacaccaccaagcctggtgtctataccaaagtctgccactacttggagtggatcagggaaaccatgaagaggaactgactattctagcctatctcctgtgcccctgactgagcagaagcccccaca

SEQ ID NO: 37692 - DNA, 963 bp, Artificial sequence
  DNA replication origin
ggggcgccgacgtcaccgcgtgggggcggggctgcgggagccgctggctgcgcgccctccagggagccgagcgcagaccgggtgcgcgcctgggttcggcgcggcgggagcgccctcagtgtccccgtctgtatcaggggtgcttcatcagtacctgcctaggctggttaggaggaggagcacgtgcgatcgtgacgggaagcgctcagcacagacctggcaccgaggaagtcccaggggctcggctcctttccctcgtcaccaccgcgccccaacagagggaggcggctgcaggggtggcggcgaaagggcccaccgggcgttccggagtcggaacactgattcctctcccgcgtggcctctcgcttctgcaggaaccttgcttgtgctgcctcctgtctgggcctcagtttcctccgtattcagcaggaagccataaggttattaatataaacacctcacagggctgccgggagccggagtgagatcctacaaagagagcacttggcacggaggagtggcctgcagccgcattccataaacagggctgctcagctgaagcggtggcccagggtgaggcccgcagactttgagcatcaatttgtggggagggaggcaaagggacataggagttctagaatagcttccaacctggggatctattatgtctgccggtctgggcttgtagaatgtctggagacccgacgttctagaatgcatgaggtttctggggactccagagtgcccgatgttcgaaggttctagagtgtttggagctctgtggttctaggctattctaaaatcttaccttccagagtgtcctccactgccagaatgtcttagggcctgtgcttttagaatctgaaagtctgatattctagaaattccaggggcctgtagttctagaatggctgaatccttcccataaagatgatgactttccacacatggggagagaccacg

SEQ ID NO: 37693 - DNA, 1161 bp, Artificial sequence
  DNA replication origin
tcgcagatgagcacctgacacccagagagctgatgcttctcacaaggggcaccaggaccccgagaaccattctcttgattccacttctgcagcctgggtgaccttcaccagtgacccccgcactcccgtctgctcatgtgttaaatgaatgaatcgtcataatttactatatgctctgagctcctaacacaaactaagtcgttactcctcgaaaaactctacgaggggatcctctgattttaaggataagaaactgagacacagagaagaaaaaactcttaccagggtctcccaaaatagtaagtagtggaacagagatctgcacccatgctgtctggatccagacccagcgccctgaaacagcagcttgtctggttccagaaggaacggaggccgtggtgagactaagttagaagagggccagcacctcatggggaggcccttcgggcaccacgagtccagtcccgctccggaggtgggcagtctgcaggccccctgagaagggggtttgaggggaggctttttcctgctggggaatctcaaagggcttaaaactgcagaccgagaagccgggaccttgcccaggggtgatggggagctgcaagggaaggctgtgagcaggggaggggcggggtgatctccaagtgcagagagaccctctagggccacgtggtgaccgacaggaggctgtcctcccggacaggaggagcgagggtccagagagagaggaggacgtctgagctggagccaggccaaggggacagagaggaggggacggggcagagagaggcaggggccgaagggacaaggctggggaccgatgggctgtaggggataaggggagagatggggcaaggtcagtgccaagggcgtctggccgaataactgggtggtcggtgacgctgcccctgagatgaagaacgtggaagaacagggaaggagggtttggggaaatagagcaatgagttgggactcggtaagtgagaggggcctagggacagtggtgcagggggcgcccaggagcaggtggctgcccaagccggagttcagggtcagatggaggagacctgcgtggttggtggatgaaccacgggagttgatgaaaaactcccagggaacgttctcaggaggaggagccgggcaaaagtgagactcaggccg

SEQ ID NO: 37694 - DNA, 2068 bp, Artificial sequence
  DNA replication origin
ctttttctgaatccctgtgacccctttatcaagacccctgttttacagatgggggaactgaggcccagggagaggaaatggaggtgtgagaccctggtatgagagtgtgacgtcaagcaaagagaatgtcacacgcagacgagttcttctctgagactttatttcctgggctgtgctgggggaagctggaggggaggaggcagaaaaacccacatcttctcttcttttgtcctgggagggccttaccgataggtggcatcaattgtgcgtttgttcatagcagttttactcctgggtctgagggaggaggggctgggggcctggactcctgggtctgaggagggagaggctggtgcctggactcctgggtctgagaaaggagaggctgggggccgggactcctgggactgagggacgggtggctggtgtccaggactcctgggtctcaaggaagaagggctggggggtctgagggaggagggggctggggactcagactcttgggtccaagggaggagcggctggggtctggactcctgggtctgagggaggtgggactgagggcccggactcctgggtttgagggagaaaggcctgggggatctgagggaggaggggctagggtctgaactcctgagtctgagggaggtggggctgagggcctgcactcctgggtctgagagaggaggggctggggggtctgagggaggaggaggctggggggtttgagggaggtagggctggagtctggactcctgggtctgagggaggaggggctgggggcccgcactcctgggtctgagggagctggggctggggaggtctgagagaggtggggctggggggtttaagggaggtggggctggagtctggactcctgggtctgagggaggaggaggctagggacccggactcctgggtcggtgggaggaggggctggggcatcttagggaggtggggctggggcctggactcctgggtcctgcactctggggctgggagagaaaggcctgccctgcctgcgtctccctctctgtgttccacccccacccatagacctcttcgctagagtcctgagcccccagcccactttccagctccctcctcttccctttctggaagcttcccttctgcgtttgttcataggaggtttgctcttgggtctgagggaggaggggctggggtcctgagctcctgggtctaaaggaggaggggctggggagtctgagggaggagggaggtggaggcccagactcctgggtctgagggaggagaagctggtgcctggactcctgggtctgagagaggagaggctgggatctgggactcctgggtctgagggaggaggggctggggtcctggactcctgggtctgaaggaggaggggctggggggtctgagggaggagggagctggggagacgtgtgtcttctccctcccgtgactcctgctcactttccccatgtctgtgtttctgctcccctctccccgtgatcctgtcagcttcttttagtttttattttttagagttggggtcttgctctgttgcccaggctggagtgcaatggtgcaatcatagctcactgctacctcaaactcctgggtttaagcgatcctctggtatcagcctcccgagtagctgggactacaagtgtgtgccaccatacctggctaatttttacgttttgtttttttttttgtggagatggggtcttgatatgttgcccaggctgagattgtaaaaagtcatcatggaacaccccacctcccagtgcaggaaagctggctgtggtattgccaagaatgatgtttattgcagcactattcccaatagctaagatttagagacaacctaagtgtccatcaacaaatgaatggatacagaaaatgtggtacatatacacagtggaacactattcagccatcagaaagaatgagagcctgtcatttgcaacatggatggaactggaggttatgatgttaagtgcaataagtcaggcacagaagataaacttcacaggttctcatttatttttgggagctaaaaattgaaacaattagccgggca

SEQ ID NO: 37695 - DNA, 1063 bp, Artificial sequence
  DNA replication origin
gcccagcacacaacatgaactctgtcaccttctcagagtaagctctagcacacatgtcattggacaggagatggaggctcacacactgaagactcctggggcgcaagactatgggtcagagaaaaactgggctgtggccggaccccacctggttctttggccccacttccctcagacccaggcatctgggctcccagctacaccatctggcccaggcgtacactcctctggttcgatgctgccccagcctgaggcgtagcaggtggtccccagtgctggctcctgggtgggcaggcccaggaccttcacaacatctgtgatcttggcaggctctgacaggcggagcagcatgaggtcatggctggagtcttcatctggtctaaggctttgatgcttcagaaggctcatattgtagagcgggtgtgggaagctgtggctgacagggaccctctggcctgtgtcttcaggctcaaacaggttgtgccgacccagccagacctggctattcctggggaggaagggggtggatgcatgaggagagagaaaatggggaaaggtagatggggcaggggaggataagggagactccaaagggaagaaaaagaaacagtgagaaaagcacaggggtcggggagatatagtcgtggtgaaatacagacagtgagttagaaaacaggagtgtgatcatgtgagaggcagagacagaaactgaaagaaacgaagtggaaaagagagagcataaaatggcagaggaatgacaaaaacagaagggagaacagtgagaattaggatgagcaaagaagagacagagacagcaagaaatagacatggggaagaggaagggagaaagaacagaaccaggaagggagtgagaaatagacaaatgagaaaaggatgcgggaagtcagagagagaaggagaaacagcagagaggaagccaggggtgatacagtgtgggagagaaaaaggagggaggccacgggggcatctgaggagtgtggagtagcagggggaggaggagaggcatgagggtggctcacctgcagctggggctggagtgagg

SEQ ID NO: 37696 - DNA, 1185 bp, Artificial sequence
  DNA replication origin
ggtttctcttaactatccagggaatggcccctccctctgaaactctgtggccctcctggtcaaagctcgcatttcccagatagggaaatgcgacccatggagggaaagccatttgctggaatctcttgaatggaaggggaagcaaggaggacactacaaacagaacctgcgcttctcttagactttatttctggatctaggggaaagggacaaaaaatgaaaaaccaactggtaaggttgggtcaacgtgccacaagggggcactgtgtacagggagagtctaggtggcattggaccgctgggtctgagggaggaggggctgggacctggacctctgggtctggggaaggaggggttgggggcctggacctctgagtctgagggaggaggggttgggggcctggacccctgggtctgagggaggaggggctggggggtctggactcctgggtctgagggaggaggggctggactcctgggtctgagggaggaggggctggggggtctggactcctgggtctgagggaggaggggctggactcctgggtctgagggaggaggggctggggggtctggactcctgggtctgagggaggaggggctggggatctgtacccttggtttgagggaggaggggctgggggcctggactcctgggcctgagggaggaggggctgggaacagatattcctgaattccttccgcaggatgtatttgggggtcaatttcatgggttcccagtccccagagttaactggcctggacggttttctctatccactcagtgaatttgcagaggttggtgtagacacctggcacgccaacttggccacacggggcttttccgaaagacacaaggccctgcaagtacccgttgcagatcaggggccccccagagtcaccctgttgtgaagagagggagagtcagaattcaaaacacagagaggtggaaatggatgtgggctcagaaaggaactaaatgagactgagaaacaaagacagaaccatcatcaataacaacatagcccagcaacatatctgttggaagtcccattccagatccctgacttcatctaatcctgcttcccgatgtcctatgtcctgaatgctggctgcttctcttgggcttgtggtctgtctgtttctgtttgtctgtctctcctttgtctcctttgtggcttgttt

SEQ ID NO: 37697 - DNA, 1437 bp, Artificial sequence
  DNA replication origin
cggacccaggccctgcccactccccctacctctgcactcacttctggaaacagtgtgcggctgacagcacccactgcggatgcaccaggacgcccgagcagaacaattcgttttccatgaccagtgccgcctgccagggctgcgagtgcgggctgcagtcctcgccgtttatgatttggctgcagctaccagagacgagcgatcctgagggcggagtcagggatgggatcgggaccaggaggcgggcccagggttcctgggggtgggcttaccgagcaggggcgtggtcagaggttcaggagcagtcagggctcctcggggcggagtcagggctgggaacgggctcaggaggcgggcccagggctcttgggggaggggttaccgagcaggggcgtggtcagggcttcaggagcagtcaggactcttggggggccgagtcagggctgggggcgggcccagggggcggacccagggctcctgggggtggggttatggtgcaggggtcatgatcggagcttcaggggctggtccaggatataggcctagggctcccaggggcggtgatcacggtgcaggagcctggtcagggattcagggtagtcagggctcctgggaggagagtcagggcatgggggtgggctgagaaggcgggatcagtgctcctagggttggggttacagcgcaggggcgccatcaaggcttcaagagctgggttatggctagaggcagtctcagaaggtgggaccagggcttctggggcggagtcagggctctggggtgagctctggaggtgagactggtgccatcgcggtgcaaagccacggtcaggaggggttcaacagaggagtctaggctcatagcagtaggatcgggtccttcggggtgaattaaagctcagggggtggagttgttgctgggagcaaggatcgggtcacttgtctgcgcagactgatgctcaaagagtcggtcctgcgccgagtcactcctatcctctcccagccttgcccacagtcacaccaagccacaagcccatgcacaccaaaacaccgttttatagtcctgtgaggtgagttccttggggatgggagagggggatctcaggactgaagacccaggaagcaggcacagattcccagcaatggatcacgccccaggaagcacaatctcctgcaccctcggcttcccctgtccccatatcatcattacactgttgtcactccaccagatattcagaggcacaaactgtcagagtctcacaggtacaaccacacacccaggcacactgccacacacaaatttaccacgatacaaggagttgcaggggcacagccatgggggacggataacacggtaccgtctcacaggcagctttgcagtcacaagcaagaggacactgagtcacacctgaacattaacaaacactgtgcccccaagcac

SEQ ID NO: 37698 - DNA, 1148 bp, Artificial sequence
  DNA replication origin
agtgaccattatgccccatttcccaagtggattcaaagaggtaattcagggaaaggcacacagtgccaggcacattgtaggctctcggtgagcgggagaactaaaaagtcttcgctcagtgaaaagcagctgagtgcctaccacactccgagctctgcggcaggtgctggggccacaggaggaaccagcaaagtcctcgtcactggggatcgcgtcctacccgggggcacagaccataaaggaaaactgcagggaccagcatataaggtggtggtcggggagactcagagaaggggaacatttaagctgagatcccagggaagaggaggaggagggtcgccgcagcaggggcggttgcggggtgcaggggagaacttggctccagccagaggagggcagggcgggtaggagggcagggcgggtaggagcgcagaccgggaaccgggcgggcctgcaggagtttacgtaccaggattaaggagcttgggttttacttaagtgcaatggattttaagcacgaggatggagtgacataatcttatttactttttaaaaacttccagcttggagagtgatggtgggggcggggcggggggcagtggcaacagcccaggtgggaggtgacggggtcaagggagaagagaggtgaatggacacggggtcccctctgcatgtggagccaagttactgcccgatggatggaaagtggggggccaggagcagaggggccaaggatggcgtggaggcttggtctgctggcttgcgctctacggatcttgtggagacgcataggtgcgggaaggggggtggggggtgagagggtgccgtagaccgcggagggtgcacggaggggcaggccgaggtcaggactgccgagaaacagcggggactcatcaggggagaggtggtgtttacagccacgaggccgggtgagatcatccaaggagtgggtgggtgtagaccgcggagccggcgcgggtgagggatagtgcccgcaggtgaccgcgacgaggcaggaatgtctctgtgtctctctgtctctcctgggtctctaacactctttccttctccttccttacttctttcccccacagcccaccccgtgtgtctgtctctctttctctctggctctcttttcctctgcctct

SEQ ID NO: 37699 - DNA, 1878 bp, Artificial sequence
  DNA replication origin
aaaataaacacacaagacgggcgcggtggctctcgcctgtaatcccagcactttgggaggccaaggtgggcggatcacctgaagtcaggagtttgagaccagcctagccaacatggtgaaaccccatctctactaaaaatacaaaaattagccagaattggtggcaggcacctataatcccagttactggggaggctgaggcaggagaatcgcttgaacccggggggcggaggttgcagtgagcagagatcgcaccactctactccagcctgggtaacacagtgagactccatctcaaagaaacaaacaaacaaacaaaaaagaaaaaaaaagaaaaagaaacacataataatacgtgtatacattgtaccaaattctctaaaggagcatgtaggatgctataagatgaaaaaacaaataggggagtgaagaccctgaatcagactaggggagggctcagggaagggctctgaagaagtaacacttgagttgagacacaatgaagagagcgaagggagaagtgttggaagcgcatggaaaacaaagacagagcaacatgagagaagacaggaggaaagtggagacagagaaagatagacagagacaaaggtgcagagccacagacagagagacagagacagagatgggaggagagagacacagagaaagatggacagagacaggtgcggagacacagacagagagacagagacagagatgggaggagagagacacagagaaagatggacagacacacaggtgcggagacacagacagagagacagagacagagatgggaggagagagagacacagagaaagatggacagagacatgtgcgaagccacagacagagagacagagacagagatgggaggagagagagagacacagagaaagatggacagagacacaggtgcggagacacagacagagagacagagacagagatgggaggagagagacacagagaaagatggacagacacacaggtgcggagacacagacagagagacagagacagagatgggaggagagagacacagagaaagatggacagacacaggtgcagagacagacagagagacagagacagagatgggaggagagagacacagagaaagatggacagacaggtgcggagacagacagagagacagagacagagatgggaggagagagagacagagaaagatggacagacacacaggtgcggagacacagacagagagacagagacagagatgggaggagagagagacacagagaaagatggacagagacaggtgcgaagccacagacagagagacagagacagagatgggaggagagagagacacagagaaagatggacagagacacaggtgcggagacacagacagagagacagagacagagatgggaggagagagagacacagagaaagatggacagacacacaggtgcggagacacagacagagagacagagacagagatgggaggagagagacacagagaaagatggacagacacaggtgcagagacagacagagagacagagacagagatgggaggagagagacacagagaaagatggacagacaggtgcggagacagacagagagacagagacagagatgggaggagagagacacagagaaagatggacagagacaggtgcggagccacagacagagacagagatgggaggagagagacacagagaaagatggacagacacaggtgcagagacacagacagagagagaaggcaaggtgagacagagacaggaggaaagagagacacacaggggcagacagagacagacagagatcagagggtcacagacagaggtcagagggagagcgagagagaagggatcagagagagaaagggac

SEQ ID NO: 37700 - DNA, 1805 bp, Artificial sequence
  DNA replication origin
gcctgggcttgagaggtgccactcttattctccaggccctgcccctgccccctcagcatgtcagacacccaccctctagctggtctggcctcttgagtctgaaacccacccccagcccaagccccgcctctgagccccgcccaacccattttccgttcccagagcatgttctcgccaacaatgatgtttcctgtgaccacccctctaacaccgtgccctctgggagcaaccaggacctgggagctggggccggggaagacgcccggtcggatgacagcagcagccgcatcatcaatggatccgactgcgatatgcacacccagccgtggcaggccgcgctgttgctaaggcccaaccagctctactgcggggcggtgttggtgcatccacagtggctgctcacggccgcccactgcaggaagaagtgagtgggagttccaagaggagggttggtggggacggggaagtgggggtgggggtggggaagtgggggtgggggtgtcatggaggtgagggctggtggggacggggaagtggggttgggggtgtcatggaaggtgagggttggtggggatgggttggggatgtgggagcaggaggaggtcgagttggggataggactaaggatggagttttgcgggggagcaaggtgggaggatgaggttggagaggggagagtgttgtggtagggaatgggaaggagccaaggatgggttggatttggggttaggagcatatatttgttgaatggtttgggatggaggtggaattgggattggctttagaattgggggtgggtgaaaatcgggctggggtggaaatgaagatagcatggagatagggttgagattgggagcagatatagaatgaaggatggggattggagttttgggtggggttggagatggttggatttgggcttgagaatgcatatggtgatggcttctgggtagggaaagaattagggttgggaatgggatgggtttggaattgtgactgggatggggacaggcatgggattggagaccaagagggagttgaggatggtttggggaccgggggtggggatgggggtggggctggggctgggtgtggggttgggattggcgttggacgtggagatagagatcagggttggtggtgacctgccccatcttcctcagagttttcagagtccgtctcggccactactccctgtcaccagtttatgaatctgggcagcagatgttccagggggtcaaatccatcccccaccctggctactcccaccctggccactctaacgacctcatgctcatcaaactgaacagaagaattcgtcccactaaagatgtcagacccatcaacgtctcctctcattgtccctctgctgggacaaagtgcttggtgtctggctgggggacaaccaagagcccccaaggtgagtgtccaggttcttcttgataccgacccatctctgccgccttccatctttctccacttctcattgtgttcctgtttgacagtgcacttccctaaggtcctccagtgcttgaatatcagcgtgctaagtcagaaaaggtgcgaggatgcttacccgagacagatagatgacaccatgttctgcgccggtgacaaagcaggtagagactcctgccaggtgaggacacctctctttattcagcagatacacactgagtgccaactcggtaacatggagcgttgccaaattctgagaatccagcaattgccaagacagtcaggacccctgttctcacagagctcataccctagagtagtggtgtttagtagaaataatgctgagc

SEQ ID NO: 37701 - DNA, 1003 bp, Artificial sequence
  DNA replication origin
tgctcccacatccccaacccatccccaccaaccctcaccttccatgacacccccaaccccacttccccgtccccaccagccctcacctccatgacacccccacccccacttccccacccccacccccacttccccgtccccaccaaccctcctcttggaactcccactcacttcttcctgcagtgggcggccgtgagcagccactgtggatgcaccaacaccgccccgcagtagagctggttgggccttagcaacagcgcggcctgccacggctgggtgtgcatatcgcagtcggatccattgatgatgcggctgctgctgtcatccgaccgggcgtcttccccggccccagctcccaggtcctggttgctcccagagggcacggtgttagaggggtggtcacaggaaacatcattgttggcgagaacatgctctgggaacggaaaatgggttgggcggggctcagaggcggggcttgggctgggggtgggtttcagactcaagaggccagaccagctagagggtgggtgtctgacatgctgagggggcaggggcagggcctggagaataagagtggcacctctcaagcccaggctcaagctcaaggacagagcccaggctcaggtagggttactggactctaactggacctcacagattcctggaattggctagaactacatgtgagggtaaaattgggtacaggattcctggacaagctcaggggtagtgccaaagctgtgggggctggagcctggggatgggagggagaccagggctttagggatggaactggtctcaagaagtggggtcaggcctcagtgagtggggtcagggctggaggcaggaaggggtttggaattgacttagttagggccagggtcagggttacatgttagagtctcctataaagagctctgactttgggctgggggcggtggctcacgcctgtaaccccagcactctgggaggccgaggtgggcggatcacctgaggttgggag

SEQ ID NO: 37702 - DNA, 796 bp, Artificial sequence
  DNA replication origin
ggtgtgcgatcccgctaggctgcccgggagcgtgtgtacctggagacagagctgtatgttagctgcacctgtggaggcaacatgggcgtgtctgcagaactgcgtgcgtgcttggctgttactgctgttgtgcgcgtggttcttggggtgagttcgtgaatgatggtggtgccagggccatcagcaagggtaagaaccaggccgggcgcggtggctcacgcctgtaatcccagccctttgggaggccgaggcaggcggatcacctgaggtcgggagatcgaggccagcctgaccaacatggagaaccccgtctctactaaaaatacaaaaaattagctggtgtggtggcgcgtgcctgtaatcccagctactcgggagactggggcagaaaaatcgcttgaacccgggaggtggaggttgcggtgagccgagatcgcgccattgcactccagcctgggcaacaagagcgaaactccgtctcgaaagaaaaaaagaaaaaaaaaagggtaagaaccagtgaatgggcacgggaggactgatgatggagtggggcatgcatgtagtctgtaggtctgtgtgtgagaggaggagattgacaggattgagaaggcatgttttcatctgagaattcagaaacctaggcctgctcttcccctccatgtggccccctaagctgagcccttctttcctggtcctgctttcggaaccctagctccgcccatgagctctgaccccacctcctttcctcaaccacgcccctaggccagactctagtggaccccgcctaaggccacac

SEQ ID NO: 37703 - DNA, 1187 bp, Artificial sequence
  DNA replication origin
agaagtctgcggctgagctgggagcaaatcccccaccccctacctgggggacagggcaagtgagacctggtgagggtggctcagcaggcagggaaggagaggtgtctgtgcgtcctgcacccacatctttctctgtcccctccttgccctgtctggaggctgctagactcctatcttctgaattctatagtgcctgggtctcagcgcagtgccgatggtggcccgtccttgtggttcctctctacctggggaaataaggtaggggagggaggggaagtgggttaagggctccccggatcgcctgggcctcccaaccctctgacattccccatccaggtgcagcggccatggctacagcaagacccccctggatgtgggtgctctgtgctctgatcacagccttgcttctgggggtcacaggtaaccagaactctggggtgggagggttgtgggattgggaggactgtctctgcggcactagagcgcctgtcccctggggaactgtgtgagcctgggcatgactccgggaccgggtgaatgtgagtctctgtctgtacttgtggttgtgcgatcgtatgtggccctgtgactgccacggtgtgtgtcggggagggggatgccttttcccatatcaggtgactgtgcggcaggtggcactgaccctttgaggctgtgtgtgtggttttgtgattgtgtgtgcatttaagattgtgtgtggctccacagctgtgtgggtgaatgcatgtagcactgggggtgttcactgtgtgtttggctgtgtgtggtgacttggcattgtatatgactgcaggtatctgcagttcctgtccctgaggtcccgggattgcgtgcaacaaaagtggtcatcaccatggaaagctgtgactgtgtgctgcttgcaggcgattatgtgattgtggctgagtgtgacgttatggatgcccgtatttgtgaccgtgtgactacctgaagctctgtgtaggggtgactgtatgtgactgtgtgtgtctgtgtgaggccgtgtaaatgctactgtatgtgtgatggtgcagctgtgtgtctggagtttctgtctctgcctggagggatagagggtgcaggggtagctatctctgggagatgggtgccaggtgactgacttgcagtgtgtgcctgtgtgcagaagagtatgtggcagtctgaacatc

SEQ ID NO: 37704 - DNA, 1090 bp, Artificial sequence
  DNA replication origin
gaggaaaaatcaaattggctgtaaaggagaactgagaatatctagatttcagaaaggtggacgtcaaatcaaagcaaaaagccccactcataataaaattcattctttattgagtgcatggtggcccaggtgctattccatgtatgtcataggtgtgaaaccttaaatctttccaacagccactgccttatggagactgtatcatccttatcttcatcttacaggtgagaaatctgcagtgaagaaaggtacatcccaaggggacaccgacagtaagcagcggagctgggattccagacacgtggctgggcctctgcaggaagaaatcaaacgtgtggaagggttggggagaggagatgcctagaagggattttcctgtattctcttagtggtgggggtaagaccgaggacccaagtcctcactcatcacgtcctccccagtgatgcaaggatggagctggggtaaaaccagggagaatcaggaccctcacgtcgctgcgtttattaagcatcagggtcagagctgggcaggagaggaggggaggcaaggtctaggtgagagacgttctggaaccagccagtggggtggtaggtcgggaggtagatgtcacatgtcagggtcacttggcctgaatggttttttggatccagttcgtgtatctgcagacgttggtgtagactcctggcttctcctttgatccacaggggatgttaccccatgacacaaggcctcggaggtggtctccacataccagcggacccccagaatcaccctgcaggaaagagggagaaagtcagatacagatagaaacccagagactgtgtgtgtgtgtgtgtgtgtgtgtgtgtgtgtgtgtgtgtgtgtgacagagagagaggtagaaagggacagaggtacttactgaaagatggagagaaagactcagggacagagagacagagagagagacagtaagacacacaaaggcacagagagagaatggtagagagagaataaaggagactcaaagacacagagataggaatgccaagatgcagaggaacatagagagcaagaaagagaaacaatttaagaatggagactgagagg

SEQ ID NO: 37705 - DNA, 1673 bp, Artificial sequence
  DNA replication origin
caagagcagagcgtgggggcgggaggaatgtgtgtgggaggcctgggtaaggaggaaaagggtgtagccagtctcctggctcagggacctgagagacaggggttaaaaggacgttccagaagcatctggggacagaaccagcctcttccagggaggcctgggagctgggggtgtgtgtctggcagtccctgcagccctgggctctgcggcccctgcgtcctccgcttggctctgccactgcatctgagtgtcttctctcctcacggctccccgcatttctaactctttctgcctcctcgtctcaaagctgttccttcccccgactcaagaatccccggagcccggaggcctgcagcaggtgagatcacagacatcacagaacctgccgggtgggcggggtgggtggccattgcgcacagagccaggctccgaggaaaactcccatacagaggaagaacgctagggccccctagggtaaccctctcctgtcgacaggaaggcaaatcagtgcccaagaaagtagaaagatctaatcagaatctcaccatgggttactggaccagtggacgtagttctgaattctctttggcactgttttcgtgggatcctctgatggaagatgtgggctgaggaagaataaatcaggaggctagatgggaaggacagaggtcaaggcaggagaccatagcaggccaggaaggaaggagaggatgcagagggagcagacagagggatggggggagggtcgaggcagtgactaatggaccatgtggcttcccctctcaggagcggccatgaagaagctgatggtggtgctgagtctgattgctgcaggtggggaaagggcatttggatgggggaggcttgcagacagggttgggcttgttgatggagaagaggctggtattggggatggggatatgcacagggttggggtgggggagctttgaaatgaggaagacgttggggattaggctaagggtggggaatacagatagggagggtggtgggaggtgggtttgaagatatgagggtttggggtggggttggctttagggatggggatctaaacatagaagaggtaggaggtaggttggaaagttggagagagcccgggaataggggatacagttgggtttgtaatgggaatggggtaagtttgggagtggaaatacagagaagctttttttttttgagacagggtctcactctgtcacccaggctggagtgtagtggcatgatccatagttcactgcagacttgaactcttgggtctcaagtgaccctcccacctcagcctcccaagtagctgggactacaggcgtatgccaccataccctgctaatttgtgtgtgtgtgtgtgtgtgtgtgtgtgtgtgtgtgtgtggagatgaggtctcactgtgttaccgaggctggtctcaaactcctgggctcaagcgatcctcctgcctcagctgggattacaggcataagccactgcacctgaccaatcttgactggagttcatgttgagggggatgcgcttggtttctccagaactcctctctgactcagatcttctctccctcagcctgggcagaggagcagaataagttggtgcatggcggaccctgcgacaagacatctcacccctaccaagctgccctctacacctcgggccacttgctctg

SEQ ID NO: 37706 - DNA, 1377 bp, Artificial sequence
  DNA replication origin
gggggtctggactcctgggtctgaggaaggaggggctgggggggatctggactcctgggcctgagggaggaggggctggggggagtctggattcctgggtctgagggaggaggggctggcggcggggagcggtctgaactcctgggtctgagggaggaggggctggggggagtctggactcctgggtctgaggaaggaggggctgggggcggtctggactcctgggtctgagggaggaggggctggcgggggggggggtctgaactcctgggtctgagggaggaggggctgggggtagtctagactcctgggtctgagggaggaggggctgggggggagtctggactcctgggtctgagggaggaggggctgggggggagtctggattcctgggtctgagggaggaggggctggcaggggggtctgaactcctgggtctgagggaggaggggctggagggagtctggattcctgggtctgagggaggaggggctggtggggggggttctgaactcctgggtctgagggaggaggggctggggggagtctggattcctgggtctgagggaggaggggctcgtgggggcaggcctgcactcctgggtctgagggaggaggggctggggctggtctggactcctgggtctgagggaggaggggctggggggagtctggattcctgggtctgagggaggaggggctggggttctggactcctgggtctgagggaggaggggctggggggagtctggattcctgggtctgagggaggaggggctggggggtctggactcctgggtctgagggaggaggggctgggggcctggactcctgcgttttctgtgttagcctcctatatgggagaatcagaattagcggctgcagaatttctgcaatatgacagggctgtggtgcctgggttaggagagactcagagggagatgagataaggaggggaaggatctggaggatcttggtggggagggaattctgggagaaaaacaggaagaacaggtaggagggcgtgtcctgggctggagtggctcctcggtcagcagcgtctgaggtgtgaccacacagaggatctttgatgttagatggctggggctgtggccaggctctgagtcacagaggactcctccctcatcctacccgcttcccgaggttcctttccctcccttcttggggagcaggtgccaccatcttcctccggcactgtttgcttacttctggcagacccccgtgggacccctgtgtcctgtctactgtcatcccaatccctctgaaaaccgccagcctccctcctcacttgtcactcgtgagatgctcagaaacactttcacaccccttcccacgctgatgaagttggcctgttct

SEQ ID NO: 37707 - DNA, 1164 bp, Artificial sequence
  DNA replication origin
tcaagacaacagcaggaatgcattagactaagtttgagacccttctgagtgtggggctctgtgtccgtgcagagcttgcacattcatgaaactggccctcaccaggggagaaggggaacaccctattctctaggacagtcatctctctcccatctcctctatccctaacactcaccatcccacatcccctgacagctgaaggtgcagatgtgagcaaggaggatgggtgtggagagacagagagagttggaggtggagaagaaagagggaaaggagagagagacaaagagagatgaggaagagggaaagggtatggggagagagagagacagagagatgggggtggaaaagaaggagggagaagagagacagacaaagagatgagggagatggggagggtgtgggaagagaagagagagagagatgggggtggagaagaaagagggagaagagagagacaaagagaaagggggggaaggtgtggggagagagatggggtgggggtggggagaggagagagagactggaagagaggaggagaataaagagagagaaagaaagacagagatgggggagcggcagggagaggagagagatagaagaaagagaaagagagagacagtaaaaaggagggggcaaggagagatgagggagagagatgaagagagacagagaagtgggggagagagagaaagaggagagggccagagaggagacagagagagaggaaaaaagagagagcaggggggcagggagaggagagagggaggggaggagagagagagaagcaagagaaagagggagaagacagagagcagagaggagggcatggagagagaacaagggagggagagcaagctagctcaacacagagaaaaaacaaagaggaaaagaatgaaatgaaattatgtcacaaagagagatgtgggaagactgttcagaaacagaggggatgacaaaaggccagaaagagggaacagagaggaggtggagagaaagagtgttttccccgggaccagggccagggtcaggtgagtgagtcatcagcttcaggcacaaaatctcagtaactgcaatacacaatacttcaatgcagtacttaacgaaatcaaatgtaatacataaaactgcatgatgggcatggtatccacattttaaatgaag

SEQ ID NO: 37708 - DNA, 2543 bp, Artificial sequence
  DNA replication origin
gcaatacacaatacttcaatgcagtacttaacgaaatcaaatgtaatacataaaactgcatgatgggcatggtatccacattttaaatgaagacagtgccagtacagcgctgtgctgagccacgctagtacttacggcaagggaaaattcagtaagatccacctgctctttatttaaaatgtgacattttgtccatcatggacttctgcatgagtttttatttttatttttaaatattgcattatgatttatctcaatcactgaggtttttggtgcccccttaaggtttgggcctgaggccagcacctcagtctccttccctggtcccacccccactttctcacccctattaaactctctgtctcatccccagggccacattggcccctaagtaaactcccacccctgacctaggcagagaatgaggtggaaaaagctgaggaggccaggcctggggggagggcaaggccgggcttggtacccagtcactcgggtcaagctctgtccctggggcatgcagacagggtacccaggactggggaggaattgggggggagggtctcacattgcaggcgtttttcttggagtcggggatgccagcgcacagcatggaattttccagtaagtccttgtaaaccttcgtgcagtcctggggggagatgagcttgacatccacgcacatgaggtcagagggaaaggtcactgcagggaggagcagggagagctgtcagtcagagaggatgggggcgaggaccagaagggctgttgttcaggctcctggttccgagggaggagggtctggggcccaggactgctgggtctgagggaggaggggctggggtctggactcccgggtctgagggaggaggggctgggggcctggactcctgggtctgagggaggaggggctgaggcctggactcctgggtctgagggaggaggggctgggggcctggactcctgggtctgagggaggagggctggggcctgcactcctgggtcactgaggccacctaccatctgggctcgtggtagtgccccagccggagacagtacaggtggttccagggggttcgcagcgggagggcagcctgactttcttcaccatggatgacagcctggcctggctattgagcttcacgagcatgaggtcattaacatgggtctgtgtggagtagccggggtggcggaatgacttcgaggccttgatcctctgagctctcctgtcgcccagcgtatcactgcccaggtgcacggtgtactcactgcgaggagtgacattcacagattcagaagagacactgtgacagagagggtgtgcaaagacctgggggacggggtggggacagagacccagagagaggaggggggacagagacacagagagaggaggggagacagagacccagagagaggggaacagagatccagagagagagggggacagagccccagagagagggagacagagacccagagagggggggacagagacccagagagaggaggggggagagagacacagagataggaggggggacagagacacagagagaggaggggggagagagacacagagagaggagaggggacagagacccagagagaggggaacagagacccagagagagagggggacagagatccagagagagagggacagagacccagagagagagggacagagacccagagagaggggaacagagaccagagagagagggggacagagccccagagagaggaagacagagagccagggagagagggggacagagccccagggagagggggacagagatccagagagagaggagggggaacagagaccagagagagaggggaacagagacccagagagagagggacagagacccacagagagaggagggggaacagagaccagagagagagggtgacagagacccagagagagagggtgacagagacccagagagagagggacagagaccagagagagaggagggggaacagagaccagagagagagggggacagagacccagagagagagggacagagacccagaaagagaggagggggaacagagacccggagagagaaggggacagagacacagaggggaacagagatccagagagaaaggcagacagagacccagagagagggggacagagccccagggagagggggtacagaggcccagggagagggggacagagatccagagagagagggggacagagaccagagagagagggacagagacccagagagagaggagggggaacagagacctagagagaatgggggacagagacacagagagaggggaacagagatccagagagagggggacagagacccagagagagggagacagagagccagggagagagggggacagagccccagggagagggggtacagaggcccagagagaggaggacagagacccagagagaggagaatagagccgtaggcacagaaagactgcccttccacccccatagcgagctggagacgctggtgcacctccagcagagacttgggcggcaccta

SEQ ID NO: 37709 - DNA, 1251 bp, Artificial sequence
  DNA replication origin
gccttttagggaaaaacgaactacagagtcagaagtttgggttccacagggaagggcaagatcggagcctagattcctgggtctctagggatctgaagaacaggaattttgggtctgagggaggaggggctggggttctggactcctgggtctgagggaggagggcctgggggcctggactcctgggtctgagggaggaggggctgggggtctcgactcctgggtctgagggaggaggggctgggggcctggactcctgggtctgagggaggaggggctgggacctggactcctaggtctgagggaggaggagctggggcctggactcctgggtctgagggaggaggggctggggcctggactcctgggtctgagggaggaggggctggggcctggactcctgggtctgagggaggaggggctggggcctggactcctgggtctgagggaggaggggctggggcctggactcctgggtctgagggaggaggggctggggcctggactcctgggcctgagggaggagggactgagacctggactcctaggtctgagggaggagggactgggacctggactcctgggtctgagggaggaggagctgggggcctggactcctgggtctgagggaggaggggctggggcctggactcctgggtctgagggaggaggggttggggcctggactcctgagcctgagggaggagggacttggacctggactcctaggtctgagggaggaggagctgggggcctggactcctaggtctgagggaggcggggctgggggcctggactcctgggtctgagggaggaggggttggggcctggactcctgagcctgagggaggagggacttggacctggactcctaggtctgagggaggaggagctgggggcctggactcctaggtctgagggaggaggggctgggggcctggactcctgggtctgagggaggaaggtgctagggtctggactcttgggtatgagggaggaggaggttaggggtctggacttctgagtgtaaggaaggagaggccagagaaaggaatttctgggtctgagggaggaggggctggggttctggacccctaggtctgagggaggaggggctggggcctggacccctgggtctgagggaggaggggctggggcctggactcctgggtctgtggggggaggggctggggcctggacccctgggtctgagtggggaggggctgggcctgaatgctttctccttctcag

SEQ ID NO: 37710 - DNA, 1197 bp, Artificial sequence
  DNA replication origin
tctctggaataaacctttgccaccacttcctgcatttcagcttcagtacaggcagagaatggggataggtgggggaatgaggtgagaggggagatgtttagaggtgtggagggcggcagaggtttgaacagtgcagacaaggggagagttcagccgactggggaggaagaggatggacgatggagcctctgggcatctggatcagcaggagcataacatctggatcagctggagcgtagcatctggatcagttggagcgtatgactttattgatccaggacatgtatttgcagatctgggtgtagacagctggatgctgggcagagccacaggggtaaacaccccacgagaggatgccttggagggtctcgtcacagaccagggggcctccagagtcactctgggggtggcaggaaggagagatcaaataaatgtgccaacgtgagagctgtcactttgggatctggggcagtggtggggaaggaaggagttgggttgggataaagacgaggatgggatggggttggaattaggtatgagctggaaggtaggaatggaggtggacttcaggttatgggaggttgggctgggggatgagaatgaaggcacagtgagactggggttgggattgtagttcatggaaggtgaggggatgaaaatgggcttggagatgggaatggggtggggttgggatggaaatgggattgaggatagggatgaggagggggttaggtctgggtaagagttggggtcaaggatgggtttgggaatggagttggggatcgggcacagggtctgctcttttcccataacctccctgtcctccctcccaggagtcagagactctccctgttcagaccctacctggcaagggtcctggccccggtccagtccagcacatatcatgttgttggtgaccacgccagggtagaagacctcacactctttagggctcaggatagtgatgctggagcaggtcaggcccttgttgtacttcactgaagggagaatatgccagtaatccctgggtccagcccccaatccttggggagccaggagtccagatacaagaccgtttctatcctaagccccagcccctcctccttcagactcaagaatcctggccccagcccctccccacttagacccaggagtccaggcccccagcccctcctcccctcagactcacagacccag

SEQ ID NO: 37711 - DNA, 1147 bp, Artificial sequence
  DNA replication origin
tctctgtggtaatacccaacccttcctccttcaacggggactcacgaagtgaaccttttcctttagttctaaattcctgaccacaccggaccctggcttctatccgttgcaggcaaccacctcctcctagagctcaaggagaatcagcgggagaggagtgacgggcccagaaatgcggaaaaggaccacaccgccccctggcggccacagcgcaagcccggtctctcctcctgctggaaggacaccggggaccgcacctccagctgtgggagttccgagagaccccgccctgcccgctcctccctggaggccgcctccacagccccccgtggcgtcctcggggatggatctcctcctacttgtttccgcagtgcgcggccgtcagcacccaactctggtccaccaggacacccgcgcagtggaacgagaggccgttgaagagcgagacctgccagggctgcgagccgcgcgcgcacggggagccataggcttcggggtccaagcgcgtgtcgttttgggggagcagcgccgcctctgcggctggagaaagaaaggggacggaatcaaagcacggagggcagggtctgggtttggggttggagctgggctgtggcactggactgcgttcggggacgggggacgcagccagaacgcgagggtggtagggaaatattgggggtttcgcgtgcaccgaagggaatgggaggagaagaagcgcgtgaaagtggaaggaagctgggatagggtagcgtggagtaatgagacagaatagggtgggtctggagggcagggactgaacgcagcgcgcctggagagctggctagaacgtcgctggtcgatagaggggcggggattgaacgcggcggggaggtaagggtgcggggatagaactcggggatcggggagaggaaggggtgtgaataacaaaacgggattgaaaaccaggagaggggtggggcgcagtggtttacgcctgtaatcccagcactttgggaagccgaggcggttggaccgcttgagctcgggaattcaagaccagcccgggcaacacagcaagacccagtctctacaaaaacaaacaaacaacaacaacaacaacaaaaaagtagtcgcggaggcatgcgcctgtagtcacagctacctggga

SEQ ID NO: 37712 - DNA, 692 bp, Artificial sequence
  DNA replication origin
ccagcatccagggcaacccagagggacaccagaccagggcccagaccacccactctctttctctcctccccacccccatttctgggagtcctcctggtctaccacctctccttcctgagccccttcttttgctctcaccccctccagggcttgtagggggagagaccaggatcatcaaggggttcgagtgcaagcctcactcccagccctggcaggcagccctgttcgagaagacgcggctactctgtggggcgacgctcatcgcccccagatggctcctgacagcagcccactgcctcaagccgtgggtgcgggggctggggcggtgccggggtggggggctgggaatggggagatggatggagagaagctcagggataggggtgctggtaaggggattagagatggggatgggtagtgtcagcaaggttgatgggctcgagttggtattgaaggtggggggatgaatggggttgggatggggctatggctgggaagggggcttcggtgggagacgtggaagaggttggaagcagagcgatgtttcttcatcctcaaaggtgtcactcacctctcccacccatgtctcccccgacctttcctcctccaactactgtctctcccacctcagccgctacatagttcacctggggcagcacaacctccagaaggaggagggctgtgagcagacc

SEQ ID NO: 37713 - DNA, 1115 bp, Artificial sequence
  DNA replication origin
tgcggctgcgcctgcccgtccgcgtaaccagcagcgttcaacccctgcccctgcccaatgactgtgcaaccgctggcaccgagtgccacgtctcaggctggggcatcaccaaccacccacggagtaaggggcccagggccaggggtcaggggtcaggatgggtacaagtctgggatgcagggcgagaggtcgaatcatgacacctcagaggaaggatgggtaaagggtcagggtgtgggatgggacatcaggatcatggtttggggtcagagattatggtggattggggtcttgggagccaaaggggttaaaggactgggtatgaagtcagggatcagaggtcagaggtcagagtgtgtcagaggtcatcacactggagcaaaaggcatatatatatatatatgtatgtataggatatgggcattgtgggtcatgggtctggggttagaggtcaccgtagaattaaggtcatgggatccagaggttgtacaatctggtcaaaatctgaggatggaaattgggattctatccaaaatcacatatctgagattggaggtcatagcgtttggggtgtggggcccgaagtttggggtcatggaggctggggcccaataaactaggatcaggggacactggcgttggaagcagtgaggtttggaagatgcagagctgaggttggaggttaaggtaaagacagggacatggggtcaggagacagaagatatgagatcaagctgggatcataaggtaataagacagaaggtcaaagatcacagtagctggcattgaagagggtcaggtctggattcgttgtctctgacgctggagagacaagaaagttcttgagttatgccactcaaagtcaaatgtcaaagatcaaagagaccgtcaatcatctggggtcatgattcatatgaaattaagtcataaatatgtaacttggaggtttcgggattgtagtacaggtcggtgaggggcaggggtattgacatggatgggccacatccagggaagagggacgtggcctcaaagtggggagatttaggggaccctgcagcacgcatgttctctctccagacccattcccggatctgctccagtgcctcaacctctcc

SEQ ID NO: 37714 - DNA, 983 bp, Artificial sequence
  DNA replication origin
atagggaggtgggaatctgatagaacacggccatctgggggctgactgcctattaagaattatgcatggggttggagaagaggttagaaaactgggtgcagaatgggttgaagttagggatgggcatggaactcagcggggtagggggaaggaaatgggctttccccttacccttttttgggtcctgaggcctgaaagttcacagtgggttcaactctgccttgggcggggtcagacctaggtcccagcacgtcctggaagctccgccccaagcagagggccaagcccaggtcgggggtgcctggagacatcccgctgagccactgggggtggagagggggaggccagggaccaggaaatgctgagtgagctgggggagggagttcaggggttaaaagccatggttcggggctgaagttctagacagctggcggctgacgctcctcgtgggcccctcactcaggtagggtctgcctggggcgggggcggggagcggaggagggcagggaggggagagaagaggggataggaaggatggggaaagcagaagggcagctgagtcagggagagggagagtgaagctagagtctcagatctagagagaaacctgcagagacggagagaggcgaagggcgcggacagataagaacttgggctaataccaagcgtgtggacagacccagaggggtagaatggaaggcagactctggaggaaaagggcgagagtgcaccgaccacccagctcgccagagggcaggggaggagggacggcttcctggggtgaggggctgcacgccggagccccaggaggttgcacactgttcctcccacctcgccactgcacccccaccaaggatggaattggaggcggggggcagattccagggtcagggctgtcaagagtgaatgaggcgaggagacattcaggagcagagaggtttcagacgcggaggttccgggcacgccctcaacacccccttcac

SEQ ID NO: 37715 - DNA, 828 bp, Artificial sequence
  DNA replication origin
ctcgccccatccatctctattctttatcctcattgtgacacctccactctctcactctttccaaacttcatctggtccacgtccctggctttcttccaaattctgaccccacctcagtccttaatccctaatcctgtcccctccaccccctaggattaactcagggctccacccagtcatagttcctggagacacctactcattctcaaaacaccaccccttcctccttcctctcccccacccccaatccacgtcttcaaagctttccggctcctgctttttcctctccacctaggtccccgtggactccctcaccccctctggccctgctcctaaaaggccatttctggaaaatgttgctttctcaggtcgcatctctgcccccatccaagtccgagggagctgattttctatccacccagctgatgatttccttcttgtgtccggtggttggcgggagcagggaggcaggatgatgggataattgtgggtgtccttgtgtctttcaaaagaaaaagggttgagatgagactgggaattggaacctggatgtgttgagagctaaacctgagatgaggttggagatgggactggggttgaggaacaggctggagtacttggtatggttagggatggatagggaggtgggaatctgatagaacacggccatctgggggctgactgcctattaagaattatgcatggggttggagaagaggttagaaaactgggtgcagaatgggttgaagttagggatgggcatggaactcagcggggtagggggaaggaaatgggctttccccttacccttttttgggtcctgaggcc

SEQ ID NO: 37716 - DNA, 935 bp, Artificial sequence
  DNA replication origin
aggaggggctgggcctggactcctgggtctgagggaggagggggctgaggcctggactcctgggtctcaaggaggaggagctgggcctggactcatacgtctgagggaggaggggctggagcctggactcctgggtctcaaggaggaggggctgggcctggacttctgggtctgagggaggaggggctggggacctggactcccgggtctgagggaggagggactgggggtctggactcctgggtctgagggaggaggggctgggggcctggactcctgggtctgagggaggaggtgctggggctggactcctgggtcggaaggaggaggggctgggggcctggacccttgggtcttatgggagggtagacccagttataaccctgcagtgtcccccagccaggtaccccgcctctctgcaatgcgtgaacatcaacatctccccggatgaggtgtgccagaaggcctatcctagaaccatcacgcctggcatggtctgtgcaggagttccccagggcgggaaggactcttgtcaggtaaggcccaggatgggagctgtggtagggattatttgggactgggatttaagcaaatgatgtcaggagcatggaagtctgcagaggtcttcagaagagagtgaaccgcaggcacagagagattccgatagccaggccaccctgcttcctagccctgtgccccctgggtaatggactcagagcattcatgcctcagtttcctcatctgtcaggtgggagtaaccctcttagggtagttggtggaatgggatgaggcaggttggggaaagatcgcagagtggcctctgctcatatgggtctgggaaaggctgtgctgaggcttctagaaatcttaatgcatccttgagggaggcagagatggggaaatagaaaaagagagacacacaaatgttctacagt

SEQ ID NO: 37717 - DNA, 1343 bp, Artificial sequence
  DNA replication origin
cagacaggggagggaggggatgggatcagggagtcctggaatgggaactaggcaataaaaaaaaaaaaatgtcagaagcagggcggcgggaggtgggggcagggccagctgtccttaccagggataaaaggctttgccagtgtgactaggaagagagacacctcccctccttccttcatcaagacatcaaggagggacctgtgccctgctccacatcctcccacctgccgcccgcagagcctgcaggccccgcccccctcgtctctggtccctacctctctgctgtgtcttcatgtccctgagggtcttgggctctgggtaagtgccccttgctgtctctgcctctcagcccccggttctgttgaaggttccttctctctcactttttctctgcatttgacaggacctggccctcagcccctaaaatgttcctcctgctgacagcacttcaagtcctggctataggtaagagaacggttgggtatgacacaagggggtcccctggagactctgagaagagatggggatgggtccttggggcccctggatgctcatggtgacctcataagaaagagcagggagtggtttgggggtcatggtgggggaacgtgctggaggcctaaattcctagttgtggaggtgctagggaattgtggggccggggagagaggtgtttataaggtctggtgcaaaatacataaggaatcttagggaactattaggtcctgagtgggtcatagcagaaagatcacggggctctacctgactgtgttaggaaagaaacaatgtcagaaagatgttttgttgtcagagggaaggtggagaaggatgatgggatggcgggatcgtggcatggggtggcgggatcgtggcatgggtgtgtgaggtggatgggggcaagtgtggggcaagagatggcggatccttggggtcccactgagtgggaacgttggggaggagacagggaggtccttgaatgtgttggggaaggactcattggggggaaatgtggcatatttcgagaagtgatcacagaaattatgggagcatagagctaagggtcgtagatgtagcaaggccctggataaggtggccacggcacaaaataagagatgctacggaggtgacttgggaggtgagtcagaaagctctccgtgctggggcaataacggggtcaatattgggcatgtctcaccctgggtgggacagatagaggcgggcagtttaggggttagaccaaaaggaaggggatttgtcagttttggaatcctacaaacttgtggagtggagagtgtttgctcatctactttccccacccaatcctgtccactcctagccatgac

SEQ ID NO: 37718 - DNA, 2051 bp, Artificial sequence
  DNA replication origin
ggctgagggccaggtcctgtcaaatgcagagaaaaagtgagagagaaggaaccttcaacagaaccgggggctgagaggcagagacagcaaggggcacttacccagagcccaagaccctcagggacatgaagacacagcagagaggtagggaccagagacgaggggggcggggcctgcaggctctgcgggcggcaggtgggaggatgtggagcagggcacaggtccctccttgatgtcttgatgaaggaaggaggggaggtgtctctcttcctagtcacactggcaaagccttttatccctggtaaggacagctggccctgcccccacctcccgccgccctgcttctgacatttttttttttttattgcctagttcccattccaggactccctgatcccatcccctccctcccctgtctggccaaaaaagcagccacaattgttcatgagaacccgcccagggaagatgctataatctagaaggaatcctgggaggggaccccagggcagggtgggcaggggagggttcccagttgctggaggtggtggatctagtggtggagtcaggaaaccagggtggggagtgtcagaggaaagggcacgaaggggctgagagagggaggaagagatggactgagagagggagtcacgggaggagggagagagggagagagagagagagagagagagagacagagagagatggagagagagaaagacagagagacacacagacagagagagacagagacagggtgacgggggggagagagagagagagatggagagagagacagagagagagccagacagagagacacagagagagagagagaaagagagagacagagacagagtgacagagagggggagagcaagagacagagagagactgggaaaatgaatgagaagatatgacagtggagagagaggagtccaggaatacgagcacagaggcaggtgtgctcatgagagaaggaactgaggagagagctggagaaaccggtggaagttggatgtgacagggaacagaagaggcagacggtgggaaaaaaacaagacagaggaagagggagacacagagacgcagggagagaggggtgtggagaagtggagatagaaaagcaaaagacggagggaagaaggtggagatagaatggaaacagacacacagaaagagaaaacagtggagagagaggagagaggccgagacgcccccaccatgcggcactcaccacaaacacacacagaacaacagcgatgatgatgaaggcagtgcgggcatgagacgtggaagagaacgggacatggtgggagaaagaggatgggacaggcaggccgatggcagaggggagacgggaaggatgggcacctacaggggatggggacaatgacagaggagacggaggcctagatgagagatggcagcgccagggagagatggagaggaggggtgggatagaggacgggcaggaggtgggcgggagatacctggacctggagcagagctgcccaccttgctttctcactttcgactcctgagagatgggggagcagaggccccagcagggagcaggaaggttggtgccagaactggcattccccagcttgggatctgctaggtgcagagacaaagtgagagctggagatgcaaagagagagtgacagagacccagagagggggacagagacccagagggagagggagagagacccagaaagagaaggggacagagattcagagacagaaggacagtcttaacagacggggttggaaattcaaaataggagacggcagagagcaggagagacagagtgaatgagatggggaaggattctggccagcctgcaggggggttctggagttgggggggttccatcctcatttgggggagggcctaccctcctcagcccctcccctagccccttaaattccccagtgcttgtgtccgtctctgggcctgggcagccccgtacctggaccacgtggtgactcaggaggctgcttgcctcccttggctaccccaactgttccccggcctcagcctgact

SEQ ID NO: 37719 - DNA, 782 bp, Artificial sequence
  DNA replication origin
aagtcgaggctggtccgtcctgtggcttgtttcttccagggagacgtcagtcggctcatctcaaggggccttggtgggtggggttgggaaggctgagggtggtggtgaaggggcccaggtgacgctgaggatcacatgttttaaggggcaccctctcagcagttggcggattttttttttcctccaacttcctggatgtagacaaagagaaggcgcctgcaggactgggtgatggtgggagggatgctgggactggggagctgagggtcgccagggcagaggggactctggggttgcccttgaactcctgggctcaagtgatcctcctcccgcctcagcctctcaaagtgctgggattacaggtgtgagccagtgcacccggccaaaaggaatcatattatatttgtcctcttgtgaccggcttatttcactcaacctaaagttctcagggggtggagacaaggggtgttggtggggaggctgcctgaggagggtcagacgtctttgaggtggaagaacaggaatggcgcagacaaccatgcacagaggcaggggaagctgtggtcagggagtgggaatgtgggattttgtggtttcagaggtggagctcttccagatagagatagaggctgggtgtgactgtgggaacgacggcgggggaggtggtctctggccacgtggaggtagtgggatgcagaagctggggtgtcctatctttggaagctggggggtcctctctcctgaagctccccactccatgtgtcagccagtacccgtctctc

SEQ ID NO: 37720 - DNA, 1267 bp, Artificial sequence
  DNA replication origin
gccgcgctgccgcccgctgcagttcgcctcgcagaaggaggtggtgctgtacgcgcacttccgccgcctcgactacttctccgaggagtgcgtctacgcgcccgaggccttccgcggccacgcccgggacctgctcaagcgcctggaggcggcgcggccgtccgcggtgctggacctcgtgcactcggccgagcgcctggcgctggccccggccgcgcggcccccgcgccccggcgcctgctcccgctgtggggcgctggccagccgcgcgctctgccaggcctgcgcgctcctggacggcctgaaccgcggccggccccgcctggccatcggcaagggccgccggggtctggacgaggaggcgacgccggggacgcccggggatccggcccggccccccgcctccaaggccgtccccaccttctagcgacttcgggcctcccgccgggatctgatgccgcggggtgggggctgcctgtaaatgacactgtgaataaacccgttaccttacctggccttccatgtggggttgggaaggagacgggggcccattcacctgaaaccctgaagaagctgggaccccagacttcgaggtctcagggaagaagggtctcgaactgggcttcaggctctgagggaggagggggctgggggaccatcctaggtctgagagaggagagggccaggactaagcctagaagaagtgggactggggaccccaggcatctgtggctgaggaaggagggcctggggtcgtggactcctgggtctcagggaggagggggctgaacaccgtgtgattcttgagcgagtggggattggttggggacctcctgcccagggcctctgctggttctgggtgcgctcagcatggtcctgaccctccttgagcatcagattcctgatgtttcctgtttgcccgcagtggggtaagcggagcgtgacttgatggacacacgccattcacagccgccgtcacgatgcctcccttccagcgcttcgtgtgtagcacgcactgcaccctcatttcgtctccaccacggtctcactggctgtagcctgaagtggtaaatggccctaagacacccagtcggaaggggtcacaccgagggctccctccaaagctctcgaatatcacaggtcgtggaattggtcctcccccacccatcccctctcgaatctctcctggtatctctgtcacgggtgaggaggggttggatgcgttccccaaaccttggactctggaggcagggttgtgtgagcctgt

SEQ ID NO: 37721 - DNA, 1819 bp, Artificial sequence
  DNA replication origin
cggcggcccttgccgatggccaggcggggccggccgcggttcaggccgtccaggagcgcgcaggcctggcagagcgcgcggctggccagcgccccacagcgggagcaggcgccggggcgcgggggccgcgcggccggggccagcgccaggcgctcggccgagtgcacgaggtccagcaccgcggacggccgcgccgcctccaggcgcttgagcaggtcccgggcgtggccgcggaaggcctcgggcgcgtagacgcactcctcggagaagtagtcgaggcggcggaagtgcgcgtacagcaccacctccttctgcgaggcgaactgcagcgggcggcagcgcggcagggcgcccccctcgccgggagagcccaggcccccgccccgggccagccgccccgcgtcgccccgtaggaagttcatgagcacggtctccgccatgtcgtcggcgttgtgacctggtggggagagaagggagcgggtgaggtggggcgcggagggcgctgctggccagggagccccccggggaaccaagggtccaccaggacccagagagagactgggaggagagacccacggagacccagggcacagtggggccgccaggacccagagagagacggcgacggggagagcaagccatggagacagacccccaaacatggtgtgacagccaggatccagagacagggagggggagagagagccatggagacccctagggcactgtgggcaaccaggacgcagagagagacggggagggcaagagcgagccatggagaccctccgggaaccgtgaagcagccaggtgcaggctgcaggtggacacaacaaaaaatcaaagagaaacataagctcccctggcgcaacttgggcgtgccttcatgtaccacccgcctactgcatagcggaccttatgctagttgccctttcatatagggagtaaaagtgcattatgctgctaataaccttatcagcctcagttaaaaccgtaattcaaactgtacacaaaaatcagaaggcatttaaggcatttaaccgagattctcaggagagctggaggggtaggcaggctgctgtctcccccaccgcctagggaatccatggcctaattctgggaacctgttaatatgtttggttgtaggacaaaggggaattaaggttgcaagttgaattggggctgctaatcagctgactttacaatagggacagaatggtgcgttatccaggtgcgctcaaggtaatcacaaagacccttagaggggaggagggaggcagaaaagggagagatagggccatggagacctttgaacatagtgggcagccaggacccagagagagatggggaggggaagcctgagccatggagcccctctggcaccataggacagccaggacccagagaccgggagagggagatggggccatggagccccctgggcactgtggtgcagctaggtggtggctggaggtggacacagcaggaattgagaggggaacacacacaagctccctggggaacttggggatacctcatttgccacccgcctactgcatatggggggtgtgagggcagaggcaaggttagagtgatgcaaacggtgtaggactcaaactgccatccttggctttgaaaatggaggaagagccgggcacagtggctcatgcctgtaatcccagcactttgggaggctaaggtgggagaatcacctgaggccacgagtttgagaccagcctggccaacatggcaaaacccccatctctactaaaaatacaaaaattagcaggtcatggtggcaggcacctgtaaccccagctga

SEQ ID NO: 37722 - DNA, 967 bp, Artificial sequence
  DNA replication origin
gccctccgccgtccgctctcgggccaagcgctgtgcggtgcctgcttctgcgccgccttcgaggccgaggtgctgcacacggtgctcgccggccgcctgctgccgcccggcgcggtggtggccgtgggcgcctcgggcggcaaggactccacggtgctggcgcacgtgctgcgcgcgctggcgccgcgcctgggcatctcactgcagctcgtggccgtcgatgagggcatcggtggctaccgggacgcggcgttggcggccgtgcggcgccaggcggcgcgctgggagctgccgctcacggtcgtggcctacgaagacctctttgggggctggacgatggacgccgtggcccgcagcacagccggctccggccgcagccgctcctgctgcaccttctgtggagtgctgcggcgccgggcgctggaggaaggggcgcgccgcgtgggagccacgcacatcgtgacaggtgagcgtagtacgggccgcagagcggcactctccgaggcagtggggcgaatgcacaggcgaggaggcgggacctgaaaggggattcaggcgcatgctccagaaggcggcgaggagaccctggtggcttaatgggaggatccctgtacggaggtgcggaagggcgcatgctgcagtttggggctggggccctttaaaggttcaagacgctggggagacagaggggccaggcagtgatcacaaaggtttttgggtcttggccaccgtcttggtctccacagattgccaaaggggtgggaggtgaaaatctctggagatctctggtcctttacttatttttaaatgtttctaacatgcttgatctcttatggtccacctttcagaatccagctctttctctaaaaagcatctccatctcttaattccttttcttggttggcctctcctctttgataactttttttttttttttttttttgagacagagtctcgctctgtctcc

SEQ ID NO: 37723 - DNA, 912 bp, Artificial sequence
  DNA replication origin
gccgtggagacggtcctaagtgtttggctgttttgaaactacattcaaacaggatttgctaaatttcatttaggtacctggagtttgaaaaggtccggacttggcattgcagtttggtgccacccactgggagcatgacaagtgcagtgagagaaagagcagtccagggtcctggaccccaaagctcctggcctgagcagctagaaggatggagctgccctgtactccaggagaagcacgctgggttagaagaatcaggaatttgggttttgagatgcctattagacatctgagtggtactggtctctgccctcatagaagttagagatggtaaatatatagtcacataaaataattccacacattgtggtaaatcctagaagcagcgtgacctgctctgaatggcaaggaggtgactacagtagtccaggctggaggtgatggtggcttggggaggagaactgagcctggggagtttttatgggttcaccaggcaggcaggaccaggatttgactggagggttggagtctaggctgggtggggaagaatgaagtaggaaagataacagatgaaggtcaaagatgggccgatccatgtcttggtgagagcacagaagcttgtggggcattctgataccagagcagggttgagttcaatcttggaggcccacccattttctcaccctcaaaatgtgtgcaaccccagctggtctcctgagaggtgtgatccaggctgcctgtgttccctggagaaggtgatcaccctgcctttcataggatgcaatcagaacccattcctggagaccgtatcccaccctacaaagtgcaatcagttggcctttcctgttttccacctcccgctgcacagagcttcagtcccctggcctccctctgcccttagagtcaaaaacc

SEQ ID NO: 37724 - DNA, 857 bp, Artificial sequence
  DNA replication origin
agaccagctcagtgaggcgggggagttgctgtcagtcacacagaccaggcccagggactgaccctccaggacaggaagcgaggtgccattgctcagggtcttcagggttgagtgaggaaaacagtgagagcggggagggtggagctgagaggctgtctctcccacaaccccacaaaaacagaaagaggagacacctgactgtgtgacacatactcacgaatgcaaatccaggagttcaaaaagctgaaagaccccgcagggaaagaggctgagctgagactagtgggggagttggtcatattaacaggtggctaagggcacctcaggtggaggggaaaaagcacaggccatgagacagccgggcagatgaagggccctgcaaatatgtgtggggtcttccagggggaaattggaggtgctgggacatgatcagctgaacagcttggactgagggttccagggaaccagagagggccctgagcagggaagaggcagtgtcagctctggatgcaggaaaatttttcagggcttgtgctgcgagggccacagcatggaggcgagaggctgcagaccgggatgttgggtgggaaatggagcaatcgtcaagaccgaaaagggcctggccatgcagatagaggggaggagacagggaatggagggaggaggaagggcatgatggcagacatttttggggaagtgaagtttacaggaacccctgactcatgcatggggtggttgaaaacaggaggcaactggaataagtcctgggtcctgactgggataactgaagagtcgggggtgggggatggaggcaccatgtccaagaagaggctcaaggggcagaaagtgggggagac

SEQ ID NO: 37725 - DNA, 1135 bp, Artificial sequence
  DNA replication origin
gtgggaaaacaaaggcgttgttgaagccactcggtctgtgttcctttctcaaggcggccctggcaagagagtccatggagtggtcgagaggattcgatgtgttcctgtgagcacagcccggtgtggaccgcggtggatgcagagccccacaggggtctgggacagcctgtaacatgggatgctcagaggatggaaggagaaaagggaagggaagggctcctcaccagaggaaacctgtgctgctgccgccctgtctctgacatctgcagggctgccccctccacccacactctccctccctccccaggaccgggcagggctctcagccgcagcccctcgctgcccctgcaccctgggcagttgcctcccatctatggggcggagccgcctgggcgtctgggctgggcgaggcggagcctggaggggcaccggccacgggcaggggagacagaggcgggcacagcctggcggggtccgggctgagccagcggggaggacggggctgtgggagcccagcggagagggtgaggatccgcgggcaggtgggacaggtgagctgggaggtgagagatgggcagggctgcctgaaaggcaagttcatcccagagcagcgagcagggcgcagccaaaggccgtgggggaaacagcggcgagaaaaaaacggccaaaattctgcccgcagtgcgcctgtatcctagcggggcggccacaaaaatattgttgagtagcaagaagtgtttcgaaagtgtgcagtgggtaaagtgtgagaaaataaagcagatttaatcaagaggaacggagtcctcagggctggctggagaggagcgtggtttcaagaacgcggtcaggaaaggactcgctgagaagaaatttggcgcccaaacgttcctggcaccgcccgcggctgctgattggctcaagcccgtaggattcctctgggcctgaaggtgcggggagggacttgcactttcagctcctgattggctgtgcgtcagctcccagaggcaagtgtccgtgggggaaagctccatctgcctcgcagatctgctgcgtaataggcacctgaagctgctgattggctactaaagaggcctgtgcagccactgattggctgtggggtagacgcacaacgtgc

SEQ ID NO: 37726 - DNA, 1166 bp, Artificial sequence
  DNA replication origin
tctctcaggaactgagggctcaagacttagaggaggccccacaggaagacaggggcgaggtcggaacagtgacctcctcagaggaggaacttcacaacccagacactgtcagggtccgcccttggagatcaatcatctacaatcccacatccactcctgggtccctgaactcagacagggtgagagactcacccagattccctccccatgccgagactgatctccacatcctgcctctctgtctcacccttgcctctgcagggtgaaactgggtccatctggccagacccccgagtctcctctgtggctatcactgtttgtggaggtcagacctgccaaaggtgagactcagggccatgagagacaggggtgcaagcggtgtgagcaggcagcctctcctccctccctcagcagctgcaaggtgggcaccccctttctgcacgacgagatcaacaaggcagagctggacgctgtccccaaggagtcactgtgcagtggggagacaatgaggctcctgacatctgagcttcccatgacaggagcttcagtgcagggctcaggcaggtggggtcgctctcccctaggttgagggttcagtctcaggaggactgagcagagggatgcggggctgtggaagattttgtgtgttgatacgtgccaaggacactgaggggagcccagcctgcaggaggccggggaaactgaggctgttgttcagtgaggcttggaaaggagggtcaggacagaaggcgtcaatttgaaaagggcagacacttctcccttcgttgtggttacctggacatcaggaggggtttcttcaccgctggcatctcattcagccacacttcccctggttagtccacagcaggcggcgtctgctggacccagggctttgctcctgcaagtgctgctcccaggagtccaggtgaacaggagccatggagcgaggaccccaggcctggggcgtacaccctcagtgctgggcaggattattttggagaagaaacgtgcacctgaattaaacagaagactatttttaactgtgtggctgcaggctgagagggagtggtgggggaccctgggaggtggagcctccttagacccatgtaagttttcttgaaacatttttttgggggaaacagaagacatatagataaaagtgaccc

SEQ ID NO: 37727 - DNA, 1125 bp, Artificial sequence
  DNA replication origin
gggaggaggggctgggggcctggactccagggtctgagggaggaggggctgggggcctggactccagggtctgagggaggagggactggggacctggactcctgggtctgagggaggaggggctgggggcctggactcctaggtctgagggaggaggaactggggacctggactcctgggcctgagggaggaggggctggggacctggactcctggctctgagggaggaggggctgggggcctggactccagggtctgagggaggaggagctgggggcctggactcctgggtctgagggaggaggggctgggggcctggactcctgggtctgagggacgaggggctgggggcctgggctccagggtctgagggaggaggggctgggggcctggactcctgggtctgagggaggaggggctgggggcctggactcctgggtctgagggaggaggggctgggggcctgggctccagggtctgagggaggaggggctgggggcctggactcctgggtctgagggaggaggggctgggggcctggactcctgggtctgagggaggaggggctgggggcctgggctccagggtctgagggaggaggggctgggggcctggactcctgggtctgagggaggaggggctgggggcctgggctccagggtctgagagaggaggggctgggcctggactcctgggtctgagggaggaggggctgggggcctggactcctgggctgagggaggaggggctgggggcctggactcctgggtctgagggaggaggggctgggggcctggactcctgggtctgagggaggaggggctgggggcctggactccagggtctgagggaggaggggctggggacctgggctcctgggtctgagagaggagggactggggctagtctcctaggtccatgggaggatgagattgggacttgaaggaggagggagctgggttttaggaagtatcccagactccgtgttctgcggatgtggtggaaagacgtggggacgcctggggcgggaggggtaggggccgggccgcagtaacaaaggcctctccctccaacaagcaacccccccttgaccccgcctccccggccccccacctctcctgattg

SEQ ID NO: 37728 - DNA, 1682 bp, Artificial sequence
  DNA replication origin
tcgcgcgccccggaccggccccccctttcccctccccctccgcgccgcctctgccgcgatgcccccccctgcgcccggggcccggctccggcttctcgccgccgccgccctggccggcttggccgtcatcagccgaggtaccgcagcgccgggggcggggggctcggccgggacgccagggtcttgggtgggtaatcgggggatcaggggtgggggtcgagggctgcatccctgggccggcgcggggaggccccgggacgccggggtctgggcccgggggtggggtctgcattccctggctgggcagggggacctcggacgtgggggtccgcgccccggggcaggggtcggcgtcctcgggccggagccgggtctaggggcggaggtctgcttccccgagcaggcaagagggtcgcagacacctagccctgcctgggggcaggagtctgcggctcctgttgaggagggggcagacactggactcggggtccccgggtcggatctccgaactgagttggggtggggggcaggggataatgccctgttaggggtcttcatctgtacgtggagagggtccctgaagaggtccttgccgggggctggggtagtcatctcgggacagaggtcaggggatggatgccttcccagggtcagtaagaggaggggacaagggtgtccacagacctagtcccagggtcaggaaaagaggggaagggtctgaaatcccccagcagggtcatctaggttgagagaaagtgttggtacttggggaggttgcagttatgtgggggagaagggagctggagatacaggaagttggggtgctgggctggggtcttggattcccaagctctgattgaatgtctaggttcgtggggctggacagtggaagagcgatgggcatgggaggatgaaggaaagacggaagggaagggttaaagcaggttgaagggttaaccccggcccggcccggccctcccagttggggagagggccaggggcaggtttctgcactgaggttagatagctggaccttgagtctccccagtagggcctggcaggcagggggtggtcaaggagattcctagatttccccctaagaaaagggaggagagtgcaaggaggcaggaggctggagggtgggcgctcaggagggcagggagctgggttaattcagactttctggaggattcccccaggccctcccctgaacaaagagttccagggacaaccaagaaccccgacagagtccccaagagtctcagagaggccgcccgcatagaccaagtctggcacagaaaccccgtcacagcgtcccacccgaagcagcacctgcagacaccagtcacacaaacacagccccatccacgcaggacgcagggacctggtgggccacagcctcagtcccttgctagtcctcccccgtctcccacctgaccagtctgaatcgccctctgactttctgaccacctgtctctgtctctgtcatgcatctctttaggtctttgtgtccctgccatttctggaggttcccatcccttcccatctctgttatccactgctgactttccacctgcctctgtctctgggtcattgtctctccatccctgctgctgacagcacagttccacatctgtctgtctctgcttttcagactgttgcccattgcatgactcagtctc

SEQ ID NO: 37729 - DNA, 1644 bp, Artificial sequence
  DNA replication origin
ggaacacgtggtatctgtcatcatgcctagtctcccccacgctctcaacccctccacccagccaggccccggccaagggctcaccgtggacaatgaggtagacctgagtggtgtacggctggtggcgggtctggaaggagcaggtgtagaggccctcgtcgccgagccccacctcggtgatgaggatggagaactcctcgggggtgttgatgagcagccgcacccgcgggtcgctggtccagcggtcattgccggcatacaggatgttggagcggttcagccaggccacgcgggtcacgtgctcgtcgatgaagcagctgcagggagaatgagtgggaaggtttttctccacccacccagcctgaggcttcccccaccgagggggtgggtgggagaaggaggccaccgcatctccaggtcccaccacagccctgtgaggcggatgctgctgtgcccaccatacagctgggggtaagttgagcctcagggagggaaagctgtgagcccaactgcagaacggaacaatagctcgtggttattgagtgatcgtgtgtgtcagagacacaaaaaggggagaacagagaatctgggagagaggaatagagatgcagaaggaaggagaaagagacctagagagagggacagagacccagagagagggacagagacccagagagagaaggacagagacacacacacacacagagggacagagacccagagagagagagagacacagagacccagagacagagggggacagagacccggagagagaaagagagagagagagagacccagagagagagctacagagacctagggagagggggatagagacccagaaagagaggggggcagagacccagagagaggggacagagactcacacacacacagatacagacacccagagagaaagagacaaagacccagagagagggggacagagacccagagacagaggggaacagaggcccagagagagagagacagagacccagagagagggggacagagacccagagacagagggagacagagacccagaggcagagggggcagagacccagagacagagtgggacagatacccagagaaagagagaggagaacagagacccagagagagagggacagagacacacagagagaggggtacagagacccagagagagaggggggcagagacccagagagagagagggaaagagacccagagggagactcagagagaaggggacagagatccagcagagagggacagagacacacacacagagaaggacagagacccagagacagatccagagagagggggacagagacccagagaaagaggggggacagagacccagaaacagagagagagagagagagcaagcgagagagagagagagagagaggcgtggagagaggggggaacagagaccagggtgaggagaggtggagacctggggaaacagcaaccctgtccctctctgctggatctctgtccccttctctctggatctctgtccccttctctctggatctctgtccccttctctctggatctctgtccccttctctctgggtctctgtccctctctctctctgggtctctgtccctctctctgtgtgtgtctctgccccctctctccac

SEQ ID NO: 37730 - DNA, 1513 bp, Artificial sequence
  DNA replication origin
tcgggggtccgccaccctttcgtgcccagtgccaggggggctcacagttgactgtgaccagcacgcggcggctgtcgggcgccgagttaaccccgttgtgagtcacgcactcatactccccggcctggccccgctggatgtcagagatctccaggatctctccctccgaggtgaagccgtctgtggggggaaggaggaggagggggcggggccggacacaaacacttaacacgggacaacacgggcacaacacggacacacatcagcggggcgggcacggcaaggcctggagtgcccgggtcaatgggggtggggtgggggaggggctgcagggccgggggcctgggatctctccagctgggggtgggggaaggagtgaggtctgggactcagttcctggaacccagtggggtgggttagagaatctaagggttcaggagatccctccaggaatctgactcagatcatggagctccgtggggaggaccccaatggggagggggatcccaggatgttaggtctcagaaggatctagcaaatacagaaccagtggggcagggtccctcgttctgggatctgattcatggggtctagggaatcaggatctggtgattgggatcagcaatccaagtatatgggggtctcataacacagcagcagtctcagaagaccctctgggacttagggcatccagagattcccagatgtcaagaccaggctcatggggctcagatgacccagtggggtaagatccagggattcagggaatgggatctagtgactggcaccatgggtcttcaaagaccctgagaatgaggatccagggatctgggatctggtggtggagatccacataaaagggctggtgggtgatgtctaggacctggactgtcatatatgggcactctggcgccgtttgtgggtaaccttgagcactggttcttggggcttgtggagcgagagggagctttggatttagcaggtcttggttggagcctgggaaagtgcattcctggcaagttcccaaggtatgctgatgcttcgggtctggggcccacaccatgaggcccgctgggctagagcgtccagcagaagagagaggcagagatgtacgcaggaccgctggtgcagcctggcttagggcacctagtggcaggggatctcagcccaggagaatgctgtgagcgcgtggggagacatcggggacactggggttggggaagtgacgcaggctggggtttggcaagtgacgcagaagcagtggcccaggcctaggacggcaggtggaaagccagtggtgacgcctcttaggtctggggtttgtggtctgtggatgaaataactggaagcagagtgggaggggaagccaaggggccagggagaagggggctggggaaactagctagggatatggggaatggaggggcccagactgcgcagtgggggacggggcttttgacctgggatggggtcctcacctcggagctgtctccaggtgaccgtgggctctggc

SEQ ID NO: 37731 - DNA, 1145 bp, Artificial sequence
  DNA replication origin
ttgtcccgtgttaagtgtttgtgtccggccccgccccctcctcctccttccccccacagacggcttcacctcggagggagagatcctggagatctctgacatccagcggggccaggccggggagtatgagtgcgtgactcacaacggggttaactcggcgcccgacagccgccgcgtgctggtcacagtcaactgtgagcccccctggcactgggcacgaaagggtggcggacccccgagtccctggggaggagggatctgggggaagaggaagcgggggcgagacttacgggcctgagggaggcgggggctgggggcgggaccccttcgtccccacgcggctaggagaattcgctgacccttgcccctcgccagatcctccgaccatcacggacgtgaccagcgcccgcaccgcgctgggccgggccgccctcctgcgctgcgaagccatggcggttccccccgcggatttccagtggtacaaggatgacagactgtgaggacagcactgagggggccgtgggagcgggaaggggaggtctttagtcccttcgattgtgaggcagggggacggagcggggcgggggaaggcagcagagctctgggtcccgaacctggggcgtccagcttctaggtgatgggatctgtccagccccggagacaagcttgggtccccgcttgatgaatgctggaaccccgtctccccggacttttcagggagctggccaggggtcgggggtcaatgctgaggatctgtcgggcaagatttaggggaccagcagagttcaggagtccctaacgactaggggtgcactacgggagagtccagagtcctgagaggccagggtgcctggaggggggcggcggtgggagtgacccgaggtacatgaggtgctagaacccgaggcgatgggtcactggggtagggggcagaatgctgggtcaccggggaacggaggagcctgagagtcggggggctggcctggctgggcgctgcggcccggcccctgacccggatccctggcaggctgagcagcggcacggccgaaggcctgaaggtgcagacggagcgcacccgctcgatgcttctctttgccaacgtgagcgcccggcattacggcaactatacgtgtcgcgccgccaac

SEQ ID NO: 37732 - DNA, 792 bp, Artificial sequence
  DNA replication origin
ggggtcgggggtcaatgctgaggatctgtcgggcaagatttaggggaccagcagagttcaggagtccctaacgactaggggtgcactacgggagagtccagagtcctgagaggccagggtgcctggaggggggcggcggtgggagtgacccgaggtacatgaggtgctagaacccgaggcgatgggtcactggggtagggggcagaatgctgggtcaccggggaacggaggagcctgagagtcggggggctggcctggctgggcgctgcggcccggcccctgacccggatccctggcaggctgagcagcggcacggccgaaggcctgaaggtgcagacggagcgcacccgctcgatgcttctctttgccaacgtgagcgcccggcattacggcaactatacgtgtcgcgccgccaaccgactgggagcgtccagcgcctccatgcggctcctgcgtgcgtcttcgggcggggcggggccgggaaggtgggcggggccgggggcggggctagggaagtggagacgccgggaccgcccttcaggctggccctgaacttaggagatggacgctgagactgaaaagcaatgcgagtaagaaaccgatccacgcaatcaatattcattgagtgccagctaagggtttgtcgtgggggacgcagctgtgcacaaaagaaacaaggtttggggattcgcagagcttatagtctagtaggagtagaaaagcaataaacaagtggtcatgtaggtaaataagcaaacacatacataaacaaaaaataattttggaggccgg

SEQ ID NO: 37733 - DNA, 896 bp, Artificial sequence
  DNA replication origin
acggaggatctggcacaacagagaaggtctactctgacagccccaactcaccggcccggtagacccggctttgtgatggagtccctggctggccccccaggatgggcaggatccgaaaggtccaggtccctgggttccgaggtggaaggggcaccacggctgaccgctcctgaggccccaggatgagcagggagacccagtccctgtaggtggaagtcctgcccagagcaggcccatctggccatgcctggatctcaaaactgctgatcagggccccgcgctccacatcccaagtcagcacggctgcatctctggctctctgaagcctccacgaggatatggagggtcctagagggatgtgggggtggctggattcttgggtgccagaggggagagggaagggggctggggggctgggctcctgggtctgagggggagggggctgggggcctggactcttgggtctgagggaggagggggtgggggcctggactcctggatctgagggtggaaggggctggtgacctggactcctgggtctgagggaagaggggctggggctagacccttgggtctgagggaggaggggctgaggcctggactccagggtctgagggaggagaggctgggggcctggatccgaggtctgagggaggagaggtctggggcctgaacttctgggtctgagggctggagcggctggggacgtggacttcagggttttttgaaataacgtggctcaccaatgagggtgatctggtcaccgccagcacccagcgccccactgcacagcacggagtaatttcccaggtcccaatccaggctgaagttgccgatgtggagtttccgcccatcttgactgagccgcaggcgactcccgcctcctggagccaggg

SEQ ID NO: 37734 - DNA, 1249 bp, Artificial sequence
  DNA replication origin
gaagcgggctggggacccagtctccgggagtcctagcggcgtcccaggtgaccctgacactcgcggtcccgacccctcctccctccagacggcccggacccgccgaccatcacggtctcctcggaccgcgacgccgcgcctgcccgctttgtcaccgcgggcagtaacgtgaccttgcgctgcgccgccgcctcgcggccgcccgccgacatcacgtggagcctggcggacccggccgaggccgcggtgcccgcggggtcgcgcctcctgctgcccgcggtcggaccgggccacgcaggcacctacgcctgcctggcggcgaacccgcgtaccggccgccgccgccgctcgctgctcaaccttacagtggcgggtgagaggctggagcgggagtaggggaatgcctgggagaggggcggggccagaacgagggcggggctagaggaaaggggcggggccagcaaggaggagcagcataccggtgggtggggcagggccagcgggagggcgggtcaccaagaaggagctgggatacccgtggtggggcgggccagcgcggaggggcggagacacctaggataagaggcggggccagaaagaggataagggaaggagccaaatagagtggcagggatgaccaggactgacgggccggcccagcactgagagggcggacattcctgggcatggaacactcgacaaagtcgacaagcggagttaaatggcaaagagtgggagttagaaaaggaaagaactaatttgcttaagtgggatcagcaaagggagaagttacctggcaaggggggcggagtcaccagggaaaggggcgaggtcatttagaaagcgggcagaattgtcttagaaaggggaaggggtccacaaggaagggcggagatatctgggaaaaggggaggcttctcggagtgcaatccaggagggggcgaagtaacctggcagaagtgggtggagctggaaaggaaggggctgagttacgtttgggaagagaaatatcattgtgtgaagatgcagttttcttaagaaagttgggcagtcagcagggctgcgggctacccacttagcgaggaagttaatgggaaaagggaacgggatcgcaggaaaagtggggagtgtgagcgcctatggggtggggctagtgaagaagggtggagtcaccgcgcggggaggcggggctggagaagaaatgagaaagggactccatcttcattctctcccttctctccgcagacct

SEQ ID NO: 37735 - DNA, 1118 bp, Artificial sequence
  DNA replication origin
gaggccctgagttccaacatgtctgggtccttctggtcaaatgtttctgctgagggccaagatttgagcccggtttcccccttctctgaaacccctggttctgaagtatttcctgatatttcggatcctcaagttcctgccaaagaccccaagccttccttcactgttaagaccccagcttcaaacatttctactcaagtctcccataccaaactgtctgttgaggccccagattcaaaattctccccggatgatatggatcttaaactctctgcccagagccctgaatccaaattttctgcagagacccactcagctgcaagctttccccagcaggtggggggcccactcgctgtgctggtggggaccaccatccggctccccctagtcccaatccccaaccctgggccccccacctctctggtggtctggcgccggggctcaaaggtgctggcagctgggggcctggggccaggggcacctctgatcagcctggaccctgctcaccgagaccacctgcgatttgaccaggcccggggggttctggagctcgcctctgcccagctggacgatgcaggggtctacacggctgaggtcatccgggcaggggtctcccagcagactcacgagttcacggtgggtgtgtatggtaagtgggccctggcgtccggcgtgcaggcggcaggggctgctctgctctgccaggctttgggcaagtcacggtgctgtggggtccctggataggagaagaggacttctgggttgaggaagggagaaaaagagctagaggtcaaggcaggggtgtctgagcaaaggtggacctgggatggagactcctgggagcctgaactcccaggtctgagggaggaggaggaggctaggagcctcttctggcgaactcctgggtcccggagaggaggtgtctgggggctcaaactcataggtttatgagaggagagggatgggggctgagactccaggggcttagagggagcagcggctggggttccctctaaggggaccaaagatgggctccaggactgggtgggtcctgagcccattctccctctcccagagcccctaccccagctgtcggttcagcccaaggctccagagac

SEQ ID NO: 37736 - DNA, 1283 bp, Artificial sequence
  DNA replication origin
cgccagaagaggctcctagcctcctcctcctccctcagacctgggagttcaggctcccaggagtctccatcccaggtccacctttgctcagacacccctgccttgacctctagctctttttctcccttcctcaacccagaagtcctcttctcctatccagggaccccacagcaccgtgacttgcccaaagcctggcagagcagagcagcccctgccgcctgcacgccggacgccagggcccacttaccatacacacccaccgtgaactcgtgagtctgctgggagacccctgcccggatgacctcagccgtgtagacccctgcatcgtccagctgggcagaggcgagctccagaaccccccgggcctggtcaaatcgcaggtggtctcggtgagcagggtccaggctgatcagaggtgcccctggccccaggcccccagctgccagcacctttgagccccggcgccagaccaccagagaggtggggggcccagggttggggattgggactagggggagccggatggtggtccccaccagcacagcgagtgggccccccacctgctggggaaagcttgcagctgagtgggtctctgcagaaaatttggattcagggctctgggcagagagtttaagatccatatcatccggggagaattttgaatctggggcctcaacagacagtttggtatgggagacttgagtagaaatgtttgaagctggggtcttaacagtgaaggaaggcttggggtctttggcaggaacttgaggatccgaaatatcaggaaatacttcagaaccaggggtttcagagaagggggaaaccgggctcaaatcttggccctcagcagaaacatttgaccagaaggacccagacatgttggaactcagggcctcaggaaaccagctggaatcagagattccagcagaggcttttgaatccaggaactgatctggaactttccagctgggaggtttgatggagggaacttccacacccagcccctgggaagagctctttgagtctgaagagaaggcagaggagaagttggtttgctgaagtccagaagaggctctgagggtgaggatccctaccaaggaggctgcagagaagagaggaaggcattgggggaggctgctgagggagactgacagggaagggactgagcagggaacttacccaggagtaggaagagtggcagagcctgtgggttgtccatggtgctggcctcactgaaaggacactggagagagacccaggactgcacccatccctcccgggtc

SEQ ID NO: 37737 - DNA, 866 bp, Artificial sequence
  DNA replication origin
ctgggagctgagcagaggccctaagctccacatgggatggtgggaaaagctatcagaaggagtcaatggtctgaccatcctggtcccaagtccagcttctccctctggctgtgcaacctcctgcaggtcccttgacctctctgagcctaagtcccctggcctgcaaagtgagtataatgacactcagcttatagggtgtttagaagtgttcagcctgatagtgcataggaaacatttagcgtagttcctggctcaaattaagtggtaattatggttcttaataaggtgagacctgaaggacaagttgtggtttagccaggttggagggaggtggagagtgggagagagcattccaggtagaggactgggaggtgagatgggcgggcaggataagaatggcaggatgttcaagtgcttgagtgggggctgtgcatgagtttgctttgaaccttggatgtctccagagggcactggggagccaggggagggctgtgagcagggggaggcaggttcagctctgggtatagaaggaccctggcagggaatggaggagactgggcagaggagggagacggggcaggaagagaagacagagcctggccagtgagaactagggggaggagggttggactcagatcgacagtggtgacagggagggaggaggtgggaatgttctccagcatttgcgaagacagtgaagccatcctggaggtgtgaggaagtttgggttagaggaaagagtctgagtttagcgggacacaggccatgtgagggcctcggggatgcggaaatgcagctctggtctcaggatagaggccctggcaggagatagcacctggagacttggttctgagggcaacagagag

SEQ ID NO: 37738 - DNA, 1026 bp, Artificial sequence
  DNA replication origin
tttgtcccccttgccagaactcagcccttccttgcactcagtcagttctctttgcacatttccccatgctggggacactggcacgggtcagacccaggccctgcccagcaggggctcagtctgtggggtggtggggaggaggcacttacagaccagaagcagttaatacaggccagacagcagtcccagtgcagggagaatgccggaaaaagactgaccatattgtggagggatggagacgacttttctggagagagaacatttaggagcttcttaagggccagggaaaggtaatatccaggcagaggggcccaaagatgaacgtgcagaaaagtcaggagtcttgtggggatgaagatcggtaatttagggtcaggatatagaatgtggggggcgggggatggaaaatgaagagggagaggcaggtgggggctgtggcctctaatgtcatgctggactttctcttgaacatgatggggagttgggagaaaaattgtgggcaggggagggacagtgtcagctctgggtgccagaaagacccccctgtagacatggaggggaggccagaaggtgagggaggaacttggcaatgcaataggtgggacatgatgaggcctgacctgggaccaggaaaggagggaatgagccagacagattcaggggcaggaggagcaggacttagggacccaaggcttttcagggtgaagggcaagaagaaggtgaggacagtgcccaagggtctggctcgatgaactggatgggatggcagggccatccctaatatggtggaagacactaagctcagttggaatatggttgactattaaggccctgaggggcagccaggagcaggtgagaacttgagtcaggctcaggggagagaccttgggttggagatggagttttggatggagcattaaggagcactgaaactttggccgtgaggaggcttgcctggcaagagagtgcagggtggagcttcaagggatacccagatttacaagtgaaggggagaaggcagaggag

SEQ ID NO: 37739 - DNA, 906 bp, Artificial sequence
  DNA replication origin
tggtcggagttaggtatgaattatagaggttgcagagaagaatgaaaagacagtggctgggcgcagtggctcactcctgtaatctcagcactgtgggaggctgaggcaggtggatcacctgaggtcaggagttcaagaccagcctggccaacatggcaaaaccccatttctactaaaaatacaaaaaaaaaaaaaaaattagcctggtgtggtggcgtacaaccataaccccagctactcaggaggctgaggcacaggaatcacttaaacccaggaggcggaggttgcagtgagccaagatcatgccactgtactccagcctgggtgacagagtgagactccatctcaaaaaaaaaaaaagggttgggatgggaatgagaatagggtcaagtttcaggaagaggatggggttgggtttggagtaggggctggggttaataatggagaggggtttggtttggagatagggtggggtttcagaatgagaatggagttagatttgagggtgggaagggtataagggttggaactgggaataaggatgatgttgagtttgggaattagaatgacgttaggtttggggatgggggcgaatcgggggatggggttgagtgtgtagttgggactgagaatggagttctatttgaggatgggggttggagctagggtggagattacgaatagggatgggattgggtatggagttgtgttcaggaatgggaatagggttaactttggggatagggatgggttgaatttgtggttggaactgggcttgatactgagtttggggatggagttgggtttggggttaaggatggctttgggtttgggagggggtcagggtcacagatagataggctgtgtgctctgacctgctactcactgcacaccatggcaggtttt

SEQ ID NO: 37740 - DNA, 1061 bp, Artificial sequence
  DNA replication origin
gggcgggaggatgcaggtgggactaaggctgggtgtgattttggaggtgggcagagagctgatgatgggggtgggaactaagattggggaaaggggtggaaatgggttgggggtggggataggagtgaggataggggttgagttgaaattaggggtaaagatgattgggggataggtttgggatggggttggacacgcttgtgttttataatgtaattggccattgtctctggttcctgggagggagaaacaatatttggaacttcctgagtaataggagggtctttgttattcttgagcctcttgggcccaacctgagtttatggtaatgagatgagatgactcagggttgggtgtggttgtcagaaaaaccaaccaggtcaggcacagtgactcatgcgtgtcatcccaacactttgggaggctgagtagggtggatcacttgaggtcaggagatcaagatcagcctggtcaacatggtgaaaccccgtctctactaaaaatacaataaaaaaaaattagctgggtgtggtggtgggtgcctgtaatcccagctactcaggaggctgaggcaggagaatcacttgaacccgggaggggaggtggaggttgcagtgagctgagatcgagccactacactccagcctgggtgacagagtgagactccatctcaaaaaaggagaacaaaaaagaaagaaagaaagaccgaccatgatatgttgaggctctgaaccacttgatatcagggaagaaaggaagttggaaactgcattccatcaatgaccaacgattcaatcagtcatgcctattttacaagactccaataaaacctctggacactgaagctcagtggcgctccctattggtgaaaacatctgtgtgctgggagggtgatccctggctccacaggaagaaggcttggaagctctgcattttgggctctcctagactctgccctctgtgtctcttcatttgcttggacctgagttgtgtcctctataaggaaactataactgtaagtatagcactttcctgcattctatgagttattccagcaattt

SEQ ID NO: 37741 - DNA, 948 bp, Artificial sequence
  DNA replication origin
ggggtaggacaccaggtcctgggagaagaaggagctgggaccctagactcctgggacttggggaagagggggctacaggtctcacgcctggtgcctacctgagtggcagagcctgcccgagccctccttctgccacggcccctctgtgcagactgagctgagcctggtcactggcctctttgcccccttaggttccccaaatcccttaagcctccctacacaatggtcccactacccagcagcttccagcaggcagaaatgcagcggtggcagaggcctcaaatggaattcgctgaagcaggcatccagggggctccccccacccactcactgacctctgtgaccctccccggaacccaataccttgtcgccagccttgctcaaagcaaccctggctttgtccgagctgtgtaagcacgcacacacgcacacacacacacacacacgggcgcgcgcacacacgcaagattcagggagagtcatgcgtttattgttcaaccagggctttctacctgaagagcaggcagtggggtggggagtcacaggtgtctgggtatgtggggccaatgcggttctttgtggggatggacacagggctgtggctgaggttgaggatggagctctttggggctgtagattcagaggacattaaagatgggctgaggtacacaggcaatgaggagaaaggggttggtaaagagggtgggttagggttgaggcgcagaagtggagctgggactggtgacagggatgggaatgaatgggtttgggaacagggtattgagagtggggaagagagaggcaggtaggagtggctttgggattagggagaggatagggaatggggttggaggagccctgggggttgagaatgaggtaaggattgtggttgtggttggggatggcattgggaatggggttgaggccatcaaggagacaggtttgggt

SEQ ID NO: 37742 - DNA, 1765 bp, Artificial sequence
  DNA replication origin
cagccctcagaccccggggtcctggagctgcctcgggttcaagtggagcacgaaggagagttcacctgccacgctcggcacccactgggctcccagcacgtctctctcagcctctccgtgcactgtgagtgggggaaaggggacacctgggtcccaggaaggggaccctgctgagtcctgtcctccctcccctcagactccccgaagctgctgggcccctcctgctcctgggaggctgagggtctgcactgcagctgctcctcccaggccagcccggccccctctctgcgctggtggcttggggaggagctgctggaggggaacagcagccaggactccttcgaggtcacccccagctcagccgggccctgggccaacagctccctgagcctccatggagggctcagctccggcctcaggctccgctgtgaggcctggaacgtccatggggcccagagtggatccatcctgcagctgccaggttagggggccgcctggatgccaaggttcttggaggagaagctgactggggcaaagagtagggtcctgtggttggagcaggagcttggagggacacagcagacccgtggcatctgtatgtagacaggaaaacacaatgggaagtcctaacacctgggccggggtgtggcagggtttcctaaaagtaaacagaggggttgcagatacaatgtccgccatgggaaccggaagccttaatgccgagtgatgagcgggcttcgtgagccctgcgtggatgggaaatgctcaccttgccctctccgtgtgcagataagaagggactcatctcaacggcattctccaacggagcgtttctgggaatcggcatcacggctcttcttttcctctgcctggccctgatcatgtaggttaagaggaggcgtggcggggtctggggcctggacccaggaagaggggaggtgttgcaggccgaaagagtgaaggtcgtgatcaacgcagtatacctctggaggttacatgagtaaacagcaaactgttctcataaatgcagaatgttgtccaactgacaaactgcgtctgcttcccagagggaatgctgagggcagtcacgccccaagcgaagtgtttcttgtaattaggcacagctgaagcttgttagtaataatatgaacctgtgatcaattaaacagctgaccaattgttacctcctgctctctgctctttctacccaataaatacaaagggctgtagaggctcagacagctgccctggctcactagtagcagggaaccctcttcttcttcccctgaccccttcctttaaaataatttcttttgtcttaagttttcatttctacgtttgtcctccttctttcagtctcataatgacggtctcaagtggtaacagtagtaactgtcatagtgacggtctcaggtagtaaacgtggcagtctgtcacagggaggtgcagcagggcacaaacaggtgggttcatttcctcagcatgaagattctaccgaagagacggactcagacagaaaccccgaggcccaggttctcccggcacagcacgatcctggattacatcaatgtggtcccgacggctggccccctggtgagtgtctgggccatgcttccactttttctcttctctaaagctgacatcccactttctgacttttgcaccccttgtcttagcgacatcaaggtgggaaaagcaccgatagttctgaattcaaatcctgcctggcacttactagctatgagacctcagccacgtcactcac

SEQ ID NO: 37743 - DNA, 1257 bp, Artificial sequence
  DNA replication origin
ataaagtaaaattggtgatttccagtggctgcaggaggatgaagaggatgggagggaaagggcggagttattgttcaacgaatgtggagtttcagttttgcaagataaaagggttctagagatctagcacaaccataaacttaataaagttgaggtggtaaattttatgttatgtgttattttccaccgtagatggctggatggatggatgggtggatggatggatggacgggtgggtgggtggatggatggatggatggatggatggatggacggacgggtgggtgggtggatggatggatggatggatggatggatggacgggtgggtgggtggatggatggatggatggatggatggatggatggacggacggacgggtgggtggatggatggatggatggatggatggatggatggatggacagacgggtgggtggatggatggatggatggatggatggatggatgggtgggtgggtgggtggatggatggatggatggatggatggatggactgacgggtgggtgggtggttggatggatggacggacggacagacggacagatggatggatggatgaatggttggatgaataaacaaaaataaacccacaagccttctccttggaacttcctatttcttctacattgcattttccctaaagcatatatctatctttatattttattcatttgttgttttattagttttgattagttgattggtttggccatatccctctgtatagaattaaacttcgatgagcccaagacttttaaatgttttccacagatgggtcgctggcatcttctcttaggagatgctctataacttttcctgaatgaattaatgaatgaagggatggatgttactctgctactcgaaaccttccacaggcttccagtcacattcaatacaatcaataaatgatgagtgtaatatttatatcagggcatgaaggatgaataggaatcagggagtggggagaaaaaagcatctgaggaggaggaacagccaatgtgaagacgtagagacacaaataaccttgttggtgatgacactggagtccagcgttgatggagcatggagcagaggcaggagtggctggaggcggggctgggattggagcaaagccagggaagcccttacccagagcacaaaattaaaagggtgccccaaatctcagcaatgaagatgaatacaattttaacacaatatttaaaaaatcaaaattaatataaaaagtccatgga

SEQ ID NO: 37744 - DNA, 942 bp, Artificial sequence
  DNA replication origin
caacctccaaagaaacgaggagcgggcggaaggactacgactcccggaaggctttgggcccatccgcctacgactcccaggtgcccctgcgttgcgtcgtcccgaaacacttgcggctctcggacaaactgggcctacagttcccagagatcctcgcggcagcgctgcgcattctgcgcacgcctcccagagtgtactaggccggtccggcccgcttcccgtctgcgcctgcgcaagcacaatagccgtgccagaattctctgccagctgctgtgcactgctgtcagtgcaaagatgggatggacttttttttcagattttctgctgttgtgggagtatggcaagagtttgagggggcggagaaagagattgggaatgtgaaaagggaagatagcacctgcgctaagcacattcctaggattgggccgcgtctcggggatgcagagtgggctcttcggcgcgccctgcagccatgggagtggacgcctgcccaggccgaagggcaaggacttgcggggtggggtctctgtgcatgcgcggagctgaaagggagcgttttgcagatctccacgcgtgcgcaactctcgggacgtggacgcggtgaacagttacgcacaatcgtctttctgacacaaacacaccctgccaggtggaagccaggatggagggcaggtgagacccgtaaggcaagatcccaaaaccaaggaacggagcactctccccgcttgctccccagatccaagccctccacttccttccaatgccccccttcccgaaactgctccctcctgtatattctgagatcttatcactattcccgtgaggcccttgataaggaggattgagagtgaagggtgatgggagacacgccttgggcgtcttctgtccacctcaaggattgaactttggtaactggaactcattcatttgttaatctgtgtg

SEQ ID NO: 37745 - DNA, 880 bp, Artificial sequence
  DNA replication origin
ctatggaagacaactcagctttttcaacctctgaatctgcagtcacctagtactggggttcacttcctgaggtccttatcagatccagttgcatccctgttttagttacctactcacctcagccagatgaacttcccattggtttttcaaccccttgcatctttggccaggctgatctcattgcgcaagacacttccctaaacactgtggtagacctaactcttaccttcaagtctcagctcaaactttcattcattcatttaacaaatacccactgagtgccgcctatgtacccagcatgctctaggtactgggacacagcagtgagcaagataggaaaggttgcagctgtcagggcactgatgttctaatggaggaaccaggccatggataaggaagtaaatgactaagatgctttccaaatacgagggaattatctttggtggtatgactgggggggggggaacagggagggggttctttagggtggctggaggcctttgagctgaggccaacaaaatgagtagacagatattgggtcagggtgggaagaatgctccaaattgagttaatagcaaatgcaaaggacatgaagggcagggcctggctgtgttcagcccattggaaagtgtgttgtgactgaggacgaccagaaaggaccagaagcttagaggttggcaggataaggagcttggattttattctgagatgggaaccactggatgattttaagctggggggcagggtagtgactggtgacaggatctgatttatatttccacaggcttcctggcactgtgcctgaatagagggtggagtgtggcaagggaagaaacagaacagtgaggaggcccctgcagtgatgcaggtgaggagtaac

SEQ ID NO: 37746 - DNA, 1317 bp, Artificial sequence
  DNA replication origin
atccccgggcgtccccggcgtcgcctcctcgtccagcccccggcggcccttgccgatggccaggcggggccgaccgcggttcaggccgtccaggagggagcaggcctggcagagcgcgcggctggccagcgccccacagcgggggcaggcgccggggcgcgggggccgcgcggccgaggccagcgccaggcgttcggccgagtgcaccaggtccagcaccgccgacggccgcggcgcctccaggcgcttgagcaggtcccgggcgctcctctcttctgagaagtagtcgaggcggcggaagtgcccgtacggcaccacctcctgcgaggcgaactgcagcgggcggcagcgcggaagggcacccccctagcccggagagcccaggcccccgccccgggccagccgccccgcaggaagttcatgagcacggtgtccaccatgtcgtcggcgttgtgacctggtggggagagacgggagagggtgaggtgcggcgcggagggcgctgctggccagggagcccctcgaggaaccaagggtccaccaggacccagagagagactgggaggggagacccacggagacccagggcacagtggggccgccaggtcccagagagagagacggcgacggggagagcgagccatggagacctccgaacaatgtgcaacagccaggatccagagacagagagggggagacagagccatggagacccctgggacactgtgggtaaccaggacccagagagagacggggaagggagacccagggcacagcggggccgccaggacccaagacagagaggggcagggggagggggaacagatactgatggggaaaccggaccatggagactcccgggcaccatggagcaaccagaaggagactggaggtggacagaaaacctgaagggaacacaaacaagctccttggggggagccctcatttgccatccacctactgtataccaagcccttcgctagctctctttccacatagcgggtaaaagtgctttaagctgcaaacaccatttcagcctcagttaaaactgtatttcagactacacaggagaaaaaagggccatctaatggggattctcaagagagctgtagacacaagtgtctctgggaatgcagatcacgcgatttacaaagaccagaaagaaagttaatgaatacatacacaccagtcgccatacaatttaaatggaaactacgtttattctgcattttgtcatcttatacttgagtctgtatattaaaatgctgttcttcttcgggcttctcaagttggtcatatttcccctcctcaaggcct

SEQ ID NO: 37747 - DNA, 1731 bp, Artificial sequence
  DNA replication origin
ttcctgcggggcggctggcccggggcgggggcctgggctctccgggctaggggggtgcccttccgcgctgccgcccgctgcagttcgcctcgcaggaggtggtgccgtacgggcacttccgccgcctcgactacttctcagaagagaggagcgcccgggacctgctcaagcgcctggaggcgccgcggccgtcggcggtgctggacctggtgcactcggccgaacgcctggcgctggcctcggccgcgcggcccccgcgccccggcgcctgcccccgctgtggggcgctggccagccgcgcgctctgccaggcctgctccctcctggacggcctgaaccgcggtcggccccgcctggccatcggcaagggccgccgggggctggacgaggaggcgacgccggggacgcccggggatccggcccgggcccccacttccgagaccgtccccaccttctagcgactccgggcctcccgccgggatccgacgcgcccgggtgaggtctgcctgtaaatgacactgtgaataaacccgttaccttacctggccttccatgtgaggtgggagggggatgggggcccagtgacctgaaaccctgaagctgggaccccagacttcggggtctcagggaggaagggtctcgagctggccttctggctctgagggaggagggggctggggggccatcctaggtctgagagaggagaggaccaggactagggctagaggaagtggggctggggaccccaggcatctgtggctgaggaaggagggcctggggtcgtggactcctggatctcagggaggagggggctgaacaccttgtgattcctgagcgagtgggggttggttggggacctcctgcccagttctctgctggttctgggtgcgctcagcatggtcctgaccctccttgagcaccagattcctgatgtttcctgtttgcccgcagtggggtaagcggagtgacgtgacttgatggacacacgccattcacagcccccgtcacgatgcctcccttccagcgcttcgtgtgcagcgcgtgctgcaccctcatttcgtctcctccacggcctcactggcagtagcctgagccgcagtaactgacctgggggctcccaccaggttggcctggctccagagctgtcagagattttgggattgcctttcccccatgctatcctgtcctcatccatcaccacctgaatctcccttgccgtctcttgtcataggtaaggaggggctggtgggctttgcagacctctcaagctctgaaggcagagctgcgcgagcctgaatcgccgcttaactcttctgaccttctatttcctcctctgaaaatagaagcaaccctccctctccactcccccgacatcagggtactcttgggaggattcagtaacttggttgttcatattaaggtttggccaccagggagcttttagtttcaggattgctgctcagctggtcctgaaaggagtgaggcccagaaacttcctgcctaacctgtgggagatttggtgttctcagtcccacctccgagctttgctggcttgcctccctagtcaggaatgccttccctttcccatctgcctgctcaaaccctccagggtccttacagaaagaggaccttcctgattctcccctcccacccagtccagggcgtagggatctcccaaaccccaccccataggtcccccacccataggtcctgtcctgactctgtggcctt

SEQ ID NO: 37748 - DNA, 850 bp, Artificial sequence
  DNA replication origin
aaaggatgaaggacaggtgctgggagcccagcggatgctgaacccggcaggtgaattcccctccctctctagctcctatgttaggcagctccagggtcccagacattgaggtctgggaaggattgagggcttttccctcccggaaccagctcagtgaggcaggggggttgctgtcaactgtgcaggcgaggaacagggactggccctcctggatgggcaccgacatgccattgctcaggatccgcagggctgggaaagagaagcacagccaggtgagtggagctgggaggcccaattctccctcattcctcccactgagctgcaagaagaaagacaagactgtgtggtgagtgctgagaatgggctagtcatgggtgaaaggatgaggacttggtgatcaggtcaggctaccagaaagaaggtggctgagctgagaaaagacagatgaggaggagttctcacattaaggagaagtggatgggcagctcaggtgcagacgtgccaagaactgagacaggcagacgaggaaagaggctcctagatccgcaacctgtcagggaggacccagagctcccaagacacgataatggaggtagaagcaggctcagatcttttggagcattgggtgccagattgagggccttgggctttatcctggaaagcaagagggggctataagcaagggaaacagagttagcactggatctagaaagatcctgctggagccaagtaggtcccggactggagagaagtgggataggaggcagggaggctgggaggaggctggggcaatgggccagggttgagcacgagacttgagctgggcctggaaccaaggggatgaggaggg

SEQ ID NO: 37749 - DNA, 1399 bp, Artificial sequence
  DNA replication origin
tctctcgctctctctctccctctctccctccctcccttctctctcgttctctctctctctctctccctctttccctcctcctctctgctcctgtcattcttggttgcttttgctgcctctctgtgtctctttccgtctgtcctcccttctgtctctgcacatctgtccttcctttcgccctctccctatctccatcctctttctctgcctgtggggcattatctgtgtctcccatttattcttcccttttctctgtttctctccctcccttcctgtctctgtgtctctgttcttcctctctctcgctttctcctcccctctctccccgaaccagtcagggtctgcccgtctctctctcccccttcctgctctcccagcttcgcccccaccagctttagtatctccaccccccacccccacccactgggggctcaaaggtgaatcagacccgaatctgcccttgcagatggagctcacagtctgatggaagagacagagccagccgcagacagtcccaatcccgggtgatctgggtatgacacagggagaggccagaggctgtgagagcccagggcgggaggaatcctggcagctggagacggcagagaggacctccagagaaggcgtggttgtggcatgacctccactaaggcccttccaggcagagggcacagctgaagcgaaggcccaaggcaggaaaccaaggaggtgctgggaggacaacaaagcccttaagtctgactagagcctccgaagccaggagccaaggagcacaggagatgaggctggtggggcgagcgggcggggtcagattcttagggagtttcaggccaggctgggaacttagccttctgagggtgacagggagccctggaaggttgtgagcaaggggcggggacacggttatagctgaatgtcagaccccgctgaggctgtgtggagtggagggggagagacgggtggaggctggggaggaggccccctccctgcagtttgcgggctaggacctggggagagaggaaggggtggggcaggaatgtgaggagctggagatggctggagactgctgggcactgggggcagagaacaggaacctgtgggcgggaaacaggtaggaaaactacaactccctgagtctggcccaggaacggatggggcaggagttgctttcaatggggaactaggaggaagaagagggtagaggagagagatgctgtgggcatctgagaacttagtggacattaagagccagggaaaacgttcaggatgcatggtgctgggctttcaacagtgcatctccctccctccctatcctccagccacccagttctcctctctggggacagcatatattcactaatttcttatgtatctttccagaggaattttatacatctat

SEQ ID NO: 37750 - DNA, 1157 bp, Artificial sequence
  DNA replication origin
gacctgggccagctccggggcaggggggaagccaggccggactgggctgggcggtggggaggggccggggcggggggccccctggggagggggctggtccgacggccgcgcagccggcggggtccagggagggggagccccggaccgcagagccggggaggaggtgacggccggagggagtcggggagaagggaaggaggatggcggggacggcgggaggaaggggagaggccgccgtgcggcgaaggcggggagaggatggagagcgctcggcggcggtggggcccggcctgcgggcccggggcggcggagaagaccccttccctgcgacgcgggagccgcgggagccgtgagtctgcggaaagggagggtggggggctggggcccgcactcctgggtccctgagggaggagcacccgggggcctggatttcagggttcttggaggaggagttgggggtggggagggtggggtggctgggagcccagactcctgaatccttgaaggagggggctgggacctggatcccggggtccagaatctggagaaggctggggacacttcctggattcaagagggaggacagagatgggggctggggctggtaggatcgtggctggaagagactaggggcgagctgcccgagccctcgggggaggtggaggaagactggctttggagtgcctgcggcagcggaagggttaacgtctggctggaggggagggggaggcgcagggatggggctgcggggctttgaggggtcaagggtgagccgtgccagtgggagggggccgaggaggagggggaggttgtctgggctgccagacaggccagggtcagcggcgggggcaggagatgtctggaggaggagaggcccagcatccatgctccctcggggacccgggattccaggtcccagacccctcctccctcagatctgggagtacaccacccagtcccccacccattccagaatccgagcccccagcccccttttttccaggatccaggagtctgagcccccagtctgttctctcagaccagggaatccacactccagcccctaactccttcaaaaccccagagttcagaacctcagcccctcttcccaaggagcgcggcccccaaccctctgttcctctagaacccaagcgttc

SEQ ID NO: 37751 - DNA, 1070 bp, Artificial sequence
  DNA replication origin
aacgccttgtccagtgaccttgaacaagtcctgacccttctctctccgcctcagtttccccaaggagacactggttggcgggtgggggagatgcttaggtccggggaatctctgagattctcggcttcccctctcccctcaccctcctcctcaggccccaggcagccccggggcatgctgggaacccaggcctgggctccgggccaggttggtgtgggggggtgggggcgggggcagcctcctcccttccccttcctccccaccttggcctgactctcgcccccgcctgagggtctgggaggttgggaaggagggaagggggaagagagctggccgtagacccgtctccggcccccgcctccccctttcctcctccgcccctttcccgcctctcctccccctcctcaggtcgctaccccagccctgggccccttctcaaaccacccccaccccacccccagctccagacctggctcgagctgcgagggggagggagagagggaaggagaaaagagagagagagaagggagggagacccaaagagagaagggggaggggaggaaagagagagacctaagagggagggaaggagagagagagggagagagacagagactgagagagagcaggagacggaggtgagggatggagagagggaaggggcggagggagaggaagtgaggaaagacatccgaaaaaagggggtggagaagggtgagaaagaggagagagactgagagagggccagagagagaatgagagagacaaagagggggaagggggagaaggggaggatgaaagacagaaggtagaggaaaagcaggagaaagagggggagagaaggaagaaaacagaagcggggagaggagagaggcgatgggcagagagagaagccagcgcagagccagggagggatgtcctgatgcaggaggaggctgggaaccagggaaggtggaaagaaagagggagagagaaaaaggcagggccagagagacctggactgcgagaaaggaaccggaaggtgcgcctggagcaggggcagcgagaaccagacagtccaggaggagggg

SEQ ID NO: 37752 - DNA, 890 bp, Artificial sequence
  DNA replication origin
gggcggagggagaggaagtgaggaaagacatccgaaaaaagggggtggagaagggtgagaaagaggagagagactgagagagggccagagagagaatgagagagacaaagagggggaagggggagaaggggaggatgaaagacagaaggtagaggaaaagcaggagaaagagggggagagaaggaagaaaacagaagcggggagaggagagaggcgatgggcagagagagaagccagcgcagagccagggagggatgtcctgatgcaggaggaggctgggaaccagggaaggtggaaagaaagagggagagagaaaaaggcagggccagagagacctggactgcgagaaaggaaccggaaggtgcgcctggagcaggggcagcgagaaccagacagtccaggaggaggggctgggcacgggagagaccccagctggaggggctcagagcccaggggtggggagggtgggtgctgggtcccggggtccagaagctggagaaggctggggacacctcctggattcaagagggaggacagagatggggctgggcagactttgggagcctcttcccctctctgaggctcagccccctcacctgccaaatggggatgctgagggcacctcgctctctggagtgggaggtgtcagggagaggactggtgctcagggcctggtatggggtcagcgctgggagattgtggctgtcatagttgtaaatgacccaaagaagggaggagagaggaaagaaagcacctagggaggctctgatggttggctagcccctggcctccttagccctgggcctggagtctctgcagactgacaggagggtaggtaggaagcaggtgtgcccaaagggccaaattacgagacaaatgaggttccctcc

SEQ ID NO: 37753 - DNA, 1198 bp, Artificial sequence
  DNA replication origin
gtgaggttcttgggagcctggcgtctggcccaaccacacacctggggaattgctggcctgacttctgacccctgactcctcatacccttcctccagagcatgacatttgaccaccaactgaaacctgacctctgaccccagaccactggcccttcccccgccctgtggtgacttcataaaggttactagcttctcccctggccttgagacccacacgatggccctgctggctctggccagtgccgtcccgtctgccctgctggccctggctgtcttcagggtgcccgcctgggcctgtctcctctgcttcacaacctactctgagcgcctccgcatctgccagatgtttgttgggatgcggagccccaagcttgaagagtgtgaggaggccttcacggccgccttccagggcctctctgacaccgaaatcagtgaggagaccatccacacttcatcagtgtcctggggaaggtgcagagggagggcaggagaggcccagagggtcaggctgagggacagacagagagaaacagtcagaggagaaaggctcaaagaccatgagaacaacagagacttagggacagagagacacagacaggggaagacagcagggcaaagactcagagaggggaggatggagagtcagagaggggaagatggagactcagagagggggaggatggagactcagagagagaggaagatggagactcggaaagatggagactcaggagtatggagagtcagagaggggaggatggacactcgggaggatggagagtcaggaggatggagactcatagaaaggggaggatggagagtcaggagaggttggagactggagagggaatagagacccagagaggggaggatggagactcagagggtggaagatggagactcaaagaggatggaaacccagagagaggaggacagagatgaggcagagactaggggaagcaggatagcgactggtcgggggcagagactcagggaggatagagacttgggagggactcaggaagcatagcgactgtggggcaaagagtcagagaggggaggatacagacttgggagggcagagactcagaaacagaatgttcgcattagggacatggtgttgcggggagctgcctcccccagcccctgctccctccctcaccgccagactatgatgagagaagccacctgcatgaca

SEQ ID NO: 37754 - DNA, 1093 bp, Artificial sequence
  DNA replication origin
ccctgcggtaaggacttcatctaaaacttggaaattgcggggtaagggaggcggtcggggacgaaacgtacgacatcaagtgtgggaaagcgggtgggcttcacatccttaggaagccaataagatccctggagaaaaggaagaaaaccaagtattgctctaaatcctcagaaggtgtgtgtgagagccgaagcaaaccaataggaatcctagagggcggagaggagtgagagtcggccaaagacagcagggagggcggggtcaagatgccacctggccgatggaccccgggaagctgcatggatctcaaatgggccaagggccccgggcttggaagggcaggtggcgcctagacccagcgttcccgctccacaggtctccaggagttcgcccggcgtttcctctgcagcgggtgctactctagggtctgcgacctcccgctggactgcccaggtgagggggcggggcctcggggtgcaggaggccaacctgagaaaagggaccagagcaccgaggggcataagctggtggcgaggccagacgtggtcggggcccagcgagtgaaccctgctccgtcttcagttcaggatgtgacagtgactcggggcgaccaggctatgttttcttgcatcgtaaacttccagctgccaaaggaggagatcacctattcctggaagttcgcaggaggaggtgtgagtcggggcggggccggcgcgaagagtttagacgggcgagttagccttcactagaggttggggagtcagcttgcggggacgggactccgggaatctccgtctagacacaagcatcagcaagaggagggtcgcgggatttaggggagagctcgaagatcagaatgcaggaccaaggacctggggcgatggctcacgcctgtaatcccagcgcttttggagaccaaggcgggaggatggcttgagcccaggagtttgagaccggcctcggcaacaaattaagacccctcctctgccaaaaaattttaaaaacagccggggcgtggtggtgcacgcctatagtcccagccactggggaggctgagcgggaagactgcttaagtccaggagtttgaggctgc

SEQ ID NO: 37755 - DNA, 1700 bp, Artificial sequence
  DNA replication origin
aaggggtatgggacaaggctgctggtgaggtcagcaaaggccagacctgtggaacctctgaggctttgacaaggaattggattttgtctcaatggcaacagggagtcactaaaggattctgggtagaggagtaacccaatctgacacactttaaaacctaagtccttggccgggcttggtggctcacgcctgtaatcccagcactttgggaggccaaggcaggtggatcacttgaggttaggagttcaagaacagcctggccacatggtgaaaccctgtctctactaaaaatacaaaaattagccgggtgtggtggtgggcacctgtaatcccagctacttgggaggctgaggcagaagaatcgcttgaacccgggaggtggaggttgcagtgagctgacatcacatcactgcactccagcctgggccttggagtgagatggtgcctccaaaaaaataaaataaaataaaacaagtcctgctggtatgtagagaatgggctacagtggagagaggccaaggaggtggtggggggctgctccagtgatccagacatgaggtgggggtgactgggaccacagagaaggcagcttcatgagatatttaggagttaaaaagtctgagggttggaaatgaaaatgaattggaagtggaggagaagttagattccaaggtttctggtttgaactgctaggtggatggtgttgctctttctggtaggaggaaagccttggggaggaacagcctctgagggcaacatggaggactctatttgagggtgccttctgcagatggaaatgtcaaggagacagccagtaacctgagggggtatctgggttcccacctaacttgcactgggatagctatgcctatcactgtcattatgcgggccatattcatctgggcatgtgtgggcttgctgcacctcctcctacctgagttagtagtgaccaccttcggagatgaaacaatctagagttgaaatatattctttattttcaggatggaaataggatagggaaggaggaaagatacctttgttagttgccactgcagtaccatcgaaagaacatcctggggaaacaaagaggtatgtgtgttacaggaggggttggtgactagaaacttaggtcccggagcctggacaccagggtcaaaaaggtgtacagggcccggactcctggttctgagggaggagggggcagggggcctgggcttttgggtctgaaggaagagaaacttgggggtctggactcttggatctgagggaggaggggctgggggcctggactcctgggtctgagggaggagggggtccgggggcttggactcttggatctgcgggaggaggggactggggacttggactcctgggtctgaaggagtaggggtttggggcctggaatcctgggtctgagggaggaggggctgcggacctggactcctgggtctgagggaggaggggctgggggcctggactcttagatctaagggaggagggggctggggacttggattcctgggctagtaaagaggggctgggacctggactcgtgggtctgagagaggaggaactgaaagcctgacctcctgggttggaggttgctgggaacccagacttctcggtgggatctgagacagcggggagctagatgctggggctccggagtccccagaactcaccacgccaacactgtcgca

SEQ ID NO: 37756 - DNA, 1278 bp, Artificial sequence
  DNA replication origin
atgttctaaaattagattatggtggtggctgtgcaaacctgtaaacttaactaaaaaccattgacttgtacacttcttttttttagatggagtctcattctgtcacccaggctggagtgcagtggcacgatctcagctcactgaaacctctgcctcccaggttcaagcgattgtcctgcctcagcctcctgagtagctgggattacaggcacatgccaccatgcctggctaattttttttgtatttttagtagagatggggtttcaccatgttggccacgctggtctcgaactcgtgacctcaagtggtctccctgcctcggcctcccaaagtgctgggattacaggtgtgagccaccgcgctcagccaaattgtacactttgagtgagtgaactctgtgcgagataaattggagacaaatatggacaactctcccaaggaaatttgctattaaccgaaatagaaatggaacagttgtttacagggaaactgaggtcaagagtgggggtcttaaaagtgggagagtaacaatatgttcagatgctgatgggaaaggctccgaagcgaaaggagaactgacggaggatcaggtgggaagaactgctggagtgaagtctttgagcagacaaagaggacatagggtctggtgccctgatggaagaggttggcactggcttggagcacagacaggtcaccctcagcaacaggaagaaggtggagtgtatggacacaggggcaagtgagtgggaagacgtggagatggggactccagcagaagttttcttttttaacccctattttctcagtgagataggaagccagctaagagggaggggaggaggtgctggaggtttgaggagaaaagggatgtgttacccttctaagtagacggaccagagacaaaagcaccatctgcagtacctgccagtgtgcggcaggtggcaggtgcttggtaagtacccgtgaatgagttgagtaatttaaccctcacaccaaccctgccccaggggattaataatccctgttttcaaaagagggaaccccaggttccaaggaaggagagtgtcttgtccaggttcaaacggctagcacccagcactgagcccagcgtccccaattctcaatcatccattccccttagttctcaaaaaggtggaggctgggggaaaataaataaaattctttattacatcctgatcacacagtagaaatggagattaaataagaacgaggagaaagcaggaccctttccctccactcctcagatcccacaccctg

SEQ ID NO: 37757 - DNA, 915 bp, Artificial sequence
  DNA replication origin
acacctggacgcggtagcccccggtccgccgccggcaaagcctccgcacgcccacccagtacagcgtcaacatggccacccagtagcccacgtaggcgccggcccccgcggccaagtggtaggcctcggctgcgcgggaagggccgctccagtcggccctggcctcgtgtgctacgctgcggaccaggcccccaagcagcagcagcgcccagagcgccaggggcagcagagggacgtagttagcggccagcttccgccggcccgaggtgccccagccactctggttcatggtgactagcgccaggaacttggcaggcaggaggccacacatgtagaggggcgcgtagagcgacagaagcaccatgcgcaggcagccccgcagccaggccgcgaaggccgccttggccagtgccacgccctgcacgcacagcagcacccacagcagcgcccaagggcggcccgcgtagaacagacgcagcacagtggccgccacgaagaaggggaacaggccggagaccaccgcctcgtaggtcatccacgcatggtgccggtgccaccagagcgcgttgtacagccactcacggaagtacgacttggaccagcgtgtctgctggctcagccaccgcaggaaggacgagggcgtctctgagtagcagcgggacctggaggtgtacctgcacgggggcgaggaatgagggcatcatcgcgtgctccctggggcctgggcaggattctggaggcagaaatgaccactgtggacggccactgggggcgagtttcttaacctctctaggcctcagtgttctcatgtgtagaatagggtggataatggttcctaggcctggacgcggtggctcactcctgtaatcccagcactttgggaggctgagggataaggagttcaagaccagcctg

SEQ ID NO: 37758 - DNA, 1293 bp, Artificial sequence
  DNA replication origin
aagaggggaagatactataagggacaaggctggcatttgcattgaaccatggaatgcggtgaactctaccaagagaggcaaggtgagggtagagaattccacctagaattgagatagggtgagttggttctgtcatggagaccaaggtagcacagtggggagtgaagtaggaagggcaagagacaaatggatagagtgggatctaactagtgagagagccacggagaaagaaacaagtgagagaagaggagcacctgaactctagtaagttcttcaagagaagacaagtaattccatgagactcaggggaggatgatctagaccaagtgaagttcaggggagagtgatttctgcaaagccaggtccactgaaatacccagaggaaacttgggataatccaggggaatccatgcattaattcactcaacaaatattcactaggtgcctagaatgtttaagctgcggggatacagcaataggcagacaggacaccaattgattacatcagttggggagacacacaagaaataaataagtagaacatacagtatgttcatgatatgtgttatggagataaataatgccgggcaagggtggtggataggaagttttggggttgggggtgaagtgttaagtggagtgcctgaggtaggatggggctcaaggctgagaatagtgtggctggagcactgaactgggggagtattaggagagcaggatggagagttaaggagtggtccactcatgaaaggcttataggtctaaggactctgactaagatgagggagccatgggagggttttaagcagagaagtgacacgttgtaatgggatccctctggcagccgttttgggtacagactacaaaaggcaaggtcggaagcagggaggccactgaggatgccaagtgacacaggggaaggagtctggacactgtcaagtaatgcccaggattctcctcttgtgtgggcttggctggaaaccatgcagggattgattaatgatgtctgccacaaaacaggaaggaggcctgatggttcccttgagaagttctaatacatagactaccctgggtagcaaccacacccatcttgctcctccctatagggcctgccagtaatagtaagcatggtagtattagtaatatgttagtgatagtattagtaatagtgtcagtaaccaacatgatattagtaacagcaatagtaatggtaacagcaatagtcatagtaaaaacggtagtagctaacatttattgagcaaatactatctactggtcctaagcacttggcgt

SEQ ID NO: 37759 - DNA, 1043 bp, Artificial sequence
  DNA replication origin
tatcccataacttctgccatattctattgcttagtagcaagttaggggtctcactcacacaccagaggagatggtatatgtcttattgttcatgttcatacaaggatgtgcatcttggagtacatgttaaactgtgactacacattgaaaatgactttaaaaaatctcaaaattatgttcagatcggttgcagagtgccccagctgcattgcaccccttgatgccttcctctcaagcatcagcctgatgcaggggtctgtgctgatcctggccccttccaccttacaggtctgtgactcggacacaaggttggaccccatggcactgctggagctcgtgcgggtactggacgaggacccccgggtaggggctgttggtggggacgtgcggatccttaaccctctggactcctgggtcagcttcctaagcagcctgcgatactgggtagccttcaatgtggagcgggcttgtcagagctacttccactgtgtatcctgcatcagcggtcctctaggtaagcaggggcagagattgggagggctgtggatggggtggaaagggagaagggaagccggatggggctgaggatgtgactggggttgggaacaaagatgcagcagggcaggaattggggatgggataaaactggaagctggcggtgaggatgctgcttgggctcaagctgagtttggtgtggggagtgaggttggaaaaaggatatggatgacgattggggctggggctggggaagaagatgggataggcttggagtcaaagacagagttggagccaggtttgaggttgcagtgggttttggatggggctgagaatggatatgggattggtgatgagactggggtgggcaggtttgcagtcacagtgggtatagttcaatgacaggcaagttggagtgcgtatgaggttgaggacaggattcgggctggagatgggattggagatagtgctgagattgagattatgatgactgaggatggggttggaactggagatggggttggggctggaaacagcattggagttgg

SEQ ID NO: 37760 - DNA, 762 bp, Artificial sequence
  DNA replication origin
aggatcctccgcctccacctcccgataggctccggcgcccaccgcgcccgccgccgcgggttcccagggctggtggtagttgccgtcccacacgtacgtggcggggtcctcgtcagcgaagacctcgcggaacatgtcgaccatgtagaggtcctcggcgcggttgccatccaccaccatgaggacgcgcagccgcgcgcgcgggtacagcagggcgcgggcggacgccaggcactggcgcaggtacgcggggtcctcctggtaggcggagatggtcagcgccacactgcgcgcggtggctgcatccagcggcccccgcgccgccgccgccacccgccggtgctccaggtacgcgaagaggctctgcgccaccaggtgcgctgaaaggaaggccccgtagaggccgaaggccaggaggccgtagcgatcggaggccagcggcaccccggcggcgtaggcccaggtcatgaggcccaggatgagcagggcgaaggcgatggtcagcaccctccgggccaggccggagcagcggcaggctgcaggagtgggcttgggcgcgtcctgctgggagcgagaggggaaaggaaggggcatgagtcccgggcgcatgagcctcctccgagagaagattaaaaatcctttccttccttccctccttccctttccctcccctccctctctctctccctccctccgtccttccttctctttatctttctctctctctgtgtctgtctcgctgtctctctctctctctcgctc

SEQ ID NO: 37761 - DNA, 1015 bp, Artificial sequence
  DNA replication origin
gacagaaacttggagaaatgtggtaatggggagagagatgagggtaccaacaaagagatgaggagaaatagtgggttagggagaaagaaagggatggagggaaatacagggataggggatggggggatgaggggaacccccaaaatgcaagtgaggtggaagagaaaaatcaggggagacaagggacgagaggggggaggaagagagaagaagacatagaggagggagggagaggagggggagtgatggcagagaggactagaggaggggcgcgggtagacatgggggcctgggaagggaggcccgtctggctgaggggggtgggagtaatagcgggaagcgggtggagctgcccggctgggccgtgacctcagagcccctggcccagcttagcctgactgacgtcagcgctcgctcccgcccccgcctgcgctggtcttcaaatgacccccctccagctctctggccacagagaggctgggagagcaagccggagagaagagagagcccggccagacccactgcgatgagacaggtgtgtgtgtgtgtgtgtgtgtgtgtgtgtgtgtgtgtgtatacagccatgtggggaaaactactgccatatgtgtgaccacgtgtgttggggaactgtgtgtgcatgatttcatgtgtgtatccatgtgcctgacagtgaccatatgtgtgtaggggacagtgagcatgtgaggctgagtgtgcaggtctgtgtatacattgccctgtgtgagcggccatcccaagtacatgtaggtgagacgtgccatgtccgtatttctgtatctgcgtatcttgctacaaacttgtgtatgtctatgttccctgggaggcagagagaaagagggagtgcgacagtgagcgaatgaaagagactgagtgagaaagagagttggatttgcctgtggcacatgggaatggatttctgtttcatgcgttcaatagctattaagttgaaccaaatgaaatcgccgatactgagccactctaaacttggaag

SEQ ID NO: 37762 - DNA, 886 bp, Artificial sequence
  DNA replication origin
gatagtttttttaaaaaattcatggaaagaagggcatgtaaacagacatttatcacagatctggtcctgaggggctggggttcgggcaccccaggtcccgcatctcttttcacccttcctctgactcagtttccctgatgggtgacagcactgacagaccccggctggctccccagggtcagctgaccgacaactctctgtgttcatccctgagtccctggggatacaaatcccagcgccccagctctccaccccagaccctggtgcacacacgcagacccacgtcagttaggcgctgaatggacagatgttcactcacagctccggttccaggcagccgtgcctcgggccagcgtacacacaggcacacccacagcacgcacgtgtgtgagtttcgttccatctgccagttgctgagacatgtccctggggggcccaacccagagatggattctggggacaggagaggcggctgtggggagaagcagggcgggggtgactggggaaggtgagaagggggaggtggggagagctttaaagcaagaagagaaagaaatgagggtgagaggaggcaagagaagtggagaggaagaaagggatggagagaaagacagaaacttggagaaatgtggtaatggggagagagatgagggtaccaacaaagagatgaggagaaatagtgggttagggagaaagaaagggatggagggaaatacagggataggggatggggggatgaggggaacccccaaaatgcaagtgaggtggaagagaaaaatcaggggagacaagggacgagaggggggaggaagagagaagaagacatagaggagggagggagaggagggggagtgatggcagagaggactagaggaggggcgcgggt

SEQ ID NO: 37763 - DNA, 1009 bp, Artificial sequence
  DNA replication origin
gggaagggcgttcgagctccttgggaatgcaccttctccctgacaggcccaggcagaggcttggcctggcgcagcctcctcggggaaaaccccagggtgtgaggacttggtgtgaggacttggtgtctggcaggggagagctccgggacaggctggaagagatggaactgcagggagagacgaagatgtagaaacagagaaatggagagaaactgaatgagagagacagagacagagaaacacatacagagatagagccttacaaagagataggtgcggtggctcacgcctgtaatcccaacactttggaaggccaaggcagatggatcacttgaggtcaggagttggagaccagcctggcctacatagtgaaaccccatctctactaaaaatacaaaaaattagccaggtgtggtggtgggcgcttgtagttccagctactcgggaggctaaggcaggagaatcgcttgaacccgggaggcggaggttgcagtgagccgagctcacgccactgcactccagcctaggtgagagagtgagactccgtctcaaaaaaaaaaaaaaaaaaagagagagatggggatgcagagagacggaaggaggatagagacagagctagagagggagggagatagagggaaaaagagacagagagaaagagacacacacacatggacacacagtgagaaagtcagggagaggcactcagaaagaaagagagccacacaagaagaaagtcagggagacttcagaaatgcaaagggacagacactcccaggtaaaagcagagagagaatggctgtgaggggggatgaggaggagaaacagacaggaatacacagaggcagagacccaaatagagggaccgagaaacagagatggggtgacagatacaaaatgacagagatttggggagggacagacgaggagagagaagcacgggggaatttctctctgctgctccatgtctttcagcctgtcctggagctggcccgtgccagacaccaaa

SEQ ID NO: 37764 - DNA, 1064 bp, Artificial sequence
  DNA replication origin
atgtccccacaatgaatgaatgttctctcctctgcctttgctccatttttgccttacctctcccaccctgtgctccttctgtccaggtattctgtaagctgtaccctgaggtttcctgatgatggctgaaatgctgggaaggccactgtggacccagggcaggaactggagagcagccaccagaggaatgggggtttctaggagccatgggtgttagcgaggggtgcggtgtccctacctgtccctccaacaacagccccggcctgctgtgggagtgttcagcttcactgctccctgtctttcagcacttgtctgggctgcttccagccttggtcatctcttcctgcaagaaattctgggggctggacatgtaggtctaagggagaaggaagctgggagttgagactcctgggtctgagggaggaggggatgggggcctgggcctgggctccagggtctgagggaggaggggatgggggcctggactcctgggtctgagggaggaggagatggagtctggactcctgggtctgagggaggaggggatggggcctggactcctgggtctgagggaggaggggatggggcctggactcctgggtctgagggaggaggggatggggcctggactcctgggtctgagggaggcggggctggcagcctggactcctgggtctgagggaggggtgctggggacctggacttctgggtctgagggaggtggggctgggggcctggactcctgggtctcagggaggagggactgggggtctggaccctgggtctgagggatgaggaactctgaacctgtactcctgggtctgaaggaggaggggctgggtgtctgggatcctgggtctgagggaggagggacatgggaacctggactcctgggcctgagagaggaagggctggggtctggactctcgggtctgaaggaggagggtgctgggaacctggactcctgggtcttagaggagggaactgttgaggattaaagccctggttatccttcctcaaccgcactctggttttagaaacatctggttttatacagctgctcc

SEQ ID NO: 37765 - DNA, 924 bp, Artificial sequence
  DNA replication origin
tgggattctgcagaccctccctgtcgtgagacatcgttctccgcgccacctcgtgtcgtcctcacgccgggtccttccgctccccaggcttccccttcacagccactgcttttcttgactccccgttgggacaggttacctgagtctgtcttgtgacacccagtgttcttccttcccaaattttactccactggaaaatgtgctcttccgggaggtgggcatcctattcctcccctttcctcccgaatgtgtgggtgagagggatcaggagaggaaaagacggggaacgacggagcaaaaggaaaaactgaggagaaaagaatgagggagacccataaatacacggcaaaatggatgatactttagggacttgcaaagagagcaagagtgaaagagaacggatggaaaaagtagcagggggagaaaagcacacagagaaatttagaaaaaaaggggaccttcagagagatgaagggcagcaaaatagagtggggcggcaaaggaggaggcactgcagacagacagacagtggggagaaggtgaaagagttggagccgcggctgacagagctacgtggtgctgggactgaaagagagggagagagggcagtgggtgacaagcagagtagagggagaaccacagcagggagtaagcctaggaaattgggggtgctagagagtgggaacaaaggagatgtaacagggaagagggaatttaacaaggagagcagagagggagcttagatgggggaaaagaggcagaaatacgtggagattggggacaatcggaaagattggggagaaagagctacgagaggtgaagtaagttgcagagcattgggcagaacagacataaaagagggaataaagaaaggggtgcaaaacagaaaaggagaaaaaaaagacgctcagaatgagagaggga

SEQ ID NO: 37766 - DNA, 1030 bp, Artificial sequence
  DNA replication origin
tgtcagccgcggctccaactctttcaccttctccccactgtctgtctgtctgcagtgcctcctcctttgccgccccactctattttgctgcccttcatctctctgaaggtcccctttttttctaaatttctctgtgtgcttttctccccctgctactttttccatccgttctctttcactcttgctctctttgcaagtccctaaagtatcatccattttgccgtgtatttatgggtctccctcattcttttctcctcagtttttccttttgctccgtcgttccccgtcttttcctctcctgatccctctcacccacacattcgggaggaaaggggaggaataggatgcccacctcccggaagagcacattttccagtggagtaaaatttgggaaggaagaacactgggtgtcacaagacagactcaggtaacctgtcccaacggggagtcaagaaaagcagtggctgtgaaggggaagcctggggagcggaaggacccggcgtgaggacgacacgaggtggcgcggagaacgatgtctcacgacagggagggtctgcagaatcccaggacgtgggaggagaagcggctccttcaggagccggacagtgggcgctcccctccaggggcagacgacggaggagctcggggatcgcgaagggcgctagtccacatcccgaatgaggactcgacttggcgcggggcccaagcagagggttttaagcgggaacactacctgaatggggttgtctacatggtcctaaggaagaaaggcagagagcaaggaacggcctcagagagattttaaaccgaaagggaagcaattctcctacttacttgggacgaaggggctgttgcgggtattttaaggtccgtagcgatccccaggtcacgggtatggagaaccgaggactgcgaagtgcacgtttaatcaaggtagacgaagagaagcaaacgtttaatccaggtagactgaaacacactcatagcgacgtggcctttccccagcgcgatctgcttccgggtgtgcagg

SEQ ID NO: 37767 - DNA, 1699 bp, Artificial sequence
  DNA replication origin
ggacagtgggcgctcccctccaggggcagacgacggaggagctcggggatcgcgaagggcgctagtccacatcccgaatgaggactcgacttggcgcggggcccaagcagagggttttaagcgggaacactacctgaatggggttgtctacatggtcctaaggaagaaaggcagagagcaaggaacggcctcagagagattttaaaccgaaagggaagcaattctcctacttacttgggacgaaggggctgttgcgggtattttaaggtccgtagcgatccccaggtcacgggtatggagaaccgaggactgcgaagtgcacgtttaatcaaggtagacgaagagaagcaaacgtttaatccaggtagactgaaacacactcatagcgacgtggcctttccccagcgcgatctgcttccgggtgtgcaggaaactgggcgcggaaagaaaaactgggcggcctgggggcggggcctaggcggggcgcgactaggaaagggctgggcggaaagactggcctgacttgggagtggcccgaaagggtggtgggaggcccagggcggtagggggcgtgactaggtggggcttggctggaccgaaaactgggatgaagcggggcctccaggggtgggcggggccgaggcggggcctgttctccactccgcctctcacccagcaggattttgttttccaggtttgggagtatttgtgactatttcttgtcctgtgaagcagcgttgctccttgcccattttaaattaatgtttcagaatttaaggttgaatcttaaagttgtggtccacttatactggaaactaagatgatttattcttaacaagttgaactgatttaagtcaaaaccgatttttccgagcctggtggactccatccagtcttaccagaaaagctgaagctactcagtagtcagggaactgggatctcggtggggattggatgtggagcagtgactggatccaggaacccagaagacattatgccaagcgaaatgtgctagacacagtgtagaaaatgaaataagtagaggttcctcttcaaagggactttcctcccagtctaattgagaatagatagtaacctctcttagaagcaaaatttactcaaagacctgtgctaatattcttaaatatctgctagccataatagataaatcaatatactctgtgttcttagctcccacattttagcctagatatttgccctggcatgcctgaattgttccaagcaagcattaggtcacagcctattcctcttccttatttggaagtgtttttgcctctctcagccttccacaagttacttcctctcttcctttgttctcctctgcctttgcctcttttgggaagttctaaggtgctagccaatcaggtcaagcacagaattgggtccgattccagccaatggaaaccagacacagcagtagggtggacgcgtcaggttattattattattattttttttgagacggagtctcgttctttcgcccaggccggagtgcagtggcgctatctcggctcactgcaagctctgcctcctgggttcacgccattctcctgcctcagcctcccgagtagctgggactagaggcacctgccactgcgcccagctaattttttgtatttttagtagagacggggtttcactgcgttagccaggatggtctcgatctcctgacctcgtg

SEQ ID NO: 37768 - DNA, 1175 bp, Artificial sequence
  DNA replication origin
gctgttccttgccccctgcctttctgccatgtagataaccatgtcgataaccccattcaggtcgtgttcctgcttaaaactctcattgacccctgcttcggccccgggcgaagtcaagtcctccctcgcgaggtggattcccaccagtcgagacccccgagcttcgcccttgtcgacgcctggaggggagcgcccgctgcccagctcctgaaggagccgcttcttctcccaggtcctgggattctgcagaccctccctgtcctgagacaccgtcccccgcgccacctagtgtcctccgcgcgccacctagtgtcctcctcacgccgggtccttcccctccccaggctgccccttcacagccactgcttttcctgactccgcgttgcaggaggtcacccgagtctgtcttgtgacacccactgtcgttccttcccaaatttttactccactggaaaatgtgctcttccgggaggtgggcatcgtattcctcccctttcctcctgaatgtgtgggtgagagggatcaggagaggaaaagagggggagcgacgggacagaaagaaaaactggggagaaaagaatgagtacacggcaaaatggatgataatttaggtactggcaaagagagcaagagtgcaagaggacgcatggagaaagtagcacggggagaaaagcacataaagaaattagggaaaagggagagcttcagggagctgaagggcagcaaaatagagaggggcggcaaaggaggaggcactgcagtcagacgcggggggcggaaaaggtaagagtcggagccgcggctgacagagccacgtggtgctgggactgaaggagaggggagtgggtaacaaaggagagtagagggagaaccacagcaaggaggaagcctaggaagttgggggtgctagagagtgggaacaaaggagatgtaacagggaaaagggaatttaacagggaagagggattttaacagggagagcagacagggagctcagatgggggaaaagaggcaggaatacgtggcggctggggacaatgggaaagtttggggagaaagagcaacaagaggtgaaataaatttcgaagcattgggcagaatagacataaaagagggaataaagaaaggggagaaaaacagcaaagggaaaaaagacgtgcagaatgagagcggga

SEQ ID NO: 37769 - DNA, 843 bp, Artificial sequence
  DNA replication origin
ttctgtcccgtcgctccccctcttttcctctcctgatccctctcacccacacattcaggaggaaaggggaggaatacgatgcccacctcccggaagagcacattttccagtggagtaaaaatttgggaaggaacgacagtgggtgtcacaagacagactcgggtgacctcctgcaacgcggagtcaggaaaagcagtggctgtgaaggggcagcctggggaggggaaggacccggcgtgaggaggacactaggtggcgcgcggaggacactaggtggcgcgggggacggtgtctcaggacagggagggtctgcagaatcccaggacctgggagaagaagcggctccttcaggagctgggcagcgggcgctcccctccaggcgtcgacaagggcgaagctcgggggtctcgactggtgggaatccacctcgcgagggaggacttgacttcgcccggggccgaagcaggggtcaatgagagttttaagcaggaacacgacctgaatggggttatcgacatggttatctacatggcagaaaggcagggggcaaggaacagcctgagagagattttaaaccgacagggaagcaattctcggacttacgtggggagaagtgcctgttgcaggggcgaaggggctatgggtattttaaggtccgtagcgatccccagatcactggtacggagaagtgaggactgcaaagtgcacgtttaatccaggcagacggagcgaagtaatgtttaatccacgtagactgaaacacacacacagcgataaggcctttccctggcgcaatctgcttccgggagtgacggaaactgctagcggagagaaaaaactggg

SEQ ID NO: 37770 - DNA, 1030 bp, Artificial sequence
  DNA replication origin
tatctacatggcagaaaggcagggggcaaggaacagcctgagagagattttaaaccgacagggaagcaattctcggacttacgtggggagaagtgcctgttgcaggggcgaaggggctatgggtattttaaggtccgtagcgatccccagatcactggtacggagaagtgaggactgcaaagtgcacgtttaatccaggcagacggagcgaagtaatgtttaatccacgtagactgaaacacacacacagcgataaggcctttccctggcgcaatctgcttccgggagtgacggaaactgctagcggagagaaaaaactgggaggccagggggcggggcctgggcgagccgcgaccagcaaggggcgggtcggaaagaggggcctgactcggggagggaccctgagagggtggagccgggccggagcggcagtgggcgtggctaggtggggcgggacggagccgcggcggaggatggggcggggtttcatggggtaagcggggccgaaatagagcctgttatttactctggttcacaggcagcatgtctttggttttctgactacttcttgtcctgtgaagcagcgttgctgcctgcctattttaagttaatgtttcaaaatttaaggttaaagcttaaagttgtggtccacttatattagaaactaagatgatttcttaacaagttgaactaagtcaaaaccgatttttacaagcttggtggactccatccactcttgccgatgatgctgaagctactcaatagtcagggaactaggatctcgctggggatttgatgtggagccgtggctggatccaggaacccggaagacattatgccaagcgaaatatgctagacacagaaagacaaatactgcctgtgcttttacacgtgcaaagtacaaacgtcaaatttacagtaacagattagaagggtggttaccagggctgggggatgtatcctatgcctttatcaccattatattttggaagcagataacttctctggcctcacagattcacagctgggc

SEQ ID NO: 37771 - DNA, 1201 bp, Artificial sequence
  DNA replication origin
gaaggacgggggacaggacccgccgccgagcgatttaaacacacagggaagcgaccgcctgactctcacggagacgcctgaatttggtcggggtagagggagcggtgcgaggatttcaaggtctgtgtggcccctcagatcccgggtacagaagcgcgggggagttgggaagcgcagattaatttacacaaagggaaactcacgcgccgcggcgtgaccttcactccacgcgatccgcttccgggtttgtgggaaactgcgcgcgcagcggaggggtccgagcggggcgggggcgggggcgggggcgggggcgggggcgggggcgggggcgggggcgggggcgggggcgggggcgggggcgggggcgggggcggggcggagtggggcttgcgcttccctccgcctcgcttccagtgcctctgttttccgggttttgccggggagacctgtcaaggagactggagcaactcagctgtctcggaactgtactcttgccgggactgagcaaagtcggctaatgattagatccaggaaaattcctgctattaaagttaatcttaagccgaccgtgcggtcgggcacctgtagtcccggctaccccgaagactgaggcgggaggatcgcttgagcccaggagttcgagtttacactgagttatgacggccactgcactccagcttgggcgacagagactcagtctctcaaataaatacataaaaaactaaatttagcaatttaattaagccctgggattgtctgtgaaagcgacgcaagttaatacatgaactgcaaagccctgcctgggcagaatgtgcaatttcatgctgacggcccacaaagcagaatagaaatcctctccttttctattccctgttctttcgggagggacagaggtaaccctgtgctcagctccagagagttttctagtgacagcaccaggggcatggagggctaaggccagtgagaatttaggtcaccaattgttggttttaaaaaagcattaaccgggcgaggtggctcacacctgtaatcccagcactttgggaggtcaaggcaggtggatcatttgaggtcaggagttcgagaccagcctggccaacacggtaaaaccccatctctactaaaaatacaaaaattagctgggcatggtggcatacgcgtgtaatcccagctactcaggaagctgaggcaggagaatcgc

SEQ ID NO: 37772 - DNA, 921 bp, Artificial sequence
  DNA replication origin
ggaacttcccactttgctgcccctctcactatcttgctgtccttcatctctccggagatggaacttttctctgcatttctccagttgcttttttccccctgctactttctcggcttcattcgctgtctctgcaaatcctccatccactctctactttgccatctgcttacggctctccctcaatcttcttttctccttcaaaatttttctctttcttctccctcgctctccgtctctctttctgcacacattcacatggaaggaattgggatccgatgtccacaagcagaacaccttttcagtggggtgttatttggcccgcaagaacactggatgtcaagagacagagtaagtcacctccccacacgcagggttaggagaagcggtgtctgggaagaggaggcctggggagtagcggggccccgtatcaaggagggtaaaggtagggtctggatcaagagatgggtggcgtctgcagaatcccagcactgggcagaagacgcggcttctcctggattgagattggagcgctgtgctccagggccaacaaaggcgaggcttgggggaccgcatagaccggaatccgcctagcgggggaggactttacgctgtgcggggcggatgtaagcatcactgaaggacttgaaacaggaaaactccgcgacaggaggtgactacatggccctgtggcagaaggacgggggacaggacccgccgccgagcgatttaaacacacagggaagcgaccgcctgactctcacggagacgcctgaatttggtcggggtagagggagcggtgcgaggatttcaaggtctgtgtggcccctcagatcccgggtacagaagcgcgggggagttgggaagcgcagattaatttacacaaagggaaactcacgcgccgcggcgtgaccttcactccac

SEQ ID NO: 37773 - DNA, 1953 bp, Artificial sequence
  DNA replication origin
ttcccaactcccccgcgcttctgtacccgggatctgaggggccacacagaccttgaaatcctcgcaccgctccctctaccccgaccaaattcaggcgtctccgtgagagtcaggcggtcgcttccctgtgtgtttaaatcgctcggcggcgggtcctgtcccccgtccttctgccacagggccatgtagtcacctcctgtcgcggagttttcctgtttcaagtccttcagtgatgcttacatccgccccgcacagcgtaaagtcctcccccgctaggcggattccggtctatgcggtcccccaagcctcgcctttgttggccctggagcacagcgctccaatctcaatccaggagaagccgcgtcttctgcccagtgctgggattctgcagacgccacccatctcttgatccagaccctacctttaccctccttgatacggggccccgctactccccaggcctcctcttcccagacaccgcttctcctaaccctgcgtgtggggaggtgacttactctgtctcttgacatccagtgttcttgcgggccaaataacaccccactgaaaaggtgttctgcttgtggacatcggatcccaattccttccatgtgaatgtgtgcagaaagagagacggagagcgagggagaagaaagagaaaaattttgaaggagaaaagaagattgagggagagccgtaagcagatggcaaagtagagagtggatggaggatttgcagagacagcgaatgaagccgagaaagtagcagggggaaaaaagcaactggagaaatgcagagaaaagttccatctccggagagatgaaggacagcaagatagtgagaggggcagcaaagtgggaagttcctcagtttgagagtgggggagagggggagggatttggagccagggcagacagagcagcgtggtgctgggacagcaagaggagtcagctggtgacaacgagagcagagggagaaccacagcaggtggaggcctgggatctcagggtgccagagagtggggacaagggggtgtaacagaaaagaagggatttaacagagagagcagagggggagtagagtcaggggaagaggcaagaccgggcacagtggctcacgcctgtaatcccagcactttgggaggccaaggtgggtggatcacgtgaggtcaggagtttgagaccagcgtgggcaacatggtgaaaccccatctctactaaaaatgcaaaaattagccgggcgtcagcgcgcgcgtgtaatcccagctactcaggaggctgaggcaggagaattgcttgaacccgggaggcggaggttgcagtgagctgagattgcgccattgcactccaggctgggcgacaagagcaaaactccgtctcagggaaaaaaaaaaaaaagagacaaataggtggagaatgggatgatcaaagattgagcagaaagtttggaagaggggtgaaacaagttgccagaatggagcagaacaggtggaagagaaggaatagaaggaagaaggggagaaacatcaggagaagagaggggctcaaaatgagcagaatcttaggggaaaaataaagggggaaaaaagctagagaaagaaggtgagaatgagagatacgtacagaatgagggagggaaacacagtacccagaaaagagggaaccctgggtgcagatgaacggtgagttgattggatattatgattaagttgtgacattgatttatctatttataatttgataatatgaaatatactttaaaaatacagatgaaaatggatatgcaaaactcctgtctgtaaggctggtgcattttataattcttggcatcagactttagcttccactcacattccctattcaggcacaggtcagtgacttgagtcattcaggtgtgggtcacccactttccttttcctgggatggggtagggtgtgggcgagtgtaaaagatagca

SEQ ID NO: 37774 - DNA, 1481 bp, Artificial sequence
  DNA replication origin
aatccccgcaccgctccctccaccccgtgtaaattcaggcgtctccgtgagagtccggcgctcgcttccctgtgtgttaaaatcgctcggcgacgggtcctgtccccgctcgttctgccttgggccaggtaaacacggattttcgagactcctttccgcttaaaactctttactgacccaacgtcctgccccgcgcttttaaaagtccttaccgcaaggtggattcccgcccggggagcctcccaacctcgcccccggcccctgaagcgcagcgccgcagccccagtcccggcgggggaggccgcgtcctgtactgggtcctgggacccttgagaccccacacttctaataattcagccccacccttttcctccttgatccgggccttcctactccccaggcctccccttcgcagccatcgctactcccgacccccgggtgtggggacgtgacttcttctgtcttaggacattcaggattcttcgtcccaaattccatcccactaaaaatgtgctcttggcggaggtgggcaccttattgtactcccctgcctatggatgtgtggggaaagatggtgaaagagtggcaggaaatagaaaaattttgaaaaagaagcatgagggagatccataagcagacggcagagagtagctgagagatttacagagacagtgaatgaagccgagaatgtagcagggggagaaaagtaactggagaaatgtagagaaaagctgggtctccagagagatgaagatgaagcaagattgggagaggggcagaaagggggaggctcctcagacagagtaggggagaggaggagggatttggagccagggcagacagagcagcatggtgctgggacagcaagagggggcagctgatgacaaggagagcagagggagaaccacagcatggggaggcctgggatccgggggggccagagagtggggacaagagagtgtagcagggaagaggaaatttaacagggagaacagagaggaagcagagatagggagggcaagaaacaggcagaatggaaattggggacaatcaaaaattggacacaaagaggaacaaggggtaaaacaaattgccagaatggagcagaacaaatggaagagaaggaatagagggaagagggggagaaacagcaggagaggagaggggcagaaaaataagccaattcttatgggaaaaatgaagtgaaaaaaagcaggagaaagaaggtaagaatgagagagctgtacagaatgagggagggaaacatactaatgacaaaagagggggaacctgagtgcagatgagcgatgagttgatggactattatgatcaaattgtgatatactgatttctctaattgtaatctaataagcacaaaatttatttcaaaagtacagatgaagatgagacttgcaaagttcctgcctataagggaagtgcattttataattcttgacatcacaagttagcttccattcaca

SEQ ID NO: 37775 - DNA, 1168 bp, Artificial sequence
  DNA replication origin
agtcgtctggaggctggtcccgtcccgggtctgtctgctatagggcaatgtatacactttctattgcgtagtttttctgctcaaaaccttcttctgactcttccctcctcgcgctatttaaagtcttcacccacgaggtggattcttgcccggggcgcacctcccagccacccctcgtcggcccctggagcgtcgcgccgcagccccagtcccagggaggccgcgtcctctgcctggtcctgggatcttgcagaccccatccttctcccaaggcgccgtcccccctcctcccacctccctactcgtgccagagcctgcggctccccaggtctctcctccgcagtcaccgcttccattgaacccacactgggaaggacgcagggccctgtcctgtgacatggggtcttcttgcctgccgagctccagcccttggaaaacgcgctcctccgggatgcaggcgtcttactccaaaccctcctgcgattgtgtgggccgaagggatcaggagacagacagcagtagaaaacctgagacagagaaagaataagaaaggcccataacagatggcaaaatagaggattggtgagggatatgccaagatatggtgaaagtggaaaaagaaagcaacaaaatacctagaaaagcaggtggagaaaagcaactggagaaatgtagagaaaagctagatgtacacagagatgaaggacggcaaggtagggagagtggcagcaaagagggaggctcatcagagtgagggagagagggagggatttggagccagggcagacagagcagagtggtgctggtgtcaaggagaaccgagggagaaacacagcagggaggacacctggggatctggggtgacacagagtggggacaggggagtatatcagggaagagagaatttaacagggagagcagaggaggcgcagagatgggtgaagaggcagaaatagatggagattgaggacgattgaaagattggggagaaggagcaataagaggttaaataagttgcgaggatggagcagaagagatggaagagaaggaatagagggaagaagggggataaacagcagaagagaagaggggtacaaaatgaagagcagaatcccagggagaaagaaaagaaaacaagagctagagagagaagggggagaatgagaga

SEQ ID NO: 37776 - DNA, 800 bp, Artificial sequence
  DNA replication origin
agtccggaagttgcttgcttttgggtttgaactcgtccggaggctggtcccaaccccggtctttctgctatagggcagtgtatacacttcctgtcgcttagttttcctggtcaaaaccctgtgctgactccacccaccccgttctttttaaagtccccgacccgcgaggtggattcccgccctgggcgcctcccagcctctccgtcttcggcccctggagcgaagcgctgtgtccccagtcctggggaggctgcgtcttctgcctggtcctggaattctgcaggtgccacccttgtcttaaggcgccgtcgccccctacatcccccctcgtggtgggccctgctgctccccaattcttcccttcgcagtcaccgcttcccctgaaccagcgtagggcaggtcccagcggcttgtcctatgacaccgggtattcttgcctgcccagctccaccctccggaaaatgcgcttctccgcgatgcgggtgtcttaccccaaacccgcagagtggtgctggtggcaatgagaacagagggagaaacacagcagggaggacaccgggggatctggggtgctagagagtggggacaggggggcgtaacagggaagagagaatttaacagggagagcagaggagacgcagagataagaggcggtaatatgtagagattgaggacgatcaaaagattggggagaaggagcaacaagaggttaaataaggaccgggcgctttggctcatgcctgtaatcccagcagtttgggaagcttaggcgggcggatcacctgagatccggagttcga

SEQ ID NO: 37777 - DNA, 920 bp, Artificial sequence
  DNA replication origin
acctctgccctgccaccccgtctgggatgtgaggagcgtctctgcccggccgccccgtctgagaagtgaggagaccctctgcctggcagccaccccgtctgataagtgagaagcccctccgcccggcagccgccccgtctgagaagtgagaagcccctccgcccagcagccaccccgtctgggaagtgaggagcgtctcctcccggcagccacctcgtcccggagggaggtgggggggtcagccccccgcccggccagccaccccatctggcaggtgaggggcgcctctacccagccgcccctactgggaagtgaggagcccctctgcccggccagccgctccctccgggagggaggtgggggggtcagccccccgccaggccagccgccccatccgggaggtgaggggcgcctctgcccggccgcgcctactgggaagtgaggagcccctctgcccagccaccaccctgtctgggaggtgtacccaacagctcattgagaacgggccatgatgacaatggcggttttgtagaatagaaaggggggaaaggtggggaaaagattgagaaatcggatggttgtggtgtctgtgtagaaagaggtagacatgggagacttttcattttgttctgtactaagaaaaattcttctgccttgggatcctgtttatcggtgaccttacccccaaccctgtgctctctgaaacatgtgctgtatccactcagggttgaatggattaagggtggtgcaagatgtgctttgttaaacagatgcttgaaggcagcatgctccttaagagtcatcaccactccctaatctcaggtacccagggacacaaacactgcggaaggccgcagggtcctctgcctaggaaaaccagagacctttgttcacttgtttatctgctgaccttccctcca

SEQ ID NO: 37778 - DNA, 1122 bp, Artificial sequence
  DNA replication origin
gtacagaacaaaatgaaaagtctcccatgtctacctctttctacacagacaccacaaccatccgatttctcaatcttttccccacctttcccccctttctattctacaaaaccgccattgtcatcatggcccgttctcaatgagctgttgggtacacctcccagacagggtggtggctgggcagaggggctcctcacttcccagtaggcgcggccgggcagaggcgcccctcacctcccggatggggcggctggcctggcggggggctgacccccccacctccctcccggagggagcggctggccgggcagaggggctcctcacttcccagtaggggcggctgggtagaggcgcccctcacctgccagatggggtggctggccgggcggggggctgacccccccacctccctccgggacgaggtggctgccgggaggagacgctcctcacttcccagacggggtggctgctgggcggaggggcttctcacttctcagacggggcggctgccgggcggaggggcttctcacttatcagacggggtggctgccaggcagagggtctcctcacttctcagacggggcggccgggcagagacgctcctcacatcccagacggggtggcagggcagaggtgctccccacatctcagacgatgggcggccgggcagagacgctcctcactttccagactggacagccaggcagaggggctcctcacatcccagacgatgggcggccaggcagagacgctcctcacttcccagatggggtggtggccgggcagaggctgcaatctcggcactttgggaggccaaggcaggcggctgggaggtggaggttgtagcgagccgagatcacgccactgcactccagcctgggcaccattgagcactgagtgaacgagactccgtctgcaatcccggcaccttgggaggccgaggctggcggatcactcccggttaggagctggagaccagcccggccaacacagcgaatccccgtctccaccaaaaaaatacgaaaaccagtcaggcgtggcggcgcgcgcctgcaatcacaggcactcagcaggctgaggcaggagaatcaggcagggaggttgcagtgagccaagatggca

SEQ ID NO: 37779 - DNA, 901 bp, Artificial sequence
  DNA replication origin
ggaggagttagaaaaaggttttgagcaggaaaactacccaatacaaagtgtatacattgccctatagcagcaagaccagagaccgcaccagcttcaaggcgattttaaacccaaaaggaagtgaaccccggactctcaaagggaagtctcaatttgctctgggtgaagacgggcgagaatttccaggtctgtggggaccccacgtcccaggtacagacgcgccggggacctgggacgcacagacttaatataaaacagagagaaactcacgcgctgccgtgggaccttcactccacgctctccgcttccaggttcgcgctgatctgctcgcgcaggacagaagccaggcctgggcggggtccaggaggaggtgggcggggcctgggcaggcggaagcggggcgcgaggcggagagactttgccctttagaaccggcagagggcggggccggggcgggacagagtcagtcttgagcccagcgcctccgtttttcgggttttggaagggagactggccgggaaggctgaggcatgagtcaaaagccctggaattgtctggaacggggatgcaaactagaatgtgaaatgcaaagtcctgcctgggcagaactacgatttcatactgagggcccacaggacagaacagaaatcctctccctttctattctccattcactcggggtcggggagggcgggtcggcggtgggggcagagtccaccctgtgctcagcttcagagacttccctagggccaccgcctgggatgcgggacggagtgctcaggccagggaggagcgaagtcaccacctgctgcttaaacacagcagagatgcgggcactggggagggagcctgaggtcccagctactcaggaagcagcagcgggagggttgctgagcctggg

SEQ ID NO: 37780 - DNA, 1059 bp, Artificial sequence
  DNA replication origin
ttcacttccttttgggtttaaaatcgccttgaagctggtgcggtctctggtcttgctgctatagggcaatgtatacactttgtattgggtagttttcctgctcaaaacctttttctaactcctcccgccccgcgctttttaaagtccttacaggtgaggtggattcccgccctgggcgcctcccaccctcgccttcgacggcccctcgagtgcagcgccgtgcccccagtcccgcggaggctgcgtcctctgcctggtcctgagatccttcagaccccaccattgtcttaaggcgccgtcgtcccccacctcccttctcgtgccgggccctgctgctccccaggtctcctctccgccgtcaccgcttcccctgagcccgcgttgggaaggtgtccggggcctgtcctgtgacacggggtgtccttgcctgcccagctccagcccctggaaaatgagctcccccgggatgcagacgtcttactccaaaccctcctgtaattgtatgggccaaaggaatcaggtgagagagagcagtagaaaacctgagataagaaaagagcaggaggagaaaagcaactggagaaatgtagagaaaagctagatgtacagagagatgaaggacagcaaggaagagagggggcagcaaagaggaaggctcatcagagtgagggagaggaggaggggtttggagccagggcagacagagcagagtggtgctggtggcaaggacagagggagaagcacagcagggaggactactgtgggtctagagtgccataaagtgtggacagggatgtataacagggaagagagaatgtaacagggagagcagaggaggcgcagagatgggagaagaggcggaatctatggaggttgaggacaatccaaagattgtgggagaaggagcaataagaggttaaataagtagcgaggatggagcagaaaaggtggaagagaagtaatagagggaagaaggggataaacagcagaagaggagaggggcaaaaatgaggcacggaagcccagggaaaaagacaagaaaacaagagctagagagag

SEQ ID NO: 37781 - DNA, 1406 bp, Artificial sequence
  DNA replication origin
aacagctttgtaagctgcctttttaagcacttcaactaggcaggaaatcataatcttgcctagctatacctggggagcctgtctggtattcccattagggatcttcttggggaactacccagatgccttgttgaaggtttggctcatgaggcctgcaggtgtcagtgtgggactgggctagggtataaactctatcccactcatctggggaaagggtagaaggtaggatgacatttaagtcactccaggttaagttgtagtattggattaaatactggaattcctgtatatatttagtggtgtctcacgagaaggggcctaagtgttgattaatttgggaaaggtctgatagagaaaatggtacatgcactctgccgatgccctcagctccaggcacttctcaaagaggaaattgttgggcaggttggggagtatttgctgcagaacgaaattgtaagccgaactgggtgtggggaggggaggtgacagcagggttacagggtgggggagtggaggctgaggaagaattgggacttgattcagccttctgaggagtggcctggggagggggagagaggtaagaggggtcttcagaaaaggaggattcagaagactcagcagcagttggtgttgggactgaagggacaggcaggagggaaagaagcatttgggactagtcacattgggaccagaagctagggaggaagtgaagtgaaaaaatgcctggacataaggcacctcagaccatttacccatcttatgacaaaaattatttaggtcttgtaggatggagaaatcaaaagtgccattatctggccatttagagccattatcaagtttgtattggggccaaacagtgttgcaggagaaaataagatgcttaggttttagatcaggtgagagttgaagaggtttcaagtttttaagaacacaggctaagggggaagtaggaggaatggagggtggatggttgcccatagtaaaaacgtaagtttagagaaaagaggggtagagacacagagagagtggggtggtacttgccacaaagaggaaatggtacttgccaccaaggtggaggatcaaggcaggtgtccctgtggtgattgaacaagtctgaaatgtgggtgaataatcagacaggcatccctgcagtgattaaacaccaagggaagactgtcttcccaagtccgtgaccagcgctggagttttgggttcatggataaaacatgtctcctctgtctctaccagaaaaggaaaggaactgaaattaagggaagggagagattgaaaggtggtgctgaaattgaaaggagaaagatgatgagggatagtgacaaagttggagaagacagtaaaaagaccacttacccaatttgaaattggtgagacgttccttgggctggttg

SEQ ID NO: 37782 - DNA, 1311 bp, Artificial sequence
  DNA replication origin
taaggagcatgctgccttcaagcatctgtttaacaaagcacatcttgcaccacccttaatccatttaaccctgagtggacacagcacatgtttcagagagcaccgggttgggggtaaggtcacagatcaacaggatcccaaggcagaggaatttttcttagtgcagaacaaaatgaaaagtctcccatgtctacttctttctacacagacacggcaaccatccgatttctcaatcttttccccacctttccccgctttctattccacaaagccgccattgtcatcctggcccgttctcaatgagctgttgggcacacctcccagacggggtggtggccaggcagaggggctcctcacttcccagtaggggcggccgggcagaggcgccccccacctccctcccagacggggcggctggccgggcgggggctgccccccacctccctcccggacggggaggctagccgggccggggcaggctcctcacatcccagacatgggcggccaggcagagacgctcctcacttcccagacggggtggcggccgggcagaggctgcaatctcggcactttgggaggccaaggcaggcggctgggaggtggaggttgtagtgagccgagatcaggccactgcactccagcctgggcaccattgagcactgagtgaacgagactccgtctgcaatcccggcacctcgggaggccgaggctggcagatcactcacggttaggagctggagaccagcccaaccaacacagcgaaaccccgtctccaccaaaaaaatacgaaaaccagtcaggcgtggcggcgcgcgcctgcaattgcaggcactcagcaggctgaggcaggagaatcaggcagggaggttgcagtgagcgggagagggagagggagagcgagagctgtattgttagtagagacagggtttcaccatgttggtcaggctgtcctgaactcctgacctcatgatctgcctgcatcggcctcccaaagtggtgggattacaagcatgagccactgcacctggcctgaatgtcgttcattcttgtcctttgcccatattgtaatttgtatagttaacctctggtcaatattttaccatttgctaaattagttccactttcgtccaagctcaagatttggtctatcctagtggaattatattcccacagacatgcatgcacaaaattcactcctacatgcccattacttctgccctccacccttgcccttcctttcctggccttgcatcacatggtacattgatctggatgcaaatactgtttcttttcagcctatcgattttgtaa

SEQ ID NO: 37783 - DNA, 954 bp, Artificial sequence
  DNA replication origin
ttttcgtatttttttggtggagacggggtttcgctgtgttggttgggctggtctccagctcctaaccgtgagtgatctgccagcctcggcctcccgaggtgccgggattgcagacggagtctcgttcactcagtgctcaatggtgcccaggctggagtgcagtggcctgatctcggctcactacaacctccacctcccagccgcctgccttggcctcccaaagtgccgagattgcagcctctgcccggccgccaccccgtctgggaagtgaggagcgtctctgcctggccgcccatgtctgggatgtgaggagcctgccccggcccggctagcctccccgtccgggagggaggtggggggcagcccccgcccggccagccgccccgtctgggagggaggtggggggcgcctctgcccggccgcccctactgggaagtgaggagcccctctgcctggccaccaccccgtctgggaggtgtgcccaacagctcattgagaacgggccaggatgacaatggcggctttgtggaatagaaagcggggaaaggtggggaaaagattgagaaatcggatggttgccgtgtctgtgtagaaagaagtagacatgggagacttttcattttgttctgcactaagaaaaattcctctgccttgggatcctgttgatctgtgaccttacccccaacccggtgctctctgaaacatgtgctgtgtccactcagggttaaatggattaagggtggtgcaagatgtgctttgttaaacagatgcttgaaggcagcatgctccttaagagtcatcaccactccctaatctcaagtaatcagggacacaaacactgcggaaggccgcagggtcctctgcctaggaaaaccagagacctttgttcacttgtttatctgctgaccttccctccactgttgtcctatgaccctgccaaatccccctctgtga

SEQ ID NO: 37784 - DNA, 1101 bp, Artificial sequence
  DNA replication origin
tagttttcctgctcaaaaccttgttgactcatcctgccccttgctttttaaagtcctcacccgtgcgctggattcccgccctgggcgcctcccagcccccgtcggcctcccctggagcgcagcgccggggccccagtcctggggaggctgggtcctctgcctggtcctgggagcctgcaggtgccacccatgtcttaaggcgccgtctcccactatgtccctcctcgtgccgggccctgctgctccccaagtcttccctccgcagtcaccgcttcccctgagccagcgttggggaggtcccagggccttgtcctatgacaccgggtgttcttgcctgcccagctccacctcctggaaaatgcgcttctccaggatgtaggcctcttactccaaacccgcgtgtgattgtttgggtcaaagagatgaggagatagagagagggactgagagagcagtagaaaaccagagacagagaaaagaagaatgagaaaggcccgtaacagatggcaaagtagaggatgggtgagaaatttgccaagagacagcaaaagtgaaagaaaaaataagaaagcaggaggagaaaagcaactggagaaatgtagagaagagctagatgtacagagatgaaggacaagatagggagaggggcagcaaagagggaggctcaccagagtgagggagaggaggagggatttggagccagggcagacagagcagagtggtgctggtggcacggagaccagagggagaaccacagcagggaggacacctggggatctggggtgctagagagtggggactgggggctgtaacagggaagagagaatttaacagggagagcagaggagatggagagataagagaagaggcggtaatatatagagattgaggacgattgaaagattggggagaaggagcaacaagaggttaaataaggtttggggaaaaaaaagagagatcagactgttactgtgtctatgtagaaagaagtagacataagaaaccccattttggtctgtactaagagaaattagtctgctttgagatgctgttaatctgtaaccctagccgcaaccctgtgctcacagaaacatgtgctgt

SEQ ID NO: 37785 - DNA, 1181 bp, Artificial sequence
  DNA replication origin
cgcttccttttgggtttaaagtcgtcctgaggctggtctcgtccccggtctttctgctataggtcaatgtatacactttctgttgcgtagttttcctgctgaaaaccttgttctgactcctcgcgccccgcgctttttaaagtcttcacccgcgatgtggattcttgcccagggcgcctcccagcctccccctcctcagccccgggagcgccgcgccgcagccccagtcccggggaggccgagtcctctgccaggtcctgggatcctgcagaccccatcctggtcctaaggcgccgtcgcgccccccccccccgccccgcaccttcctcctcatgccggggcctgctgctccccaggtctcccctccgcagtcaccgctttcattgaacctgcactggggaggtcccaggggcctgtcctgcggcacggggtattcttgcctgcggagctccagggcgtggaaaatgcgctcctccgggatgcaggcgtcttactccaaaccgtgttgcgattgtgtgggccaaaggaatcaggagacagagagcagtagaaaacctgaggcagagaaaagaagaataagaaaggcccataacagatggcaaaatagaggattggtgagggatatgccaagagatggcagaagtgaaaaaaaaaaaaaaaaacctaagaaagcaggaggagaaaagcaaccggagaaatgtagagaaaggctagatagatgtacagagagatgaaggatcacaaggtagggggagtggcagcaaagagggagactcatcagagtgagggagagagggaaggatttggagccagggcagacagagcagagtggtgcttgtgtcaaggagaacagagggagaaccacagcagagaggacagctgggatctggggagacacagagtggggacaagggagtatatcggggaagatggaatttaacagggagagcagaggaggcgcagagatgggagaagaggcagaaatagatggagattgaggacgattgaaagattggggagaaggagcaataagaggttaaataagttgtgaggatggaggagaagaggtggaagagaaggaataaagggaagaaggggatgaatagcaggagaggagaggggtacaaaatgaagagcagaatcccagggaaaaagaaaagaaaacaagagctagagagaga

SEQ ID NO: 37786 - DNA, 1045 bp, Artificial sequence
  DNA replication origin
tgcttttgggtttgaagtcgctcggaggctggtcccgtccccggtctttctgctatagggcaatgtatacacttcctatcgcgtatttttcctgctcaaaacatttttctgactattcccgccccgtgctttttaaagtcctcacccgcgaggtggattccagccctgggcgcctcccagcctcgccccagttggcacctggagcgcggcgccccggccccagccccggggaggctgcgtcctctgcctggtcctgggatcctgcaggtcccacctttgtcttagggtgccgtcgcccaccacgtccctcctggtgccgggccctgctgctccccaagtcttcgcttcccctgagccagggttggggtgggtcgcaggggcttgtcctatgataccaggtgttctttcctgtccagctccaccccctggaaaatgcgcttctacgggatgcaggcgtcttactccaaacccgcctgtgattactccaaacccgcctgggccaaagggatcaggagatagagagagggactgagagagcagtagaaaaccagagacagagaaaagaagaatgagaaaggcccataacagatggcaaagtagaggatgggttaggaatttgccaagagacagcaaaagtgaaagaaaaaaaactaagaaagcaggaggagaaaagcaactggagaaatgtagagaaaagctagatgtacagaaagatgaaggacagcaaggtagggagaggggcagcaaagagggaggctcaccagagtgagggagaggaggagggatttggagccagggcagacagagcagagtggtgctggtggcaagaacagatggagaaccacagcagggaggacacctggggatctgaggtgctggagagtggggacagaggggtataacagggaagagagaatttaatagggagagcagaggagacggagagataagagaagaggctgtaatatatagacattgaggaagattgaaagattggggagaaagaacaacaagaggttaaataaggaccgggcgctgtgggtca

SEQ ID NO: 37787 - DNA, 1119 bp, Artificial sequence
  DNA replication origin
tcctctgcttctctacgtcgttctgtagctcctttagcttctcagcttcttcctccacctccctgactccagcttcgatagcttccagccccgggtcaccctcgaccagtcccggctcctccccctcctcttggctgccggtggctcctgaacgaggcccaggtcctggagctcccaggcatggggcgcggggctggagcggctcctcttcgggctccggctccaacagcagctcctcaggctccagttcctcagactccaggccgttcccatcgtcccctgcgccccccggggcaacctccccggcctccccaccggccccgggcacaagatggcgccgccccggcctggatcccggaccgcccgcaggcccagtgctactgccaccaccgccaccgccgccgccgccgccttcgccgctcagactgggctccttttttttcgctctgtcacccaggctgcagtgaagtggcatgatctcagctcactgcaaccccctcctcctgggttaaagcgttttgctgcctcagcctctcgagtagctgagattacaggcagccaacaccacgtctggctattttttgtatttttagtagagaagggctttcattatcttggccatgctggtcttgaactcttgacctggttattcacccgccttgacctcttaaagtgctgggattacaggcgtgagccaccgcgccaggcccataatagttatgttttctgtttctctccttcctcccaccctccaccctcaagtagacgccagtgtctattttcttctttgtgttccagtaaatattttagttcgatatttcatcctgctagttgtgaatttacatgttgtcatgttagtaaacatggctagcttgctctttgacatctgcattggaaattggctgaatgacaacacatgtgtcctttgcaacttttccctgtataaagagtgccatagtggctgcctctgtgcacgtccgcattactacagatatctgaacattcctccaggtcaggcagttgaaagggtgattgcttcttctaggatggggcatttccattttcttagatctgacaagattccccctgcccgcaactgcccaagtgtccttttccagc

SEQ ID NO: 37788 - DNA, 1305 bp, Artificial sequence
  DNA replication origin
gccgagatcacgccgctgcactccagcctgggcaccattgagcactgagtgaacgagactccatctgcaatcccggcacctcgggaggccgaggctggcggatcactcgtggttaggagctggagaccagcccagccaacacagcgaaaccccgtctccaccaaaaaaaaaaacgaaaaccagtcaggcgtggcggcgcgtgcctgcaatcgcaggcactcggcaggctgaggcaggagaatcaggcagggaggttgcagtgagccgagatggcagcagtaccgtccagctttggctcggcatcagagggagactgtggagggagagggagagggagggggagggggagggggagggggagggggagggggagggggagagggagagggagagggactctttttttaaaaatatatatatatttttttccatcaaggtcatcttctgttttttttgggtttttttttattctttttttttccccttctttcctctttttttcctctctctcctaatacacattttttttagtaaggggaataccgtgatgtcgctctagcccggcccctgtagacgcgaccccagagcctgctgttaaaaccactgtagaatggagagcaggaactgctgtagttggtggtcgggcgcggtagcgggctcgtggaagaccccggtctgttgtgctgatgcctggtctgttggttcgctttgggatcaccttgatttgccttcctctaaatagggactcatccaaggccaaggaagtcctcactgactctttgagaactctatatatgcaaaccctttgggatggccactaaatttgtcacagagtatggtaacgtggttgactgaaccacagccatgaaagtgagcttccagctcttctgctgttgcaccgcagtccacattgccagcattgatggaacgggcatcagcctccatcttctcctcaatggacgtgatcactgggccagcattgcctggaggtagactcatattcctctgcttctctacgtcgttctgtagctcctttagcttctcagcttcttcctccacctccctgactccagcttcgatagcttccagccccgggtcaccctcgaccagtcccggctcctccccctcctcttggctgccggtggctcctgaacgaggcccaggtcctggagctcccaggcatggggcgcggggctggagcggctcctcttcgggctccggctccaacagcagctcctcaggctccagttcctcagactccaggccgttcccatcgtcccctgcgccccccggggcaacctcccc

SEQ ID NO: 37789 - DNA, 1310 bp, Artificial sequence
  DNA replication origin
gcagaggggctcctcacttcccagtaggggcggccgggcagaagcgcccctcacctcccagatggggcggctggccgggcggggggctgacccccccaccaccctcccggacggggcggctggccaggcagaggggctcctcacttcccagtaggggcggccgggcagaggcgcccctcacctcctggatagggcggctggccgggcggggggctgtcccccccacctccctcccggacggggcggctggccaggcagaggggctcctcacttcccagtaggggcggccgggcagaggcgcccctcacctcctggatagggcggctggccgggcggggggctgtcccccccacctccctcccggacggggcggctggccgggcagaggggtcctcacttcccagtaggggcggccgggcagaggagcccctcacctcccggacggggcggctggccgggcggggggctgacccccccgacctccctcccggacggggcggctgccgggcggagacgctcctcacttcccagacggggtggttgccggacggaggggctcctcacttctcagacggggcggttgccaggcagagggtttcctcacttctcagacggggcggccgggcagagacgctcctcacctcccagacagggttgcggcccagcagaggcgctcctcacatcccagacagggcggtggggcagaggtgctccccacatctcagacgatgggcggccgggcagagacgctcctcacttcctagatgggatggcggcggggaagaggcgctcctcgcttcctagatgggatggcggccgggcagagacgctcctcactttccagactgggcagccaggcagaggggctcctcacatcccagacaatgggcggccaggcagagtcgctcctcacttcccagacggggtggcggccgggcagaggctgcaatctcggctctttgggaggccaaggcaggcggctgggaggtggaggttgtagtgagccgagatcacgccgctgcactccagcctgggcaccattgagcactgagtgaacgagactccatctgcaatcccggcacctcgggaggccgaggctggcggatcactcgtggttaggagctggagaccagcccagccaacacagcgaaaccccgtctccaccaaaaaaaaaaacgaaaaccagtcaggcgtggcggcgcgtgcctgcaatcgcaggcactcggcaggctgaggcaggagaatcaggcagggaggttgcagtgagccgagatggcagcagtaccgtccagctttggctcggcatcaga

SEQ ID NO: 37790 - DNA, 935 bp, Artificial sequence
  DNA replication origin
ggagcgtctccgcccggcagccgccccgtccgggagggaggtcgggggggtcagccccccgcccggccagccgccccgtccgggaggtgaggggctcctctgcccggccgcccctactgggaagtgaggacccctctgcccggccagccgccccgtccgggagggaggtgggggggacagccccccgcccggccagccgccctatccaggaggtgaggggcgcctctgcccggccgcccctactgggaagtgaggagcccctctgcctggccagccgccccgtccgggagggaggtgggggggacagccccccgcccggccagccgccctatccaggaggtgaggggcgcctctgcccggccgcccctactgggaagtgaggagcccctctgcctggccagccgccccgtccgggagggtggtgggggggtcagccccccgcccggccagccgccccatctgggaggtgaggggcgcttctgcccggccgcccctactgggaagtgaggagcccctctgcccggccacgaccccgtctgggaggtgtgcccagcggctcattgagaacgggccatgatgacaatggcggttttgtggaatagaaaggcgggaagggtggggaagaaattgagaaatcggatgattgccgggtctgtgtggatagaagtagacatgggagacttttcattttgttctgtactaagaaaaatacttctgccttgggatcctgttgatctgtgaccttatccccaaccctgtgctctctgaaacatgtgctgtgtccactcagggttaaatggattaagggcggtgcaagatgtgctttgttaaacagatgcttgaaggcagcatgctccttaagagtcatcaccactccctaatctcaagtacccagggacacaaacactgcggaaggccgcagggacctctgccta

SEQ ID NO: 37791 - DNA, 1874 bp, Artificial sequence
  DNA replication origin
cgctcggcaggctgaggcaggagaatcaggcagggaggttgcagtgagccgagatggcagcagtatagtccagccttggctcggcatcagagggagaccgtggagggagagggagagggagagcgagaggagggagagggagagggagagggagagggagagggagagggagagggagagggagagggagagggagagggagagggagagggagagggagagggagagggagagggagagggagagggagagggagagggagagggagagggagagggagagggagagggagagggagagggagagggagagggagagggagggggagggagagggagattttttttttttttcaaacagagtctcactctgtcctccaggctgtgagtgcactgtcatgatcttggctcactgcaacctctgtctcctgggttcaagtgattcttgtgcctcaacctcccaagtagctgagattacaggtgtgtgccacgacacatggctaatttttgtatttgtatttgtattttattttattttagagtcttattctgtcactcacgctggagtgcaatggtgtgatcttggctcactgcaaccttcacatcccaggttcaagtgatcctccaacctcagcctcctgggtagctgggattacagatgcccacaaagcctggctactttttgtatttttagtagagatgaggtttcaccacgttggccaggatggtcttgaacgctgacctcaagtaatccacccaccttggccttccagagtgctagtattacaggcttcagccattgcacctgacccaatttttatatttttggtacagacagggtttcaccatgtttgccaggctggtctcaaactcctgacctcaagtgatccttccacctcagcttcctaagtagctggggtgacagaaacacagatgtgcaccaccatacctggctaagtatttgtatttttgatagagaaggagtttcaccatgttgcccaggctggtctcaaacttctgagctcaagcaatgtacctaccttggtctccgagagtgctgggatgataggcatgagccaccgcacccagcctctgcaagtggtttggtcaggtctgggtctgtgccttgaaggggagctcattccagcccagatccctactgctgcagcgtgtgtgtgggcttctccagaaggggagtgggagttttcctataggagtttattgtccctggtatggtgggcagcagagtggaccatatttcccagggtgaggtctcctttgtatgtgtcgttgttttacagggagggggtatgttgactctgagcaataaacaacatatttctaacattcatgattgacttctaaagactctgggtatgtgaagaagaaactcagaagaggaagaggaaagcaaaggagtcagggatggctcttcctcaggtgagatgatattctctgtggattgttctgtctccttcctttcagaaatgctgggccttggagttgggaaacttctctgagtctgaagcatcctgcgtgacaggtttgctcacactcacccatgccttccctcagtccctctcatctcacctagattccatctctcgtgacccaatgacatgaacatgagaagaggttgcagtaggcatggtcctgggaagggctcacacacagacatggatggagacggggtgagggtcctatggtgtcagtggtgttgggcggcagggattgttcagggccgcatctggatgcactgtcagttttctgtggaccaagattagagtagctgccaatggaagtcacatattaatgtgcacaaagaacatggtaaattctagaaaagaccgataagaggaaatgttttctgcctga

SEQ ID NO: 37792 - DNA, 1229 bp, Artificial sequence
  DNA replication origin
accctgagtggacacagcacatgtttcagagagcacagggttggggataaggtcacagatcaacaggatcccaaggcagaagaatttttcttagtacagaacaaaatgaaaagtctcccatgtctacttccatccacacagacccggcaaccacccggcctctcaattttttccccacctttcccgcctttctattccacaaaacctccattgtcatcatggcccatccccaatgagccgctgggcacacgtcccagacggggtcgtggccgggcagaggggctcctcacttcccagtaggggcggccgggcagaggcgcccctcacctcctggatagggcggctggccgggcggggggctgaccccccaacctccctcccggacggggcggctggccgggcagaggggtcctcacttcccagtaggggcggccgggcagaggcgcccctcacctcccggacggggcggctggccgggcagaggggctcctcacttcccagacggggtggctgccggacggaggggctcctcacttctcagacggggcggttgccaggcagagggtttcctcacttctcagacggggcggccgggcagagacgctcctcacctcccagacagggttgcggcccagcagaggcgctcctcacatcccagacagggcggcggggcagaggtgctccccacatctcagacgatgggtggccgggcagagacactcctcacttcctagatgggatggcggcggggaagaggcgctcctcgcttcctagatgggatggcggccgggcagagacgctcctcactttccagactgggcagccaggcagagacgctcctcacttcccagatggggtggcggctgggcagagcctgcaatctcggcactttggggggccaaggcaggcggctgggaggtggaggttgtagcgagcggagatcacgccactgcactccagcctgggcaccattgagcactgagtgaacgagactccgtctgcaatcccggcacctcgggaggccgaggctggcggttaggagctggagaccagcccggccaacacagcgaaaccccgtctccaccaaaaaaaacatgaaaaccagtcaggcgtggcggcgcgcgcccgcaatcgcaggcgctcggcaggctgaggcaggagaatcaggcagggaggttgcagtgagccgagatggcagcagtatagtccagccttggctcggcatcaga

SEQ ID NO: 37793 - DNA, 748 bp, Artificial sequence
  DNA replication origin
atgtggggagcacctctgccccgccgccctgtctgggatgtgaggagcgcctctgctgggccgcaaccctgtctgggaggtgaggagcgtctctgcccggccgccccgtctgagaagtgaggaaaccctctgcctggcaaccgccccgtctgagaagtgaggagcccctccgtccggcagccaccccgtctgggaagtgaggagcccctctgcccggccagccgccccgtccgggaggtgaggggcgcctctgcccggccgcccctactgggaagtgaggacccctctgcccggccagccgccccgtccgggagggaggttggggggtcagccccccgcccggccagccgccctatccaggaggtgaggggcgcctctgcccggccgcccctactgggaagtgaggagcccctctgcccggccacgaccccgtctgggacgtgtgcccagcggctcattggggatgggccatgatgacaatggaggttttgtggaatagaaaggcgggaaaggtggggaaaaaattgagaggccgggtggttgccgggtctgtgtggatggaagtagacatgggagacttttcattttgttctgtactaagaaaaattcttctgccttgggatcctgttgatctgtgaccttatccccaaccctgtgctctctgaaacatgtgctgtgtccactcagggttaaatggattaagggcggtgcaagatgtgctttgttaaacagatgcttgaaggcaaaa

SEQ ID NO: 37794 - DNA, 1091 bp, Artificial sequence
  DNA replication origin
aaagtccttaccgcgaggcggattcccgccctgggcgcctcccagtcttgtcttaaggcgccgtcgccccccacctccctcctcgtgccgggcccttatgctccccaggtcttccctccgtaatcaccgtttctcctgagcccgcgttggggaggtgcccggggctgtcctatgacaccgtgtgttcttgcctgccctgcaccagcctctggaaaatgcgctcctccgggatgcaggcatcttacttcaaagccctcctgtgattgtgttggccaaagggatcgggagactgagagagagagcagtagaaaacctgagacagagaaaagaagaatgagaaaggccataacagatggtagcgtagaggatgggtgaaggatttgccaagagacagcaaaagtggaaaaaaaaaaaaaaaaaaaaaggataagaaaaacaggaggagaaaaggaactggagaaaagtagagaaaagcttgatgtacagagagatgaagaagagcaaggtagggagggggcagcaaagagggaggctcatcagagtgagggagaggaggaggggtttggagccagggcagacagagcagagtggtgctggtggcaagaacagagggagaagcacagcagggaggacacctggggatctggggtgctagagattggggaaagggggatttaacagggaagagataatttaacagggagagcagaggaggcgcagagatgggagaagaggcagaaatatatggagattgaggatgatcgaaagattggggagaaggagcaacaagaggttaaagaatttgcgacgatggagcagaagaggtggaagagaagtaatagagggaagaaggggataaacagcaggagaggagaggggtacaaaatgaagagcagaatcccagggaaaaagaaaagaaaacaagagctagagagagaaggggagaatgagagatatgtacagaattagggagggaagcacagtaatgaagacagaggggctgggcgcagtggctcacgcctgtaatcccagcactttaagagactgaggcaaggggattgcttgagtccaggagttcgaggccagcctgg

SEQ ID NO: 37795 - DNA, 1096 bp, Artificial sequence
  DNA replication origin
aagtcgccctgaggctagacccgtccccggtctttctgctatagggcaacgtatacacttcgtatctcgtagttttcctgtttgtaactattttctgactccctccaccccgtgctttttaaagtcctcacccgagaggtggattcccaccctgggcgcctcccaccctcaccctcgtcggtccctggagcgcagcgccgcctcccccgtcccgaggaggccgcatcctctgcctggtcctgggatcctgcagaccccacccttgtcttaaggagccgtcgccccctaactccctcctcgtgccgggccctgctgctcgccaggtctcccctcagcagtcgccgcttcctctgagtccgcgttggggaggtgcccagggcttgtcctgtgacaaggggtgttcttgcctgcccagccccagcccctggaaaatgcactcctctgggatgcaggcgtcttactcaaaactctcctgtgattgtgtgggccaaaggaatcaggagaccgagcaagggcagtagaaaactcgagacagagaatagaacaatgagaaaggcccataacagatggcaaggtggaggatgggtgagggatttgccaagagacagcaagagtgaaaagaaaaagttaagatagcaggaggagaaaactggagaaatgtggagagaagctagatgtacagagagatgaaggacagcaaggtagggagaggggcagcaaagagggggacctggctcatcagagtgagggagaggaggagggatttggagccagggcagacagagcagagtggtgctggtggcaagagggagaaccacagcagggaggacacctggaggtcgggggtgccagagagtggggacagggggtttaacagggaagagagagtttaacagggagagcagaggaggcgcagaggtgggagaagaggtggtaatgtatggagattgaggacgatcgaaagactgggaagaagaagcaacaagaggttaagtaagttgtgaggatggagcagaagaggtggaagagaagaaatagaccaaagaaggggatggtgcgcacttgtaatcccaactactctggaggctgaggcagg

SEQ ID NO: 37796 - DNA, 902 bp, Artificial sequence
  DNA replication origin
ggcctggtggcgcatgcctgtaatcccagctactcaggaggctgaggcaggagaatcgcttgaacccaggaggcggaggttgcagtgagccaagaccgagccactgcactccagcctggcgacagagcgagactccgtctcaaaaaaaaaaaaaaaaaaaaaaaaaaatttgctctgggcgaaggaagaatggtagaaatttccaggtatgtggggaccccacgtcccctgggacagaagtcccagggacctgcggagcgcagacataacacaacacagagcaaaactcaccgctgcggtgactttcactccacgcgatccgcttcccggtttacgctaaactgggcgctcgggacagaagccaggtctcggcgggacatggcagggggtgggcggggcctgggcgaggtgggggcggggcgcgaggcggagagaccttcccctatagaaccggcagggggcggggcgcgaggcggagagaccttcccctatagaaccggcagggggcggggcgcgaggcggagagaccttcccctatagaaccggcagagggcggggcgggatctgtgagtctctcagcctcggcgtgtttttgggttttggagacgagacctgccaggaaagctgaggcatgattcaaaagccctggaactgtctggaaggggaatgcaaaccagaatgtgaaatgcaaagccctgcctgggcggaacgtattatttcatgctgacgaccacagaacagaatagaaatcctctccctttctattctccactcactcaagagggagagtccaccctgtgtcagcttcagagacttccctagagccaccgcctgggatgcgggatggagtgctcaggccagggaggagtgaggtcaccacctgctggttaaacacagcagag

SEQ ID NO: 37797 - DNA, 977 bp, Artificial sequence
  DNA replication origin
ccatcttgctctcattgagccttgccctctatcctgcaggcctccccctcataagcatggcttcctctgacccagcgttgaaggaggtgacttgggcctgtctgttcacctccaatgttcttttgtcccagattccactccactaggaaaagtgctttcagtaggtgggcatcttattccatccccttccctgtaaatatgtggccacaggggatcaggagaaagagagacaggagaaagaggaaatagaaaaactgagaaggagtgagaaggacgggtgagaaccatgaacagatggcaacgcagaggatgggtggggaatttgcagacagacactgagagtgaaagacaaagctgagaaagtgtggggcagggagcaactggagaaatatagagaaaagctgggtctccagagagatgaaggacagcaagatagggagaggggcagaaagggggaggctcctcagacagagagtgggggagaggaggaggaatttggagtcagggcagacagcaatgtggtgctgggacagcaagacgggacagctggtgacaaggagagcagagggagaaccacagtatgggaaggctttggatctgggggtgccagagagtggggacaaggggtgtaacagggaagaggggatttaatagggggagcagagggggagcaaagatgagggaagaaagaggcagaaatatgtggagattgggattgggacaatgaaaagtttgggcagaaaggaataagaggtggaagaagttgtaggaatggagcagaacagggggaagagaaggaatggagggaagaaggggagaaagagcaggagaggagaggggctcaaaatgaggagcagaaacctggggggaaacatcggaaaaaaagagccagggagggaaggtgaggatgagatatgtacagaatgagagagggaaacacacaggaaggaagaaggaggggaccttggttcaggtga

SEQ ID NO: 37798 - DNA, 933 bp, Artificial sequence
  DNA replication origin
aagtcgccctggggtgcggtctgggcaatgggaaaggggtggaagagggtggggtgggagggtgggactaccgtgggggcggggcctgggcagtggggaaggggtggggtgagaagggtaaaagtcgccctgggctggggtctgggcaacgggaaagggctggaagagggcggcgggatgggagggtggaagctgctatggtgcagcctgggctgtgggaagcgggcagggccgggaaaggagcgggcctgggctctctactcctcttggccccaggtcattttctgctatgtcagcctttctctccactaggactggatcaacagcattgcactgctaaaataaagtttcagctaattgaaattagccggggatgcttcctgcttattttcagttaataagcagggatgcttccggcttattttcagtccagggacgcttcctgcttattttcagttaatccaacatttcaaacaatttaaggcaaaagaacagaatggtactgggccacttaattgaaggctaaggtttttttactcttacattgaaaacgatttaagtgaaaaactcattttgtttgcaggtggagacaggcatcctaccattaagaggatcacaactcatcttagctcagggtaccaggaggggtgcaggggcatcagcggatggtccctgtggggcagtggtttcatcctggaactggcaattagaaccgtttaattaatccgggacctgatttgtctgtttagaggatgaaacgaaggtgaaatttctacttgtgctgtgttcagtttcatagtgacaacgatcggaacatcgtttccatttctatttgccaggcaccgggatggaagaaagagaactctgggcttaggtccaggggcgtttcaaggaccctggaccagggtgtgtggaggaacggtatctggtaat

SEQ ID NO: 37799 - DNA, 813 bp, Artificial sequence
  DNA replication origin
cagtctccaaatcaaggggagggttcaaatcatagacaagctgcagagccaccgggtctcagagtttcccgcggaaacgctgggactcgctaccaatcccatgagcgcacctggggattttaacgtctggtgggatggtggattccgagtgtggttggacagggctggagtgccctgaaaggcctgaatgctctcctgccggtgagaaaactggaagcggattctgggagggagctgtcgccagcgagaggcgggtcttggatagtggggagaggccaggtggggagggtggaagccaccgtgaggtggggtctgggcaatgggaaaggggtgcaagagggtcgtgtgggagggtggaactgctgtgggcggggcctgggcagtggggagggggcggggtgaggagggtgaaagtcgccctggggtgcggtctgggcaatgggaaaggggtggaagagggtggggtgggagggtgggactaccgtgggggcggggcctgggcagtggggaaggggtggggtgagaagggtaaaagtcgccctgggctggggtctgggcaacgggaaagggctggaagagggcggcgggatgggagggtggaagctgctatggtgcagcctgggctgtgggaagcgggcagggccgggaaaggagcgggcctgggctctctactcctcttggccccaggtcattttctgctatgtcagcctttctctccactaggactggatcaacagcattgcactgctaaaataaagtttcagctaattgaaattagccggggatgcttcctgcttattttcagttaataag

SEQ ID NO: 37800 - DNA, 1261 bp, Artificial sequence
  DNA replication origin
ataggccttgctgtgtgggcccggagacgcttccttttgggttaaagtcgccctgaggctggtccctgcccccggtctttctgccttgggccaagtaaacacggcctttcccggttttttaaacgtttaagcaggattttcctgcttaaaatcctttactgactcctcctcccgccccgcatcgcttaaagtcctcaccgcctgccctgggcgcctcccagcctcgctctcgtcggcccctggagcgcagcgccgccgacccagtcccggggaggccgcgcctccgcctggtcctgggatcctgcacatcccacccctgtcctaaggcgccgtcgccccccacctccctcctcctcgtgccgggccctgctgctccccaggcctccccttcgcagtcaccgcttcccttgagccctcgttggggaggtgcccggggcccgtcctgtgacacccggtgtttttgcctgcccagctccaccccctggaaaatgtactcctccaacatgcagacatcttactacaaaccctccagtgaatgtgtggcccaagggaatcaggagaaagagagacaaagagccactgagaggagatggaaaaaccaagaaagagaaaagaaaaatgagggagacccataaacagatggcaaagtggaggatgggtgagagatttgcagcgacagagtgaaagaagcagtcaagaaagtagcaggggcagaaaagcaattggcgaaatgtagagaaaagctcgatgtcccgagatgcaggacaacaagataaggagagggacagcaaagaaggagcctcctcagacagagagtgggggagaggagaaaggatttggccgagggcagacagagctgcgtggtgctgggacagctggaggggacagctggtgacaaggcgagcagagggagcaccacaacacagggaggcctgggatctgggagtgccagagagtggggataagcgggtgtaacagggaagaggggatttaacagggagagcagaggaggcgcggagatggggtaagaaagaggcagaaatagatggagattgggacgatgaaaagattggaaagaaaacgccacaagaggtgaaacaaattggaagaatggagtagaacagatataaggggaaaaaacaaagaagggagaaacagcagaagaaaaaagaggcacaacatcgtcagaatcctagggggaagataaaaggggaaaaaggctggagagacaaggtgaaagtgagaggcacaaaatggggga

SEQ ID NO: 37801 - DNA, 1439 bp, Artificial sequence
  DNA replication origin
cactccaccccaggtgaatacaggcctcgcagtgtgggtccggagtcgcttccctttgggttgaagtcgctttgaggctgctccccgtccccggccttttgcttcttcctcccgcttaaaaccttttcctgaccccctcccccatccccgggctttttaaagtcttcacccaagaggtgtattcccgtcctgggtgcctcccagccttgccctcgtcggcccctggagcgcagcgccgcagctgcagccgcagtcccggggagccttgcgtcctctgcctggtcctgggatcctgcagaccccacccctgtctgaaggcgctgtcgcgccccacctccctcctcctcgtgccgggccccgctgctccccaggcctcccctgagcccgcgctggggaggtgctcagggcctgtcctgtgacacccgatgttcttgcctgccctcctccaccccgtggaaaatgcgctcctccaggatgcaggcgtcttaccccaaaccgtcctgtgaatgtgtgggccaaagggatcgagggacagagagagcagtagaaaacctgagacaggaaggaatgaggcaaaccaataaacagatggcaaagtagaggatggttagagattttcagagacagtaagagtggaagaagaagccgagaaagtagcagggagagaaaagtaactagacacatttcgagaaaaagcacagtatccagagagatgaaggacagccaggtagggagaggggcagcaaaggaggaggctcctcagacagagagtgggggagagcagaagggatttggagccagggcagacagggcagtgtggtaccgggacagcaagagggggcagccgatgacaaggagaagcagagggagaaccacagcacggggaggcctgggatctgggggtgccaaagagtggggacaacggtgtgtaacagggaagagggaatttaacagggagtgctgaaatggggaagaaagagccagaaatatgtggagactgggacaatgaaaagattaggaagaaagaggaattaaatacattgcaagaatggaaagagcaagtggaagagaaagaatagagggaagacggggaggagcagcaggagaggagaggggctcaaaatgagcagaatcctagggagaaaataaaggggaaggaaagagctagagaaagaaggtgagaatgagagcgatgtacggaacgagggagggaaacacaccataatgaggaaagagggggaccccaggtccaggtgagttgtgaactgactggatgtgatgactaccttttgacctgttgatttctgtctttataagtttaaaatgcacagatgatgagaattgcaaagctcctgtctattaaggctggtgcattttataattatggcatcagaagttagcttccacttgcaatccctgttaaggcagagggaagtgac

SEQ ID NO: 37802 - DNA, 1062 bp, Artificial sequence
  DNA replication origin
ccctgtccccggcctttcgcgtcttcctcccgcttaaaaccctttcctgacccctcctcccgccccgggctttttaaagtcctcgcccgcgaggtggattcccgccctgggtgcctcccagcctcgccctcgtcggcccctggagcgcagctcctcagccccggtaccggcgaggccgcgtcctctgcctggtcctggcatcctgcagaccccacccctcttctaaggcgccgtcgccccgccacctccctcctcctcgtgccgggccctgctgctccccaggcctccccttcgcagtccccgcttctcctgagcccgcgctggggaggtgcccggggcctgtcctgtgacacccggtgttcttgcctgcccagctccagcccctggaaaatgcgctcctccaagatgcaggcgtcttagtccaaaccttcctgtgaatgtgtggaccaaggggattagcaggtagagaaaggggcagagacagagagagaagtagaaaaactgagaggaaagagtgagggaaacccgtaaccagatggcaaagtagaggatgggcgagggatttgcagatggtaagagaaggagctgagaaggcagaaggagaaaagcaactggggaaatgtagagaaaagctcgatgtccagagacatgaaggacagcaaggtagggagagggccagaaagtgggaggctcctcagacagagtccgggagaggaggagggatttggagccagggcagacaagcagcgtggtgctgggacagcaagaggggacagccggtgacgaggagagcagaaggagaaccacagcagggggaggcctgggatctgggggtgccagagagtggggcaagaggtgtagaagggaagaggagattcaacagagggagcagagatgggagaagaaagaggcagaaatatatggagactggggacaatgaaaagactggggagaaagaggaatcagagttgaaacaaggccccagaatgggacagaacaggtgcaagcggaggaagaaggggagaaatagcaggagatgagaggggctcagaacgacgcgca

SEQ ID NO: 37803 - DNA, 961 bp, Artificial sequence
  DNA replication origin
cctactggaaagtgaggagcccctctgcccggccagccgccccgtccgggagggaggcgggggggggggggtcggccagccgccctgtccgggagggaggtggggggggtcagccccccgcctggccagccgccccgtccgggagggaggtggggggatcagccccccgcctggccagtcgccccgtccgggaggtgaggggcgcctctgcccggccgcccctactgggaagtgaggacccctctgcccggccagccgccccgtccgggagggaggtgggggggacagcccccccgcccagccagccgccctatccaggaggtgaggggcgcctctgcccggccgtccctactgggaagtgaggagcccctctgcctggccagccgccccgtccgggagggtggtgggggggtcagccccccgcccggccagccgccccatccgggaggtgaggggcgcttctgcccggccgcccctactgggaagtgaggagcccctctgcccggccacgaccccgtctgggaggtgtgcccagcggctcattggggatgggccatgatgacaatggcggttttgtggaatagaaaggcgggaagggtggggaaaaaattgagaaatcggatggttgccgggtctctgtggatagaagtagacatgggagacttttcattttgttctgtactaagaaaaattcttctgccttgggatcctgttgatctgtgaccttatccccaaccctgtgctctctgaaacatgtgctgtgtccactcagggttaaatggattaagggcggtgcaagatgtgctttgttaaacagatgcttgaaggcagcatgctccttaagagtcatcaccactccctaatctcaagtacccagggacacaaacactgcggaaggccgcagggacctctgcctaggaaaaccagagacctttgttcacttgtttatctgctgaccttc

SEQ ID NO: 37804 - DNA, 1293 bp, Artificial sequence
  DNA replication origin
ggggcggccgggcagaggcgcccctcacctcccggatggggcggctggccaggcggggggctgatccccccaactccctcccagacggggcggctggccgggcggggggctgaccccccacctccctcccggactgggcggctggccgggcggggggctgacccccccacctccctcctggacggggcgtctggccgggcagaggggctcctcacttcccagtaggggcggccgggcagaggagcccctcacctcccggacggggcggctggccgggcggggggctgacccccccacctccctcccggacggggcggctggccgacccccccccccgcctccctcccggatggggcggctggccaggcagaggggctcctcacttcccagtaggggcggccgggcagaggagcccctcacctcccggacggggcggctggccgggcggggggctgaccccccccacctccctcccggacggggtggctgctgggcggagacgctcctcacttcccagacggggtggttgccggacggaggggctcctcacttctcagacggggcggttgccaggcagagggtttcctcacttctcagacggagcggccgggcagagacgctccccacctcccagacagggctgcggcccagcagaggcgctcctcacatcccagacagggcggcggggcagaggtgctccccacatctcagacgatgggcggccgggcagagacgctcctcacttcctagatgggatggcggcggggaagaggcgctcctcgcttcccagatgggatggcggccaggcagagacgctcctcactttccagactgggcagccaggcagaggggctcctcacatcccagacgatgggtggccaagcagagacgctcctcacttcccagacggggtgggggccgggcagaggctgcaatctcggctctccgggaggccaaggcaggcggctgggaggtggttgcagcgagccgagatcacgccactgcactccagcctgggcaccattgagcactgagtgaacgagactccatctgcaatcccggcacctcgggaggccgaggctggcggatcactcgcggctaggagctggagaccagcccggccaacacagcgaaaccccgtctccaccaaaaaaaaaaacgaaaaccagtcaggcgtggcggtgcgcgcctgcaatcgcaggcactcggcaggctgaggcaggagaatcaggcagggaggttgcagtgagccgagatggcagcagtaccgtccagccttggctcggcatcaga

SEQ ID NO: 37805 - DNA, 1217 bp, Artificial sequence
  DNA replication origin
ctctgggggtcgcatcgctttgggttaaaatcacacaggctggtcctgcccgcggtctttcggccttcagaccatgcagacacctcctttcctgcgccgtttcctgcttaaaaccctttactgacctgcgccctgtgaagtcctcatctgcgaagtgggtgcaggattttaccgtcccctaacctcgccctagtcagctactggagcgttagcgccgcagccccagtcccggggaggccgcgcctctgcctggtcctgggatcctgcataccccacccctctcctaaggcgccgtcgccccccacctccctcctcctcgtgccgggccctgctgctccctaggcctccccttcgcagtcaccgtttcccctgagcccgcgttggggaggtgcccgggccttgtcctgtgatacccggtgttcttgcctgcccagctccacccgctggaaaatgtgctcctccaggatccaggtgtcttactccaaaccctccctgtgaatgtgtgggccaaggggatcaggagacagagaggggggctgagagaaaagtagaaaaacggagacagaggaaagaatgagggaaaccagtaaacatggcaaagtagaggatgggtcaggatttacaaagagacagtaagggtgaaagaagtcgctgagaaagtaacaggatggagaaacaactggagaaatgtagagaaaagctcgctgtctagagagatgaaggacagcaaggtagggagaggggcagctcctcagacggagagttagggagaggagggggtatttggagccaggatagacagagcagcgtggtgctgggacagcaagaaggggcagctggtgacaaggagagcagagggagaaccacagcagggggagacctgggatctgggggtgccaaagagtggggacaaggaagtgaaacagggaagaggggatttaacagggagagcagagataagggaagaaagaggcagaaatagatggagattggggacaaccaaaagacgggtgaaagaggaataagaggtgaaacaagttgcaagaatggaacagaacaagtggaagagaaggatagagggaaggagaaacagcaggagaagagaggggctcaaaatgaggagcagagacccaggctgaaacacagaaaagaaacaaggagagagaagaagagaatgagagagatgtacagaatgagggagggaaacacacaggaag

SEQ ID NO: 37806 - DNA, 1644 bp, Artificial sequence
  DNA replication origin
tccagttgtttctccatcctgttactttctcagcgacttctttcacccttactgtctctttgtaaatcctgacccatcctctactttgccatgtttactggtttccctcattctttcctctgtctccgtttttctacttttctctcagcccccctctctgtctcctgatccccttggcccacacattcacagggagggtttggagtaagacacctggatcctggaggagcacattttccagcgggtggagctgggcaggcaagaacaccgggtatcacaggacaaggcccgggcacctccccaacgcgggctcaggggaaacggtgactgcgaaggggaggcctagggagcagcagggcccggcacgaggaggagggaggtggggggcgacggcgccttaggagaggggtggggtatgcaggatcccaggaccaggcagaggcgcggcctccccgggactggggctgcggcgctaacgctccagtagctgactagggcgaggttaggggacggtaaaatcctgcacccacttcgcagatgaggacttcacagggcgcaggtcagtaaagggttttaagcaggaaacggcgcaggaaaggaggtgtctgcatggtctgaaggccgaaagaccgcgggcaggaccagcctgtgtgattttaacccaaagcgatgcgacccccagagtctcgcggcaaagtctgaatttacatggaatggagggagccgtgcggggactttaagggctatacgaacccccggacatcgggtacggaggagcaggggactccgaaacgcaggtttaatctagatagagggaaactcacgcggcgactaacagccttcactccaagagatctgcttccgggtttgcaagaaactgcccgcgcagtaggcaaaggggcgggttgcggtggggaaaggccaggcgttgggagggactgagagcatagggtgggcggggccggggcggggcctgaaccctggaggcggaggttgcaatgagccgatatcgcgccattgcactccagcctgggtgacagagtgagacttcgtctctcccaaaaaaaaaaaaaaacaaaacttaggctatctaaaagtttaaccaatggccagtaatataagcaatcatgcatatgtaatgaaggcgccataacaacccaaaaggagaggattcagcggagcttctggataggtgaacactgggaggctcctgcagcgtggtgcacccagggagggcaccaaggctcaacgccccttctcccatgcctcacctcactgatcccttccatctggctgttcttctgtcaactttgtaatatcctttataatacgtaaatctatgtaaagtgtttccctgtattttgtgagccactctagcaaattcgttgaacctgaggagggggtcaagggactcctggatttatatctgatctgtaagcacaagtcacaacctctgcttgagactggcattgaaatgtgtgcactattgtgggactgagccctcaacgtgtgggatctgatgccatgtcccggcaaaatggaacggaatgagagaacacgcacctggtgtctgtggcaggattgcttgcttggtgtgtgtgggaaaacccagtacctctgggctaactgtagcattctgtgttg

SEQ ID NO: 37807 - DNA, 1162 bp, Artificial sequence
  DNA replication origin
aaagcagaaagaccagattcaggaagtaggcttagagcgactttaacccaaagggaaagcgatctccgcattctcacagcaacgtcagaatttacctggggtggagggcgcggtgtggtcattttaagatctgtagggacccctccagacccgggggatggaagaagggggactgcgaagcgcagatttaatctagagagagcgaaactcaggctcggcggcgcagccttcactccccgcgatccgcttccgggtctacagaaaaccgctcgcagcggagactgggcggtctgggggcggggaaggggcggggcctggccagggagagaccggcagggggcggggccggaggggactgaggtggcctaggggcggggcctaggcggggcgtgaccggcacagggagtgggctggggagaaaacgcgaagggtggggcggggcctggacaggcagggggcggggccgggagggacctaaggaaggcgggtgggagcctgcgtttccagccacctggtacccagagcgtccctattttctgggtttgggaacacaagtctatttcgtgtcctgcggagcagttttgctttctgcttattttaagttaatgtctcaattttaaggtaaacccttagagttatgtgggccatctctgttggaaagtaagatgttttcctaagttgcaaacttaagttgctcaactatttttaaaaagttactgctttttctaaagcaagagttaatatcaccggtattagccctcctcgctccacaccccaggtatttaccatatgaaaatctctgcaactgtgcacagggctgactctctccctccatggtgaatgggtgtagaatgtggaggggattgcattaagttctgttgagaggtgacttgaaattacttacacattctgcccaggcagagttttgcatttcacattctagtttgcatacccttcacagacattttcagggctttttagttaagttgcttaaattaattcaaattgcagaaactttcctggattcaatctaccccaaaccgacacccccagagatgccagatccccacccagagttgcttcagtctcactagcagctcttctgtcctacctgctggcagtaataaccatttcaacgtgaaccatttcaacttctgtccca

SEQ ID NO: 37808 - DNA, 974 bp, Artificial sequence
  DNA replication origin
aggataagaatttttctcagtacagaacaaaatgaaaagtctcccatgtctacttctttctacacagacacggtaaccatccgatttctcaatcttttccccacctttccccgctttctattccacaaaaccgccattgtcatcatggcccgttctcaatgagctgttgggtacacctcccagacggggtggtggccgggcagaggggctcctcacttcccagtaggggcggccgggcagaggcgcccctcacctcccggacagggcggctggccaggcggggggctgacccccccacctccttcccggacgaggtggctgccaggcggagacgctcctcacttcccagacaggttggctgccgggcggaggggctcctcacttctcagacggggcggccgggcagagacgctcctcacctcccagacggggtcgcggccggttagaggtgctcctcacatcccagatggggcggcggggcagaggcgctccccacatctcagacgatgggtggctgggcagagacgctcctcactttccagactggacagccaggcagaggggctcgtcatgtcccagacgatgggcggccaggcagagacgctcctcacttcccagacggggtggtggccgggcagaggctgcagtctcggcactttgggaggccaaggcaggcggctgggaggtggaggttgtagcgagccgagatcacgccactgcactccagcctgggcaccattgagcactgagtgaaccagactccgtctgcaatcccggcacctcgggaggcggaggctggcggatcactcgcggctaggagctggagaccagcccggccaacgcagcgaaaccccgtctccaccaaaaaaatacgaaaaccagtcaggcgtggcggcgcgcgcctgcaatcgcaggcactgggcaggctgaggcaggagaatcaggcagggaggttgcagtgagctgagatggca

SEQ ID NO: 37809 - DNA, 909 bp, Artificial sequence
  DNA replication origin
gccgagactgcagcctctgcccggccaccaccccgtctgggaagtgaggagcgtctctgcctggccgcccatcgtctgggacatgacgagcccctctgcctggctgtccagtctggaaagtgaggagcgtctctgcccagccacccatcgtctgagatgtggggagcgcctctgccccgccgccccatctgggatgtgaggagcacctctaaccggccgcgaccccgtctgggaggtgaggagcgtctctgcccggccgccccgtctgagaagtgaggagcccctccgcccggcagccaacctgtctgggaagtgaggagcgtctccgcctggcagccacctcgtccgggaaggaggtgggggggtcagccccccgcctggccagccgccctgtccgggaggtgaggggcgcctctgcccggccgcccctactgggaagtgaggagcccctctgcccggccaccaccccgtctgggaggtgtacccaacagctcattgagaacgggccatgatgacaatggcggttttgtggaatagaaagcggggaaaggtggggaaaagattgagaaatcggatggttaccgtgtctgtgtagaaagaagtagacatgggagacttttcattttgttctgtactgagaaaaattcttatcctgttgatctggaaccttacccccaaccccgtgctctctgaaacatgtgctgtgtccactcagggttaaatggattaagggcggtgcaagatgtgctttgttgaacagatgcttgaaggcagcatgctccttaagagtcatcaccactccctaatctcaggtacccagggacacaaacactgcggaaggccgcagggtcctctgcctaggaaaaccagagacttttgttcacttgtttatctgctgaccttccctcc

SEQ ID NO: 37810 - DNA, 829 bp, Artificial sequence
  DNA replication origin
acctccacctcccagccgcctgccttggcctcccaaagagccgagattgcagcctctgcccggccgccaccccgtctgggaagtgaggagcgtctctgcctggccgcccatcgtctgggatgtgaggagcccctctgcctggctgcccagtctgggaagtgaggagcgtgtcttcccggccgccatcacatctaggaagtgaggagcgtctctgcccggccgcccatcgtctgggatgtggggagcgtctctgccccgccgccccatctgggaagtgaggagcgcctctgcccggccgccccgtctgagaagagaggagcccctccgcccggcagccaccccgtccagaaggtgaggggcgcctctgcccggccgcccctactgggaagtgaggagcccctctgcccggccaccaccccgtctgggaggtgtgcccaacagctcattgagaacgggccaggatgacaatggcggttttgtggaatagaaaggggggaagcgtgggggaaaagattgagaaatcggatggttgccgtgtctgtgtagaaagaggtagacatgggagacttttcattttgttctgtactaagaaaaattcttctgccttgggatcctgttgatctgtgaccttacccccaaccctgtgctctctgaaacatgtgctgtgtccactcagggttaaatggattaagggcggtgcaaggtgtgctttgttaaacagatgcttgaaggcagcatgctccttaagagtcatcaccactccctaatctcaagtacccagggacacaaacactgcggaaggccgcagggtcctctgcctaggaaaacc

SEQ ID NO: 37811 - DNA, 976 bp, Artificial sequence
  DNA replication origin
ttaacaaagcacaccttgcaccgcccttaatccatttaaccctgagtggacacagcacatgtttcagagagcacagggttgggggtaaggtcacagatcaacaggatcccaaggcagaagaatttttcttagtacagaacaaaatgaaaagtctcccatgtctacctctttctacacagacacggcaaccatccgatttctcaatcttttcccccacgcttcccccctttctattccacaaaaccgccattgtcatcctggcccgttctcaatgagctgttgggcacacctcccagacggggtggtggccgggcagaggggctcctcacttcccagtaggggcggccgggcagaggcgcccctcaccttctggacggggtggctgccgggcggaggggctcctctcttctcagacggggcggccgggcagaggcgctcctcacttcccagatggggcggcggggcagagacgctccccacatcccagacgatgggcggccgggcagagacgctcctcacttcctagatgtgatggcggccgggaagacacgctcctcacttcccagactgggcagccaggcagaggggctcctcacatcccagacgatgggcggccaggcagagacgctcctcacttcccagacggggtggcggccgggcagaggctgcaatctcggctctttgggaggccaaggcaggcggctgggaggtggaggttgtagcgagccgagatcacgccactgcactccagcctgggcaccattgagcactgagtgaacgcgactccgtctgcaatcccggcacctcgggaggccgaggctggcggatcactcgcggctaggagctggagaccagcctggccatcacagcgaaaccccgtctccaccaaaaaaatatgaaaaccagtcaggcgtggcggcgcgcacctgcaattgcaggcactcggcaggctgaggcaggagaatcaggcagggag

SEQ ID NO: 37812 - DNA, 894 bp, Artificial sequence
  DNA replication origin
ccatgtcagggattagagccataaggtgaacaacccctaccgtacacaaagacgtatattcacacatagatgtacacacacaggtgcaaacacatgcatacgtgcacagcagcacaaatcaaaggaacatcacatacatatacacagctagacactcgccctcacatacatattccaccacaggctcacacccacccacacacctatcacaaacccacactcatattcaaatacactcactatgcccagcactcacacagactcacacagtcccactgacctttaaacaccacactcgcagagtcagcacacgcatttgtatcttgataccaggttcctatctggagaatagcggcggtcatgcctctattgtgattcagcctttatacttcttctcactttgcaccactcatgatgatgacgtcaccatgtgcaatgtataaaatgatgtgcacgttgctaatttggtccaaggcattaagtagaaaagttggagtactggggtcgatattgcatgggtgtgtgacagagggtctgatattgcgtgggtgtgtgacagagtgtgacattgcacaggtttgtgacatagggtaaatctgggggctcatggaaaggacgctattgaggcagagcacctgtaaatgtagattgacggtgaacaggagacagagcacagaggcttaaaagggacaaggaggttaatttccagacagtggaagatgccgtaggttttaagggtgcacaggggaaaagcgtgcaaggagctaagcatatgggggatactaggtgctgtgaggacaaggggtgccagagtcatggaatgaaaggagacgatggggaggtagagataatgagggaaagtgggtaaacagcaggacagggttcaagacaccg

SEQ ID NO: 37813 - DNA, 1186 bp, Artificial sequence
  DNA replication origin
aagttggagtactggggtcgatattgcatgggtgtgtgacagagggtctgatattgcgtgggtgtgtgacagagtgtgacattgcacaggtttgtgacatagggtaaatctgggggctcatggaaaggacgctattgaggcagagcacctgtaaatgtagattgacggtgaacaggagacagagcacagaggcttaaaagggacaaggaggttaatttccagacagtggaagatgccgtaggttttaagggtgcacaggggaaaagcgtgcaaggagctaagcatatgggggatactaggtgctgtgaggacaaggggtgccagagtcatggaatgaaaggagacgatggggaggtagagataatgagggaaagtgggtaaacagcaggacagggttcaagacaccggcgacttgatgtcaatggaaggttaaagaaaatgaggggaagggaagtaacaggtggggtgcacaggtcctgggagtggtcagtgacccaaagtggagacggggatgggaatggtggaaggaactacgtatatgtcgtaggcctgggaggaaaatgagagcagggtgatgagaggaactggaagggtcatgggaatgagcagccaatgggtttgggggaagagggcagggactagagagttctgggagaagggttggagggctggggaagctgaggacatcgggaggttgattgctgggacatttgaaggagaagggcatggagattatggaatatgggctgagatcattggaatgtggattgatttagggcttaggagaaggaggacatggaaggtggagagtgtgggggcagtgggaggtggggagggcttgcctgacttccccacaatggatgatacagaggtgctggaggcatggaggccaagaagggcatgagatagcggtggggtccaacgtagaagtctaaagctgtcaggaggatgggggagtggattgatgtggaggcccgggtggtgactaagggtcataatggtggtgagagggaggccacaggggagatgaaggaggagggaggaactacatggaggttggggtcgtggaaggcactggggaagattggaggtcactaattcattctccattcatcatctctctcatttacagtggactcacaactgagtcatggatagactctagttccagttcgtgaagagcaaa

SEQ ID NO: 37814 - DNA, 1610 bp, Artificial sequence
  DNA replication origin
aaaagggcaataggatcttggaagggggagaacacagtataaagcgacacaaatgctgcagaggcactggccctgcaagcttcacatgggggagttggaaatccctgacaactgcacaatcttgcgtgtggatttcaacatcccgaagcaaccagattcctgctgtggctagactcggggataaggtgctgcgaaagacaggtttgaagcagaaagaccaagaaaacactcatctgagccagccccgggcgctgcagaacaaccatgggcaggccctccaccccgtctgggcggattctggacagtcggcggtgacccggagggagaaggaaaggtcgtcgagggggcggagcctgaaccggtgcttgggcggggccagaaggtggaggccgctttggaagccgggccaggttagagggtgggggtgggacctggaacgggactggggcggggcaagagggaggaggctgccttggggccgcccaggacagcgagaagggctggggccagagggttatcattttcggggcggggtctgaaaggggttttgttctgaagggcggggcctgaaggggggcggatccgggttctttcctcagctgggccatggctgtcgcctgctgtcatactcttgccctccaggactgggtcctccgggttctgattggtggattgtttctgatgtaccgtgatattacccctaatattacatgtagtgagccacctgtaccgaacgcttaatcgtttttcctcttaagttgaaaatagttttaatgcaaagagcctttttggagcaggtagagtcatgcatccttcaggcggggcacgctcccctcagtctgaagcagggcggggtagaggggcagggacctcggtaaaggactggagtagggcgctggttgcagctgggactgacaacgagaaggcttattaaactaagcaggatcctgggttgagtggataatgggaactgaaaggtgacatgcaaaactgcctattacacacaggaggtgaaggacaattcgtatttcatggaaataaagtcagggcccagagtagtggctcacatctgtaatcccagtgtgtctggaattggttccctctggtgggttcttggtctcgctgactttaagagtaaagccacagagcctcgcggtgagtgttacagttcttaaagatggcatgtccagagtttgttccttcagatgttcagatgtgtccggggttttttccttctggtgggttgtggtctcgcttgacttcaggattgaagcggcagacctttgcagcgagtgttacagctcttgaaactgtcgcgtctggggttgttttttcctcctggtgtgttcgtggtcttgctgacttcaggagtgaagctgcagaccttcgcagtaatttggccctgcccatgtcctgctaatgggtccattttacagagtgctgattggtccatttttacagagtgctgattggtgattttcaaacctttagctagacacagagcactgataggtgcatttttacagagtgctgattggtgcgtttacaaacttttagctagacacagaggcctgattggtgtgtttacaatcctttagctagtcagagaa

SEQ ID NO: 37815 - DNA, 1444 bp, Artificial sequence
  DNA replication origin
atccaattctcacaaaagcaggaatttggtagtcctcatccagcatgccaagcaaagatccacactgtggagtcagcgctcacgagaacaaaggggctgacagctgggaaacatgggtggatgaagggtgaggcgctcagcagccgccaactgggattattggaaagggcaatagggtattgaaaggcggaggacacggtctaaaacgatacaaaagctgcagagccactgggcctgcgagcttcccatggggaagccgggactccctgacaactgcacaaactcgcgtggggatttcaacatcccgaagcacccagattccttctgggcgggttctggacagagagcggggacggaacgggaggggtaaaggtcgccgagggggccgggccagaacaggtgctgggtcggggagagagggtggaggcagctttggaaaccgggcctggttagagggtgggggtggggcctggaatgggagtgggcggggcaagagggaggaggctgcctgggggccgggctggacagcaggaaaaggcgggacccgagggttagcgtcatcttgggggtggggtctggaaggggttttttgttctgaagggcggggcctggagggggcgggtccggattcttttctcagctgggccgtggatgtcgcctgctctcatcctcttgccctccaggactgggtcctccgggttctgattggtggattgtttctgatgtgccatgatattacccctaatatcacagggatgcttcctgcccgttgaagttactatttcgaacaatcgaaggtaaaacaacatattgtagtgggccacctgtactgaacgttgaatcgtttttcctcttaagttgaaaatagtttcaatgcaaagagcttttttggagaaggtagagtcgcgcgtcctgcaggcggggcaagctcccctcagtctggggcagggcggtggagagggtcagggacctcggtaaaggggtggagtggggcgctggttgcagcgggcacagacaattagaacggcttattaaactaagcaaggtcctgggttgggttgtttgagtggataatggaaactgaagggtgacaagcagaactgcctattatacacaggaggtgaaggacaatttcatatttcatggaaataaagtcagggcccggagcggtggttcacacttgtaatcccagcactttgagtggccgaagtgagaggatcgcttgagcccaggagtttgagatcagcctgggcaacatgatgagacgtcgtctctaataaaaatataaaaaaatcagccaagtgtggtggtgcgcgcctgtggtcccagctgctggagcgctgaggtgggaggatcgcttgagccagggagttggaggctgcagtgagccctgatctcaccaccacactctagcctgggtgtcagagctagaccctgtctcaaa

SEQ ID NO: 37816 - DNA, 889 bp, Artificial sequence
  DNA replication origin
tttccttgaacttattcatgatatagattcctttgctcacatgttttcttgctgacctctccccacctgttgccctgctacactcccctcactaggacagtaaaaataatgatcaataaatactgagggaactcagaggctggcactggtgccggtcctccgtatgctgagcgccggtcccctgggcccactgtcctttctctatactttgtctttgtgtcttatttcttttctcagtctctcttcccacctgacgagaaatacccacaggtgtggaagggctggcctccttcaacaggacaagccccgggcacctccccaacgtgggctcaggggaagccgtgactgcggaggggagacctaggaagcagcagggcccggcaggaggagggaggtgggggggggggggcgcgagggcgccttaagacaagggtggggtctgcaggatcccgggaccagacagaggacgcggccttcccgggactggggccgcggttctgcgctccaccggccgaagtgggcgagaatccaccccttgggtgaggacttcaaaaagcgcggggtgggaggagtcagagaaaggtttagagcaggaaaaatgcgcgatagaaagtgtatacattgccctatagcagaaagacccgggacgggaccagcctcagggcgaccttaaacacaaaaggaagcgacccccggactctcacggggtcgtctcaatttgctctgggtgaaggaagacggctgagaatttccaggtttgtggggaccccacgccccaggtacagaagcgccagggacctgggaagtgcagacctaatacaacacagagccaaactcacgcgctgccgtgggaccgtcactccacgcgatccgcttccgggttttcgcg

SEQ ID NO: 37817 - DNA, 1026 bp, Artificial sequence
  DNA replication origin
ctcacatacgtgtcggggtctgggtacgtgcacatacgtgtaggggtctgtgtgcacatgcgtgtcgggctctgctgctgtctgcgcgctgcggccgctgggtgcgcgtgcgcatgcgcgctggcctccagggggtggcgggaccgagtgtgtgacgcacttgcgtgggagtacgaggctgacgcggcggccctgtccccgtaactgtgacacgggtgcacgcgagcgtcattgggggcgatgggggccgtgctgggtgcgcgtttgcaccagtgacgcagccgctgcatctccgccagtccgcgcaggtgagattggtgcgcgtggctccgaggggagacgggcacggggcttctgacggtgacgcacttgctggagagtgtggggtgacacagccgggctctccccataactggtgaccgggggtgctccagaggctttgggtcaacgcagcccgtgcctgtgaacctcggcggtgcgtccctgggactctgctccgtgaggtgcgctctgggggttgtgcgggggcagcggtcgggacgggtctccgtggcccacggatgcacctctgcaccgtgtggggtggtggggcccgtagcatggccgtgctgggcgttagtgggtatgaggggcgcagatgtgtctcaggacagagtgagctgtggtgaggctgagctgtgcagacttgtgctgggatgggtgatcgggccttctgggtgacgcaggtgtgtgtgacaacacaacctgtagcttcagcgtctctgtgctgggatggatgatcgggccttctgagtgatgcaggtgtgtgtgacagtgcaacttgtagctccagcgtctctgctgcttcccctgccttcacctcctaaccaagcggtacctgcctgagaacaagggccgcggagggacgtgagcgcctgagcctcgcctggaaattcaccagcaagaaggcagaaacagccatgaggtgacgctttcagagccagaagtgctgtgcatgcaggccacctgagtgacaggggacggtgg

SEQ ID NO: 37818 - DNA, 1776 bp, Artificial sequence
  DNA replication origin
ggctctggtttccccagacatcgccctcctcaagcctctcaccccttcccgaagcccctgtgtgtttgggcctgagtagggcattcgcttcctaggaggaacccaggggtgcgcgccaagcatgggggtagggggaccgccgagtgcgcctgtggcttcgggagaggccaaagaaggaaggagtgggaagggcgcgcacgcgtgtcagtgtgtgcatgtgtcagcgtctgtgcacgcgcacatgtgtgtcggggtctggtcgcacatgcggatcaaggtctggccacacgcatgcgttgggggtctgtgtgcgcgtacacgtgcatgtcgcggtctgggtgtacatgcgtgtcaggatctgtgtgcacgcacatgcgtgtcgggctctgctgctgcctgcgcgctccggccgctgggtgcgggaggcccctcccgagtccggggtgcgcatgcgcgctggcctccatgggtggcgggaccgactgtgtgacgcacttgcgtgggagtgcgaggctgacgcggcggctctatctcccgtaactgtgacacgggtgcacgcaagcgtcattgggggtgatgggggccgtgctcggtgcgcttctgcaccggtgacgcaaccgctgtgtctccgccagtccgcgcaggtgagattggcgcccatggctccaaggggagacgggcacggagcttctagcggtgacgcacttgctggagagggtgtggggtgacgcagccgggctctccccataactagggctggggtgctcccgaggctttggggcgacggaacccgcacctgtgaacctcggcagtgcgtccccgggactctgttctgtgaggtgcgctctgggggatatgtgggggcggcgatcaggacgggtctccgtggcccacggatgtgcctttgcactgtgtggagtggcggggccggcagcgtggccgtgctgggcgttagtgggtatgaggggcgcagatgtgtctcaggccagtgtgtgctgtggtgaggctgagccatcagtgcaggcttgtgctgggatggttggtcgggccttctgggtgacgcaggtgtgtgtgacagcacaacctgtagctccagcgtctctgtgctgagatgggtgatcgggccttctgggtgacgcaggtgtgtgtgacaacacaacctgtagctccagcttctgtgtgctgggatgggtgatcgggccttctgggtgacgcaggtgtgtgtgacagcacaacctgtagttccagcgtctctgtgctgagatgggtgatcgggccttctgggtgacgcaggtgtgtgtgacaacacaacctgtagctccagcttctctgtgctgggatggatgatcgggccttctgggtgacgcaggtgtgtgtgacagcacaacctgtagctccagcgtctctgctgcttcccctgccttcacctcctaaccaagcggtacctgcctgagaacaagggccgcggaaggacgggagtgcctgagccctgccaggaaattcaccaacaagaaggcagaaacagccatgaggtgacgctttcagagctagaagtgctctccactcagggcgcctgagtgacaggagacggtggcctcaggagtagaattcctcctgtagagggacacgtccctgatgtgggagacagggagaggggcagctccacgcttcatcatctcagttaccacagcgtgctcttcaggaatctcccagaaactccatctcggggcctcgtatttctcattggttttattaggtatggcaggtgttaccctt

SEQ ID NO: 37819 - DNA, 1346 bp, Artificial sequence
  DNA replication origin
tgggcgccctgatgcgaaccaccgcgcccggcctggacccctcttaatgggtgctctgacgccgtggtttcccgaggtctagcgggccagatgggccctggacttcctggttggatgaggggctgtggctgcagagctgtctggtggggggttgggcggggcgaggtggcgatacttccaggcagcgggcgaaagggaaacctgttaactaggggcccgtggcccggggggcatcgtgggggatacatactgacctgccgcgttggcaccggaagattgtcgcagggctggacggcagaactctgaagttggaatagagacggcagaaaaattcagaattttgccgtattccaattaaacaagttctgatccctcaaaagggaaccaagatgttggttccaggtggcaaagaaaggtgtcgccgggcccggggtggatgggccgggagacgcgcgccagcgcctcgtggcgcacggaaactcctaagggacgtgcagccggcgcgcagctctagagacctcggtccagggcgtggcggcgtcagggggtgtggagacgccggcagcggaaacaggggtcaggcgagagggcgtggagtgcgccgggggggcttcagagggcgtgggggatgcatgagcagccccgttccaggcaggcggcaggaagtgagcctggcattggggtatggtagagggaggaggccgcggcggggggctttgcaggtaaagaggccagccttgcgggggttagggatgtggagaccctgggagcacacctagcgctgcaggtgaggagatccacgcccagggtgtcccaggtgagaaggtgggcaaatgtacccgcttggggggcaatggagacaagaagagggacagggtcacgggcgtaggggcagaggagatgctcgaagcgccttgttccgcaagaatcaacacacatagagagatcgcaggcaggcaaagccgtcagtgtgactcatgtctctctcaggtttggagattggagaggagactggttcctgctctggctctccagtgttatcgttttgttttgttttcttgaggcagggtctggctctgtcgctcaggctggagtgctgtgtctccatctcagctcactgcagtcttgacctcccaggctgaagcgatccgcctgcctcagcttcctgaatagcagggactacagacacatgccaccacacctggcgaatttttgtagtcagggatctcaccatgttgcccagggtggtctggaactcttgagttcaagcgatctgcctgccttggcctctcaaagtgctaggattacaggcgtgagccaccgcacatggcctagctcttaagttc

SEQ ID NO: 37820 - DNA, 1014 bp, Artificial sequence
  DNA replication origin
ctcccaaagtgctcggattagagccaccgtgcccggcctgcatccctcttaactggtgctccgatgcgaactaccgtgcccagcctggacccctcttaacgggtgctctgatgcgaaccaccgtgcccagcctggacccctcttaatgggcgccctgatgggaaccaccgtgcccagcctggacccctcttaatgggtgctctaatgcgaacgaccgcgcccggcctggacccctcttaatgggtgccctgatgggaaccaccgtgcccagcctggacccctcttaatgggcgccctgatgggaaccaccgtgcccagcctggacccctcttaatgggcgccctgatgcgaaccaccgcgcccggcctggacccctcttaatgggcgccctgatgggaaccaccgtgcccagcctggacccctcttaatgggtgctctaatgcgaacgaccgcgcccggcctggacccctcttaatgggtgccctgatgggaaccaccgtgcccagcctggacccctcttaatgggcgccctgatgggaaccaccgtgcccagcctggacccctcttaatgggcgccctgatgcgaaccaccgcgcccggcctggacccctcttaatgggcgccctgatgggaaccaccgtgcccagcctggacccctcttaatgggcgccctgatgcgaaccaccgcgcccggcctggacccctcttaatgggtgctctgacgccgtggtttcccgaggtctagcgggccagatgggccctggacttcctggttggatgaggggctgtggctgcagagctgtctggtggggggttgggcggggcgaggtggcgatacttccaggcagcgggcgaaagggaaacctgttaactaggggcccgtggcccggggggcatcgtgggggatacatactgacctgccgcgttggcaccggaagattgtcgcagggctggacggcagaactctgaagttggaatagagacggcagaaaaattcagaattttgccgtattc

SEQ ID NO: 37821 - DNA, 1453 bp, Artificial sequence
  DNA replication origin
ctacattcctgactcctggatggagggagggactcagaattttaatgaggatggggctggggctggggcttggggctctggattcacggatcctgcaagaggggaagggatccaaggggctggtgggcccgaagccccagggcagggaagggatgcagggtgtgtttttaaaaggcggctctgcggccctaaaacggactgccggagccaaaagaaaaagagggagctgagggtcgggatgtcgggcccccggggaggggcagggcggggacctgggacgcctgagtccctccctctggccgcgttcactcaccgcgctctgcagtcgtcccgggcgcggcctggctggctgcggccgctgggcggggcctggtggcggctgcggatgctcagcgacgctgagctaacggggcgcgtctggcgctgccgccgctgggcaccttccagggccgacaactgaggaggctttgaggccaagcccaggggtggaggccgagtccaggagtggaagccgcgcgagtggcgaagggagcagtcggaaggggtccgggagctggggatccgggtctacgtgccctacggagcagggaggggccggagggggacctgcaggaaggcgggggtctgcaggagtggagagggggttgggtagaggaaggtagagcctgtgtgcgggcttgatgtgcttctgcaaagggaaggggacacagaccctctttgtcactctgggccctgcataggggagggaggtctcagtgcacccagatcaggccttgtccttgtccaaggagggagggctgtggacagatagggagtcgggacatggtgttagttggagactcccctgggacgcctctaggttctattcacaggcctccttggccccaagtgtagcagcaaatctttccccttcctgcctaaattagtcactgcctaaccccatagtgacacactcaaggtaccccaaacggcccagaggtggtctccacttacacaacttactgtgttattcctcgtggtggcagcggttcccttgtagacactagaacccctcaacagcagggttcagggtagcaggaacaggaagcaaacatttgaagagtgaaggccggtcacggtggctcacctctgtaatcctagcactttgggaggccaaggcaggcagatcacctgaggtcgggaattcaagaccagcgtggccaacatgatgaaaccccgtctctattaaaaatacaaaaaaattaatcaggcgttgtggcgccgcctgtaatcccagctactccagaggctgaggcaggagaatggcttgaacccgggaggtggaggttgcagtgagccaagattgccactgcactccagcctgggtgactgagcgaaactctgtctcaaaacaaaaaataacaacaaaacaaataaaaatttgaagagtgagtcatcgggtgtggtcctaaga

SEQ ID NO: 37822 - DNA, 1731 bp, Artificial sequence
  DNA replication origin
cccgggagtccagacccccagcccctcctccctcagaccccggagtccaggtccccttccccactcttccagacgtatgacctccacagtccaggtcctcagccctctcctctgcagaaccccaagaatcctggcccagccccagtctttctagggacccagacattctgagacccagcccattcctctctctggccataaagaccctagactgttgcttatgccctctggggtccccacaacctcacctcaggcagccagtggcgactgcggctgaagcaaagacgacagcggcagctggaagggtctgagggctgggtggggttggagggctggggagccagcgcgggcgggacgggggcggggccggggcggggcgcagctccggctagggcggtggacagggacttccccgagtctgggctatcccagccccgccccgaggcggggccaagagcagaccacgccccccagagtaaaagtagcgtggagctcccgccccaccccagtgagcagggtggagggctgaggtcacggttgccgtggtgacaaaacaggaagacacaacagctggcggcgtggagactcctgggggctgccctcctcgacacagccctagaggagtctcccgggtaggccagggaagaccgttaccatagaaaccccgcatgtttagggtttgtttagtgcagagccccccagctcaggtccccgcccccgtctcacctcactcctttcttccgctcccttcctaccccctccttcctggtctgttccgcccccaccccttccttgccggatgaaaccttagacacctgggtcgcagcggattgggggaccaggcccctcagttcaatgggggggctaggatctctgtctcttggagccctgagggagagcagaattgagagcagtattcctgggctttaggtggttctgggctacgatccctgactgatgggtctccccaagaaacagaggctagattcctgtatttaaggacttgaaggggcggcaaaatgctcccctagtacccactggcaccgggcgccgcagggtaagggactcgggctggacgcaggtctcagatatcacagtggataggggtggggtgtgttgggggcaaaattcctgggagctagcgcggtagcagttgggggcccggattcctgggctccacaggatgcctaggctgaggcccagattcttggctcaaaagaacaatcaggcctgggcgcggtggctcacgcctgtaatcccagcatttcgggaggctgaggagggaggatcccttgagcccaggagttcgagaccagcctgggcaacataaggagactctgctctattaaaaataaatcatcatgatcatcataatagaaccattaaagctcagactcgggttttccgagcaggtgttgcaagcctagccgcctgggtctggaaggcagcgatatttttggcctacattcctgactcctggatggagggagggactcagaattttaatgaggatggggctggggctggggcttggggctctggattcacggatcctgcaagaggggaagggatccaaggggctggtgggcccgaagccccagggcagggaagggatgcagggtgtgtttttaaaaggcggctctgcggccctaaaacggactgccggagccaaaagaaaaagagggagctgagggtcgggatgtcgggcccccggggaggggcagggcgggg

SEQ ID NO: 37823 - DNA, 1366 bp, Artificial sequence
  DNA replication origin
agtgaggtgagacgggggcggggacctgagctggggggctctgcactaaacaaaccctaaacatgcggggtttctatggtaacggtcttccctggcctacccgggagactcctctagggctgtgtcgaggagggcagcccccaggagtctccacgccgccagctgttgtgtcttcctgttttgtcaccacggcaaccgtgacctcagccctccaccctgctcactggggtggggcgggagctccacgctacttttactctggggggcgtggtctgctcttggccccgcctcggggcggggctgggatagcccagactcggggaagtccctgtccaccgccctagccggagctgcgccccgccccggccccgcccccgtcccgcccgcgctggctccccagccctccaaccccacccagccctcagacccttccagctgccgctgtcgtctttgcttcagccgcagtcgccactggctgcctgaggtgaggttgtggggaccccagagggcataagcaacagtctagggtctttatggccagagagaggaatgggctgggtctcagaatgtctgggtccctagaaagactggggctgggccaggattcttggggttctgcagaggagagggctgaggacctggactgtggaggtcatacgtctggaagagtggggaaggggacctggactccggggtctgagggaggaggggctgggggtctggactcccgggtccgaggcaggaggggctggggggtctggactcctgggtccgagggaggaggggctgagggcctggactcctgggtctgagggaggaggagctgggcctggactcctgagtctgagggaggaggggctgggtctgcgggagtagagagatggggactcgtaggtgccctagttggaggctggaatctggtacgtggaggtcctttaggaggggaagcgcttagggttaggtgtcctgggtttgggaatgagaatggaaggaattcagaattactgacccctccccatccaggggacagacagaatcggaactttgggctcctgaaaggccgagggaggggggtgttaagatccagccccgtgcttccgaagtgcagaaggagctgggaaaggaggagaagacagggctgcgtcccgcacctctgggtgccgagagccgaagctggggttccggggcccgattctcagcgtgagcgatgggtgtggcgtctggagtggacgagggaggacactgaggggctgggtgtggcccggagagtcgggtgcgctgcgaggaatcccggaggggtgtttcctcaccctccagggtctggctgcgcattcctgagctctgatctcgggcgatggctggaggc

SEQ ID NO: 37824 - DNA, 1134 bp, Artificial sequence
  DNA replication origin
tgagtaggcagcgggcctggactccggggtccgagggaggaggggctgggggcctggactccggggtccgagggaggaggggctgggggcctgggctcctcggtccgagggaggaggggctgggggcctgggggcctgggctcctgggtccgagggaggaggggctgggggcctgggctcctgggtccgagggaggaggggctgggggtctggactccggggtccgagggaggaggggctggggtctggactcctgggtccgaggaaggaggggctggggtctggactcctgggtccgaggaaggaggggctgggggcctgggctcctgggtccgagggaggaggggctggggtctggactcctgggtccgagggaggaggggctggggtctggactcctgggtccgagggaggaggggctgggggcctggactccggggtccgagggaggaggggctgggggcctggactccggggtccgagggaggaggggctggggtctggactcctgggtccgagggaggaggggctgggggcctgggctcctgggtctgagggaggaggggctgggggcctgggctcctgggtctgagggaggaggggctggggtctggactcgtgggtctgaaggaggaaggattaggtcctgggctcctagatcctgggagaaggaccaggaagcttgggctccaaggaatagggtcccagacactgaggtatctgaggaagaagcgagtccaggccctggctcctttgtctcagggagctgctgtcctgcgactgccacgaagaggttaaggcctgtgctactgccctgcaaagtgcctgaagctgaaaggaggaagttactttcctgtggctaggagaggccttgggtttagtcctgtggctgcgttgagacagtttacagcctaaggaaagaactgggcacctggtttctaagaggacgggcacttgattcctgggggccattaggacaaggaggtggaagctgtaggttttgcaaggactaaagaagcaaattggttttctggagtctggggcatctgggatccttcaggctaagggtccagggccagaggtctgaccccttataacaggacggtgatggccaggcgcagtggctcatgcctg

SEQ ID NO: 37825 - DNA, 1098 bp, Artificial sequence
  DNA replication origin
caaagtgcctgaagctgaaaggaggaagttactttcctgtggctaggagaggccttgggtttagtcctgtggctgcgttgagacagtttacagcctaaggaaagaactgggcacctggtttctaagaggacgggcacttgattcctgggggccattaggacaaggaggtggaagctgtaggttttgcaaggactaaagaagcaaattggttttctggagtctggggcatctgggatccttcaggctaagggtccagggccagaggtctgaccccttataacaggacggtgatggccaggcgcagtggctcatgcctgtaatcccagcactttgggaggccaaggcgggcggatcacttgaggtcaggagtttgagaccagcctggccaacatggcgaaaccccatctctactgaaaatacaaaaattagccgagcatggtggcacacacctgtaatcccagctactcaggaggctgaggcaggagaatcgcttgaatccgggaggcggaggttgccgtgagtcaagatcgcaccattgcactgcagcctgggtgacagagcgactccatgtaaaaaaaacaacaaccaaaaaacaggattgtgaggcctagagagagttcagtggaagggcctggggttcctactggacagttggaaatctggggagctgagtttcccagaagctgggggaccagctggctgggttttggggagagaaggtggaggtagatggactcagtatgcaggagtgtggagggggaggctcaaactagcttttttgggttgcagtactccagtcctaaatctcaggtgggagttagactgagagtgaaggttgctaatctccaaggtggggggtagggagaggaggaggccgctaagagtttaggctccttgtcagaagggaggggagatctcttggttttccacggctgggatctctatgagaagatatcctttatcgggaggtcggagctcttattagatgtgggtccctgagagtggaagcctggggaggttgggccgtttagaggctgcaaatgtctaggtcactgttcgatggaagaaggaagtttgctcacagggtctggggtgcag

SEQ ID NO: 37826 - DNA, 1069 bp, Artificial sequence
  DNA replication origin
gaaggccagtggactccacatttagggagagtggttacaagaggactcggattcccccaccttcccttcggctttgggaatcccaggaaacccgccccgaacccctgaaaagtcccagagaaggtaagctgggcgtccagagtccctcccaggcgccgccgcagcgtcccgcccagcctcgcggggcacgccgggaggcggagttctcggtcgtgtcccgagagtggctggtccgcaggctcggactaccagtcccagaatgcactgcgcccgcagcccggggcgggccgtggttgcccctggcaacagagagggtctcccgggagcggggactgggaagcgctcccgagccggggaggcgcagagcccgaccagagagaggcggggacgcgggtagagcgaccaagaggtgtggaggccggaagagactgaccgcgccggcccttggagagacccctttcctgagagggggcgcacagagaggatgccgaagccagcgagatctagagagagggagacagggattgaatcacagagacacttagagggagggagagacctcaaagacagagagattcacagggccagagagacacgtagagtgggtcagagaagaggacagaggacagagacatagaaaagacaggagggagagagactgaatcacagagacacagggagagagggagagacctcagagatggagagagactcacagggccagatagacacatggagtgggtcagagaaggggacagagagagagacacagaaaagggaagagggagagagactgaatcacagagacacagagagggaagtctctatctagagaccctcgacagagattcctagagccagagacagagattcagagagccagagacacagagagattcatagagacatatagagagattcagagagcctgaatcacagagattcacagagccaacgagacaaacagagagattcatagagccagagacacagattcggagagtcagagagacatagaaagattcatagagccagagacacagagattcagagagtcagagagacatag

SEQ ID NO: 37827 - DNA, 2017 bp, Artificial sequence
  DNA replication origin
ctcagagatggagagagactcacagggccagatagacacatggagtgggtcagagaaggggacagagagagagacacagaaaagggaagagggagagagactgaatcacagagacacagagagggaagtctctatctagagaccctcgacagagattcctagagccagagacagagattcagagagccagagacacagagagattcatagagacatatagagagattcagagagcctgaatcacagagattcacagagccaacgagacaaacagagagattcatagagccagagacacagattcggagagtcagagagacatagaaagattcatagagccagagacacagagattcagagagtcagagagacatagagagacattcatagagccagagacacagagagattcatagacatatagagagattcagagagcctgaatcacagagattcacagagccaaagagacaaacagagagattcatagagccagagacacagagggattcggagagtcagagagacatagaaagagattcatagagccagagacacagagattcatagagacatagagattcatagagccagagacacagagattcagagagtcagagagacatagaaagacattcatagagccagagacacagagagattcagagtcagagaaacatagagattcatagagccagagacacagagagattcagagtcagagagacatagagagacattcatagagccggagacacagagagattcagagtcagagagacatagatttatagagccagagacacagattcagggagtcagagagacatagagagacattcatagagccggagacacagattcagagtcagagagacatagacattcatagagccagagacacagattcagagagtcagagagatgaatagattcagagagccagagacacagggagagtgaatcacagacacagagggacggggagatccccagaaacagaaagagattcatagagccagagagacaaatagagattgggtcagagagaaagggacagagacagagacagagaagagaagagggagagagattgggtcagagagaaagggacagagacagagaagagaagagggagagagagactgagtcatagacaggagagagacccccctagcatcagagagagagagagagatcaacagagccagagagggacaagtacagagaaacagatggaaccagagagatataggaagagacaaacaaaaacagagacggagttgcagaaccggaggaagggagagagacagagacaaaggcatttataaagacgggtggaggtgaggagagagagggagagacaggggcaagcatttagagagtgactcccagagaggaagacagagacggactcccaaagagatcaagttgcagagggagggggagacagagtcacagcctgagagagaatagagattcacagagccagagagacaaagacagggaaagaaacaaactcagggagacagaggcggaagaatttatcagacgtagagggagagacagagggagactgattcacagtgaggcagaccaagaccccgagaagaaccacgacaccaagacccagagatggcgacagatacagatggagacacacagcagaggaaatagagaaatagaaagaaatagaaacagcatttctcggagacagggaaaagaaaacagatccactgagaggcagaaacagagacacatcgagaaagctcgctccaggaatagagggagagggacagaggtcacaagaaagacacacgcaggcagagagctacacaaataatggagaggccaggggaggaaataaagactcagccggcatcggagaaagtgagaaccttagcgccctgcctgtccactgctggacccctagcgtggagcataaagtttgttgaaggaaggagaggggcagggtcagacacagggaccccagggcgcccacaggacacacgaggca

SEQ ID NO: 37828 - DNA, 958 bp, Artificial sequence
  DNA replication origin
agctcccaccgccgccgcccgtgcctccggctgccggcgcccctgcctttggctcttcctccccactcgcccgctccccctggcggagccggcgcgcccggggtgccgctccctgcctggcgcgctccgcacctggaggtgccttgcccctctcctgcccacctcggaatttccctgtggctcctttgatccttcgagtctccagctcctctcccttccacctgtttcccccaagaaaggcaggatcctggtccctgctacgtttctggggccatggctggtctgggccccggcgtaggcgattcagaggggggaccccggcccctgttttgcagaaagggggccctgaggcagaaggtggtccacgaagtcaagagccacaagttcaccgctcgcttcttcaagcagcccaccttctgcagccactgcaccgacttcatctggtgagggaagggggctgggggactgggggacgaggggactaggggtgcagactcctatcacgccgacccctgtggaaggaagaaggagggggctgtagtcccgactcccaggttctaggatggccagggaacgctgggagcttcgactcctgggtttcagtgaggaggaggctggttcctggagtgctgggtccgagggaggaggaggctggaggacagaggtcctggagtcttgggtctgagggaggaagggcctggggggctgggagcctggattcctgggtctgaaggaggaagaaactgggggctgaactccagtctaagggaagaagggctgggggccaaaatttctgggttctagaaagaggaggtggccggggcttggacacctgggccctgcgggaggagggtcagagagcgcaggccccctgtggctcgcagaggttgggggtccaggtacccctttctgcactgacctaggatccctgactcttccaggggtatcggaaagcagg

SEQ ID NO: 37829 - DNA, 998 bp, Artificial sequence
  DNA replication origin
gggaccctcaggagggtggaggctggggccccacagctgaggctgcttgacacacgtgttctctggtccccagagaggcgcgggggagcccggggcggggggtgtggcagagacacagcctgtggtggggagggagctttgatggtggggccaccgcggaggtggtgctgggggcccctccctcggccggctccaggtggggacagatatttggagaatctgttgccatgggaacatggagatttggaaaaggggagctgaaggggggaagggggagggggctggagatgcaaagtcagagcccccccccaccccaggctgccgtcgccatgacaacaccagccgtcctaggcaggggcaggccgggtggggtcaccaatgggcgagtgggggccgggcggggccggcagttctggggggcgggagaggggggcgagtccttgagcaccagctgctactgctgagaacagagtgagtcagggtggggggcgggccggcagcagcgcccccagactcacttctgcccaagttgctgcttcctgggctgcgtctgaagatatttcggttttcgctctttgaatctgtctgcctctctcctggctttctgatctccgtccgtgggcctgtgtctgtttgtcaatgggatcctattttctttctctctttttccatctcccttccctgagctctgtgctctgtgtctctctgtaagtctctgcgtctctgtttctgactctgagcccatctcttgggtttctgtctcctgcttctctctctggcctccgattttctctctgttggactctctgtgttgagatccctctctttctggttttctcagtgtccgagttccgctctctctttccaattttctgtctgctggggtctcccgctggactaatccatgcctccgtctgtgtctctatgattttcatctatagtctgcagctttgtggttcatcgacgatgccacgaatttgtgaccttcgagtgtccag

SEQ ID NO: 37830 - DNA, 1075 bp, Artificial sequence
  DNA replication origin
tgggatcctattttctttctctctttttccatctcccttccctgagctctgtgctctgtgtctctctgtaagtctctgcgtctctgtttctgactctgagcccatctcttgggtttctgtctcctgcttctctctctggcctccgattttctctctgttggactctctgtgttgagatccctctctttctggttttctcagtgtccgagttccgctctctctttccaattttctgtctgctggggtctcccgctggactaatccatgcctccgtctgtgtctctatgattttcatctatagtctgcagctttgtggttcatcgacgatgccacgaatttgtgaccttcgagtgtccaggcgctgggaagggcccccagacggacgtgagtgctcggacacctggttctcctcctcgggccgtgcccccgccctcaccccctcggcgtccgtcccaatttctcctgctatttttatggctgggaggggaggggggctggagagatagggggagctatctggcccagattccttgcccttggcctggaaagggggaatgcgagggggactgacaggctggggacacgggtggggcacagagaggaggccggggtgaggagactgaagatgggtgctgccgggggtgggctgtgatccaggggtgaagggatttaaaaattgagagctgaggggcacacggagaaaaatatcagtgcaggtgcggagatgccaacataagacagagggaatctcagggagaggaacagagacagaagaagacagagacctaggagagactgaagctgaggcagagagagagagagatggagcagagaaagaaccagggagaaagagaggaatttggaggcaccaaaagatggacagagaaactccaagagacggagacacagacacctggagaaagagactaaaatagaaaatggtggatacagacaacagcttaggagatgctgagaggagacccagggaagtcccacagtacacttgcacacatgtgcgtgcatgtacagatgcccctgtcatcacagatgtgcagcacgcagagacacacagcct

SEQ ID NO: 37831 - DNA, 1202 bp, Artificial sequence
  DNA replication origin
gttcccaacatggactggcccttttggaactgtgcgcataggtgatgctggccgagcgcaggggctctgatgagctctacgccatcaagatcttgaaaaaggacgtgatcgtccaggacgacgatgtggactgcacgctggtggagaaacgtgtgctggcgctggggggccggggtcctggcggccggccccacttcctcacccagctccactccaccttccagaccccggtaaggatggagggggcggaggctgtcctccgggccctgccttatccagttctggacatctgcgttgggattctgagtttagggcgaggcaagagaactttgtgctctctgagtgggcgaggccaggcggattgtctcctcagggggcgtggccgggggggggtccttggggggcgtggccaggcgaagggactcatcggggggcgtggccaggcggaggggctcaacggaggcgaggccgggtggaggggctcctcgggggcgtggccaggtggagggactcatcgggggcgtggccaggcagaggggctcttcgcggggcgtggtcaggcggatgaaatctttgggggggtggtttagaggggcgggctttgtcaggcgatgggatcattaataggcgtggccaggcagattggctccttgggggcgaggccaggcagacgagattatgaatgagcgtatccaggcaggtagattcttcggagggcgtggtcgggcggatgagctcctcgggggcgtggccaggcggtgagttcctcggtggcatggcctggccaggtgaatgggtcctgcggaggtgtcgtgaagcggttgagttccttgggggcgtggccaggtggatgggctcttggggggagtggccagatgcctgtttccctggggagcttggtcttgagtggctgtagccagtgctctggaattttcagcaaaggggcacagtggaggagggtgccttcctagtgggcctgcccagaattgggctccgagtgacggggtcatcacttttggattctgactgaaggacacatcagaaacaggacattatttccttaggattgcgacttaggggcagagagtcagaacctgcaagattttaagagggcgtgactttacttccaggggctccgaatgagagtggccagccacctggattaaaatatatgtatgagcaactttgattccttttttttt

SEQ ID NO: 37832 - DNA, 1335 bp, Artificial sequence
  DNA replication origin
caggcatgagatccggagagataagaacagccaggggaaacaggcaaatggagggaggaagggaaaagaaaggagagagagagagaagaaaagaagaagaagaagaagaagaagaagaagaagaaggaggaggaggaggaggaggaggaggaggaggaggaggaggagggaggaggaggaggagggagacagacagagagcgagacagagagagacagagaggagagagagaggaagagggacagagagagagagagacagagggtgagagtgagtgagagagagagagagagagacaggaagaaggagaggatacatgaaaatgatagcagatgaaattcatacccagagacccagggacacacagagaaacagaacaaatcatgagggagatggagaagaggagagggaaaaggggtagggggagagagggaaggggagagagggacggggagagggaagggtagggggagggagggaaggggagagtgaaggacagagggaggtcggtagggggagggagggaagggtagaggagatgaaggggaagagggagggaatgggggaagagaggttgcagacccagagaaaaggggaaatagaaattcagagggtggtacagagaccccaggtaagaaggcagaaactcagagaagggaggagacagaggagacccagggggacagagattcagaaagagagaaggatagagacccaggaaacacacacccagagggaggaataaagaccaaatatggggacagagacccagagaaaagggaggacagaaagccagcaggagaggagggtgagatgtagcgtgtgtgtatgagagtggacacaggaggggacagagatggggggtaggggggttggacaaaggcccaaaagtgtagacagagatgcagaaggagacacagagaaaaggaagaaacacagagagccccatcgtatgcagatggaggggaggcatgagacagaaaccagagagactgtcagggagatgcagagagagcagctagacgcagaaggtgctgacatgggctgaaaatctgctatgggccaggtgctttcttctgtgtcaactccataacccctgaagagagttaagctcacaaagttttggtgactcacccaagttcacacaggaagaaaagctgcagaagttgggtttacctgacccacccagttctagacagacagacaccctggactttcagcacttcctgcaagcagggagctggggagtgggagtcacagagaaggatgagacagaggccatctccaggcctcgtggcaacagggctggaaatcattgttctaacaaaacctatg

SEQ ID NO: 37833 - DNA, 761 bp, Artificial sequence
  DNA replication origin
gcgggtgagattacatgacgggcacaggcactgggctggtggggctgcgggcatccgggtgcacgaagtcggggttcacgtaggtgaagccctggaaatcggcctggtcgatgctggccaggactaggcggtctggaggggtcagcgctggcgccgcccgcgtgaagaacttgtcaaagttctcgccgctgcggccacactgtgggagacgtgggggagggaaagttaagcagctccgagggctcctcgggtgtccctctgtgtaccccagtctcatctcctgtctcctgcagaatctctattcatgcttcatggtgtctgcacctccttttgttgggggcggggggctctgcagagggaaccccacccccacatacaggtatattgaggcccaggggaaccccaccccttcagggaccaggtttttgttgcctggagggtgactgaccgggcggggtctgaaaggaggcgggatctccaatcgttccagccgctcccagtcaatccagcggaaaaagccatgtgcacggatggtaggttccccatcaggccctgagcccaggcgcttccctgggtgcttggtcaggaactgtgggaaacacagagagagacagacagacaaacagacagagtgccggacaggtagacccagagaaagagggacagagacaggcagatggaggaaccaagagacacaggcatgagatccggagagataagaacagccaggggaaacaggcaaatggagggaggaagggaaa

SEQ ID NO: 37834 - DNA, 1050 bp, Artificial sequence
  DNA replication origin
gcctccacaccccgttcattctccaagcttacaagaaaatatccaaacacttcagcatcagcatcccaaatttattctccagcagctgtggccgggtgggagaggctaagggaagaggaggggaggaggagagtcccagagagtggcaggcactggggagagttggggtgggtccgagccagacaggagccatgcacggcaggcgggctgcggggagaagtgatggcttcgggatggggaagtctagaacaaaagctgattgggagcctctggggaaagaatcctccatatatcccagaaatccccagagcacagcagcgggacgtactggaggaggggggcacgcctcccactcatctagaactagagtggaggcggggagcctcggaggccgagggctgttctggaacctgagtctggaacagccaaccccgtgaggctatttccccaggggcggggtctggggggaggcacagaactaccaagatggagtctcgaaccccatggagttggggatggttagtggtgtggtctctggacccgattggggcagagtccagaacgctaaggtcagggagaatatcgggctccgctcaagtcttgaacgcgggacggctgtagaggctgtatggagttcagaaggccaggaacgcttgggaggggcgtctagaacccgcgggggcagagctggaatgctggggtgcaggatctagaatgggacagggggtggtgaagttgggggtgaagtggggctgccgccggcacggcggaggggacgttggggacacctagtggcggcgggtgagattacatgacgggcacaggcactgggctggtggggctgcgggcatccgggtgcacgaagtcggggttcacgtaggtgaagccctggaaatcggcctggtcgatgctggccaggactaggcggtctggaggggtcagcgctggcgccgcccgcgtgaagaacttgtcaaagttctcgccgctgcggccacactgtgggagacgtgggggagggaaagttaagcagctccgagggctcctcgggtg

SEQ ID NO: 37835 - DNA, 1483 bp, Artificial sequence
  DNA replication origin
cctcaccacctaggcgcagagattctgaggcctgggaagtggagaggtcagagaccaggaagagacagaaagagacagggggacgcccagaggcctggggctgagagatgctgagacccagagaccttgagcttggagaagagacagagacagaggcagagagagagagacagagagacagagagagacagagagagactctgagaaggagagacagcagggacaatcctgggggtcccctgacgaggactggggctctagccaggcctggggcggagcctggggtctggacggctgcaggaagcgggagggggcgtcccgggccggggtccctacagcagcgggcgggcgcagagcggagtcgggtcctgcagccgccgcggagccaggagccgggccaccccccccccccgccgtgatgtcagcggggccactcttaaaggggcaggccgcccgccgagggtcggagcgggggctggggcctgcgggcactggatgggggtgtcgcggcggtgatgagggagagaggggcagccccagcatccacccggaccgggtcatggaaacccaggagactgcagggaagaagacgtgcccgggtccgcaaggaagactgcgaagctttggggctcagtcccctccaaacacacagacaaggcacaccgctccactggtctggccctgaccggagactacatttcccatcagccctggcggcaaggagccgcacttgggggaagggtctgccgcgaggcctgcggggaaatgtagtccatctgcacggtccccggcactccccagactctcaagtgggtcaagggaaagaggcccagaaggcgcgtctgcctgccgtgtgcctccgtcgccgattcctaggctctcgggttctggctgtttttggttgctctggcgtgggggtctcttcctctgatcaggtctctaggtctctcaagaagaggccagactgtgatctccccgcttgggaaggacttctccccggtgtctgagcctgggggtgcatgtgagcttgcgtggctgctctggtgaacacggacgcgctgggtctctgcgcgggggtcgccacctggcactctcagtgatctccgtgcccctctctcgctgtgcactgtccacgttggtgccctctgtgatattttctctccctgtctctgtctgtctgggtctcctgcctctgtctgcgcgcgcttctctgcttgctcccctgcagtgggtgtctcccctctcactttgtgggtctccgtgctttccttctctgtttgtgtctatgtacagtcactgtcccgcctccacaccccgttcattctccaagcttacaagaaaatatccaaacacttcagcatcagcatcccaaatttattctccagcagctgtggccgggtgggagaggctaagggaagaggaggggaggaggagagtcccagagagtggcaggcactggggagagttggggtgggtccgagcc

SEQ ID NO: 37836 - DNA, 976 bp, Artificial sequence
  DNA replication origin
gcgaggagtgcagtttcccactccgggaccctcggaccccgtcctccgggatcgccaggcccaggtgtccctgcatcccccatagccgctcgaattcgggcgtcccgaccgccaggatctcaccacccctggagccactcgggtcccttgttgccccaaacccggctcgcagccacctcgaggggcgccccttcttcctcccaggaccctccgctagcgctcacctcgctcagggctgggcggacgctccgggccgcgggccccgcagccgcatgaccggccccgaggcttcccccggccgccgccgccgccaccggggtcgccggtgcccgcgccccccgcccccgccccggagcccggcgtcccggccccctcccggcctcccaccccccaccccccgcggccgcggcctcactcggcggacggagccgggagcaggaaccggcggccgctcattggctactgcggaggaggggaggggcggggagggaaggggggaaggatgcagcgagggagggagatgggccttgaggatgggggaggcagagagggagagagaatagaaacagaggcagagagcccgagaggggcagaggcacaaagagagacagggcagagagagaaagtcacgccgagaccttgaggccgagaaatccagggactcaggtctggagactgaaggagacacagagacagagagagacaaagagggagagagacagagtttaagaccacccctcaccacctaggcgcagagattctgaggcctgggaagtggagaggtcagagaccaggaagagacagaaagagacagggggacgcccagaggcctggggctgagagatgctgagacccagagaccttgagcttggagaagagacagagacagaggcagagagagagagacagagagacagagagagacagagagagactctgagaaggagagacagcagggacaatcctgggggtcccc

SEQ ID NO: 37837 - DNA, 2042 bp, Artificial sequence
  DNA replication origin
attctctctccctctctgcctcccccatcctcaaggcccatctccctccctcgctgcatccttccccccttccctccccgcccctcccctcctccgcagtagccaatgagcggccgccggttcctgctcccggctccgtccgccgagtgaggccgcggccgcggggggtggggggtgggaggccgggagggggccgggacgccgggctccggggcgggggcggggggcgcgggcaccggcgaccccggtggcggcggcggcggccgggggaagcctcggggccggtcatgcggctgcggggcccgcggcccggagcgtccgcccagccctgagcgaggtgagcgctagcggagggtcctgggaggaagaaggggcgcccctcgaggtggctgcgagccgggtttggggcaacaagggacccgagtggctccaggggtggtgagatcctggcggtcgggacgcccgaattcgagcggctatgggggatgcagggacacctgggcctggcgatcccggaggacggggtccgagggtcccggagtgggaaactgcactcctcgcgtccgagtcgcagcgagcgtgggctggggagggcagaggccgggtccctgaggaaggcgaggtacggggcgagggcggaggacccaggcccggccagagcaggatgtgggtctggaaaggggtcccagaaagggggagttacggtctcccgagagatggaggagagatggagtttgggcttaagacttgcagaaggggaccccggagattcaaatgcctgaatccgggaaagggtgggagaaagagggagaagaggaggcttcaggcctggggggagggtcccaaaggaggaaaggctggaggaataaggagatctgggcgggccagtgagagggaggaggaattggagcaaggttgggttttaaaacggggtgcgagaatgtggagaagggacgaggtcccagctgagagtcagaggggcgaaagggggaagctgagatcggctacctgggatggaggcagccagggtggccagggtgatggtgcccgtttccgagcccacagggctgcgaggggaccaggcagctcgcggtcaaacccctgagccgccaggcgggggatgggaggaaaagctggccagagcgttccctgactccggatctcggaggcctccaagaggttgggggggaaggaggggggatctggaggctgggagtgcggggtggagcggggaggagtgagggttgtctcagactccagagtctttattcaggtggagcagagttgcaaggttagaagaattctggtgaaggaaagtggagttttatgtcttgattagtttgtaggggagaatgttgaggggtctcaaccttcatagttaaaaagatcccgggtattcagggatgtagaggtctctggttgataaaggctaagggtcccaagttgagacccccaaatcacgggattgcgtggcttggggaaaaatcttgcaggggtcgggggagaatcgtgggtaaggaatttcaagtccttgagatctgggttgaggagctccctcgctggaatttctaggttcctaagtggaattggggaggccacagagatgaactgggatctcctgtttggagtctaatgttatgaaatcgggactccatgctggatgttgaagaagatctgtgattggaagtcccagcatgggaaaccggggtccagaacctctggtaggaagtttcagatcgtgtgttaggggagggggttttgggactcctgcttgagattttagagttcagggcactgaatcctagttggaaggatgagagaccgttgtttgactggggtgctctgatgaggatgctggattggtggtggtggtggggtccagctcattcatgatttttttttttgagatggagtctcactctgtcacccaggctgaagtgcaatggtgctatctcggctcactgcaaccttgcctctcaggttcaagctattctcctgcctcagcctcctgagtatctgggattataggtgtgagccaccgt

SEQ ID NO: 37838 - DNA, 1395 bp, Artificial sequence
  DNA replication origin
gcttccggatatgagggggtcactctcctttctccttaggaaggggaccagctcttttctccagaattcggggggggggatcacagaacattaattctacctccacccacctccgattaataaaaagatctgtctcacctctgttaatgataggtcaactctccgatgcacggaggaggggacgtcgagccccccctgttggcaccccccccagaaaaaccttttggctcccaattctcgctgcttccccctcccccagcagtgagggacccaggcgtccgacctggttcggggagtggagatgaggaggcgtatggggaatgggggtgctgaggtcaggctggggctggggggcagctctgagcctgggccccaagggagtgagggtcgggatatatatattaaaaaaaaaaggtgaggagacaatttggttctcgtgtcgctgggtaaagtgcggagctggaggacgagagggagggagtagggagggagggggaggggagctgctgagggatggggagcctcggagaggagatggatgggggaagggaaagaggggggcagggtcgagtggcagaaggaagccggaggagaagagagagatccagagagggagggagagagacagagagagacgaggagaaacggaaagagagagacccagagaccgcgaaacagaaatgggggagggagaaatttgggggaggcagcggctggaagcagaaggaagttggagagatacacacagagaaatatccagagagagaaggggacagggacagagactcaaagagagaaacgcaggggctgggggggagggggtgggggagggctggggtaagtgtgtgtgtggggggggtcaggatctgggaaacagaaggaaagaagagagagggagagagtcatccagagaggagggaggagggacagatggggagagacagacagaaagagagagactgagaggatgggggagagaggggggagagggaatgaaatggagagcgggtagggagagaaattggggatgggggcaaggtcttgctagagagaaggaagctttaaagagagaagaagatgcggagagggagcgggggagcaagatagtaaatgaaagaaatggagggtagaagggcctggatggcagaaggtacctggggaaagaaaggcaagtgcaggaaaagagggagacccagagagagacagacggagagggactgagacaggaagagagagagatccagagaaacagaggcagacacagagactggggatgcacccgaaggaagcccagaaaaaataacgggagaggggtgaggctgagaagccccgaggaggtcagagatgaaggatacccctgcccccgccccctcccgcgtccccagccccggatcc

SEQ ID NO: 37839 - DNA, 1187 bp, Artificial sequence
  DNA replication origin
tggggtcacaggcttaccccactgagagcagatatctgttaagacagggtaggtggccctgctggtggtgaggggcaccaattcggggagaagaggccaagagatcaagaagagaggaaactcagcatgcggacagaaaagagaggaaggggccggcgcccaggccgggaggctgggggttgccctgtccagcgggctgctgaactgtggcctgaggaagggctgtgtgtgggcagacgggagttgaggtgggggagggaacacaacgtgtggggcactaggcccagttgccatggagacaccccccatagacaacctttttccacagcccctcctcggagcagccccagtctgaggccagctgatggggggcagtggagacgggcaagcaatcaggaggccaaggtcaccctgtactgggacctaggttctggtttttgttttgtttttttttaatcccctcttcgtctaaggtttccaggctcttaactatagtgggtttgggggaagaagttgaagaagcagtgtggaagcaagtaaggagtacatcccccagaggacagttggggtgggggagacaggcagggctgggggcatggtggtcgggggagaatgtggaagagagaaatgaaggagccacggggcagcgggtgcaggctgggaaagtattcctaattgaaaagagagttgtagtcttgcggatcacatttttcagagggacacagtctactgggggggctctttctgcatgtggaagaagatgaggggctacagtgtgtgttcctgtacaggtgaagtcgtagaggggagtactggggggcgttcccaagaagggaagcctgtgggggcctgcggaggggattttccggggcagaggagaacctgggagctatagcggtggagcaagaggaagtgagtcaagggaattctatatgatgagagagaagttggggaggatgcttcctggtacattgaagagagagtgggcttcaaagtgagttagggggatctcaagttgggggaaacagtgtgctgaagatcccgtgtgatgatgaagggctacgaggaggggatttggaggcagtgggagctgctgtgagtgcagaggggcgggtgggtggtacagtgtgccccctgctatgggagtacagggcagagattggaatggtcctgagtggagagacatt

SEQ ID NO: 37840 - DNA, 1730 bp, Artificial sequence
  DNA replication origin
agtgagtcaagggaattctatatgatgagagagaagttggggaggatgcttcctggtacattgaagagagagtgggcttcaaagtgagttagggggatctcaagttgggggaaacagtgtgctgaagatcccgtgtgatgatgaagggctacgaggaggggatttggaggcagtgggagctgctgtgagtgcagaggggcgggtgggtggtacagtgtgccccctgctatgggagtacagggcagagattggaatggtcctgagtggagagacatttggggtctggaggaagccattcttgcgagtagaaaatgccgtggaactcacggaggaaatttttcttaatggaggagaaaacgatggttatgatatgagttcgtttaagttgtgggggggggggtggcggggtgggaagattcagaaaactcttctaaagcaaaagagagggtgggggttttcctggagtaaaggcatagtatggggtggggagtgagtggcttgtggggagacagtgggggctgtgacagggaatgggctggagatggcggggggggggcagcttgcaaaccagtgggtctgatgttgggtgcattagaattccccagggagcttttaaaaacttacatgcgcaggccacactgcagaccaaccatgtcggactttctcaggtgggactcaaacatccgaatttttaaggtcctcgggtgatttccaggtgtgttggaggctgcccgaggcaggaagggggcttccagggagaggaggctgactgagggtggctggtgattccgagttgcacaaactgtgagggtcagctgggattttctttttctttttcttcttcttttaatttttcctttttagttgaagagaggttgagagatttattttttcctaaggagaggaaactgtgggggaccatttggagtgatggaatgacaaaagccagaccggagggggctcgcggaggttactcccacggaagtggtgctactcgggcttcttaagttgtggagacgctcagggaaaagttgggctgacagggaagggttctagcgggtggagaggtggggcttgcaggggaagagtggggagagctggtgggcgccgcatggtgatggggcgggggtcgctaaggaaggaagaacgcgacgggggctcctggggaggaggcggcggcgtggggcttggcatcatggcggggggtggcttcccatgcgatgaggatcgtggagccccctggggcggaggcggcgcgggctaggggcgagggctgtgagtgtgagcggtggtggggactcctccgagtggggttagtgggatggtgggacgactttcttgggcagaagacaggagtggagagagatttcatcttatttattaattattagcggtggtggggactcctccgagtggggttagtgggatggtgggacgactttcttgggcagaagacaggagtggagagagatttcatcttatttattaattattagcggtggtggggactcctccgagtggggttagtgggatggtgggacgactttcttgggcagaagacaggagtggagagagatttcatcttatttattaattattagcggtggtggggactcctccgagtggggttagtgggatggtgggatgactttcttgggcagaagacaagagtggagagagatttcatcttatttattaattattattattattattattattattattat

SEQ ID NO: 37841 - DNA, 916 bp, Artificial sequence
  DNA replication origin
acatgggtgggggcactgatgggaagagaaagatgaacaggaggagaagcacaaggcagaaaagagagaaagtcatgagtgagggcgagttaaggcacgaagtttcaggggagcagcagccaaagagaaggggaaagagacagaccggaagactgggccgtgaaagggggcgggagaggcaggggacttcagaggactgggggggaaatgtcgggagagagaagatgtcacggggcacgagggagaggaaatgaaggggcaggtggagcggaggagcagggtcaagatgaactgacgggaaagagggagaaagaggctgctgggtgcagtggctcatgcccttcatcccagcactttggaggccaaggcaggaggatctcttgagctcaggagctcgagaccagcctgggcaacaggagacctcatctctacaaataataaaaaaaattagctgggcacagtggctcatgcctgtggtcccagctactcaggaggcagaggtgggaggatggcttgagcctagggattcgaggctgcagtgagctgtgattgtgccaccgtactccagcctgggcgacagagtgagaccttgtcaaaaaaaaaaaaaaaaagagaaaaggcacagggcagagtggaagaaatgaaacaggaggagccccaggtactggagagagggaagatgcaggggtgtgatggggcagcgcaggagacacggactagggaaagataggataagggggttcagcggagaggcagaggggctgcagagggagcatgccgaggaattccgcagggtgccaggacgcagggaggagtgggaaggaggggagaggaggtcaggggcgcgagtgggaaggcgcagaagcccctctggcagaggaggaggggtgcccaagggggccccaggatcagggac

SEQ ID NO: 37842 - DNA, 1336 bp, Artificial sequence
  DNA replication origin
ctgtggggaagtggagaccccccagctgctgctcagatccggcccatcgtggtcagggtagaacacaggcttgtgctagatcttccgccagctcagaagaagccggaaatcagaactacaatgggaagcctccctatttttaactgttggcaatggattcagattttgctttcagttttaaacactttgtacactagacagagcgcatctgtgaatcccatccatgagattcgagttctgctcttggctcggcccctttctcagctaggtgaccttgggcaagtgacttcacttctctgagcctcagtttacccatccccaacagcgaggtggtgcccacctcataggattaaacgagataacgttcccggcttgtcgtgaacactcagcaaaacagaggaagaaggggcagaggaaatagagggggatgaaaaagagaagcaagagatttcaatcttttggccgaagggggcatcaggatggctggttccactccttcacgttgcagacaagggctgtgaggctggggtgcaggagggaagacagtggtcacacagcagggcagatatgcagcagaactggcacccaagactcctgcttcccagccccgcagctacttgatactcaggaaagaaatactgatgctaagagtgggagagagaaggggttggcacagcagagggcaggagtcttggagaagtggggaagtcgagagccagggagccgagctaggagagaagctgtgagagggagaacaggacagaggaaaagaaccaagtcgaagatccgaggaggtagcaggggcaggagcgagaagccttaacgtgaaggcctgaggcatcgagtcaggaagacgtcgaaggaggcatgagtggaggaagaggaagtggagtccactaaaggaaaaaggaggaaaggaccaggatgggaggttggagggcaccctggtgggagagacatgggtgggggcactgatgggaagagaaagatgaacaggaggagaagcacaaggcagaaaagagagaaagtcatgagtgagggcgagttaaggcacgaagtttcaggggagcagcagccaaagagaaggggaaagagacagaccggaagactgggccgtgaaagggggcgggagaggcaggggacttcagaggactgggggggaaatgtcgggagagagaagatgtcacggggcacgagggagaggaaatgaaggggcaggtggagcggaggagcagggtcaagatgaactgacgggaaagagggagaaagaggctgctgggtgcagtggctcatgcccttcatcccagcactttggaggccaaggcaggaggatctc

SEQ ID NO: 37843 - DNA, 1734 bp, Artificial sequence
  DNA replication origin
tgccgggaaaaggcactgggactccggcacttggatcgacacgccgaggttagcctcccagccaatccgagtccagatagtgagatcctctggtccccgattggctgactgatctcgttcccgccccctcctctcaccttggggcgggctgagggaggatcctgggcgctaattggccgctttgctctctttggccctcgcggcgactctgcgccgtgactggttgtggaatcccggactgggattggccaccgcgccgcagagctgtggggcaatctgcggcggtgacgggccactactgggagccggctgggaaagcctgtattgccattggtagctaccccgagaacgcggcaaatcctaaatgatgattggctgcggcctcagccaggttccgaaatcgcaaaatctagttgcctggggttttaggggtgggtggaaaggaaggactgcagagaaaaagaggagggcggggcggggagtgggggcggggagagagagataaggggaagaagggagggaggaaaagagggagaaagagagatagacgaagtcaggcctaaagggggtagggagggagggaaggaggaagggagaggaagggagtgaagagaagagaaacctggaagattgaagaaaccaggcagaaaaggaggggagagagagacccaggaagatagaggaggccaggcgaaaaaaggggtggggtggggtggggtggggaaagacctaggaagacagatgaggccaggcagaaaaaaaaagaggggggagagacctaggaagataggtgaagccagacagaaaaagttgtgggtgggggtggctaggaagacagatgaggccagggagaaaaagtgggagagagacttaggaagacagatgaggccaggcagaaaaagcggggtggggggggacctatgaagacatacgaggccaagcagataagaggagagaggggagacagagccagaaagatagatgaagccagcaataaaactgggtggggtgggggcgtgaggagaagaagggaagagaaactcagaagtagattcagcctggcagaaacgggaggaggaggaggaaggaaggaatgtagagagagagagaaacccagatagatgaagcgaggcagaaaatgggagggggtgtggagagaggtagtaagtgatttgcgggatatggagaaagaaattcgcagacgagaggaaggaagggacgagaaagagaaagggagaggatccatggagaagttgggagaaaaacagggagagtgatttcgataaataaagagggggaaagatattccaagagagagaaaaatagtccgaagaaaaaagaaaaggacaaagaaaaagagggagagaaaatcagaccgagaaatagagaaattttaaaaacaggagagagaatgaggcaacagtaaaataaaccagaacacagccggagagagagaatcacagaactgtcgggaggcgccgcgagatggggggccgggaagggggcgcaggcggccgcgtctgaccgccctcgctctccctccttttcctttccttcctcccccgcaggagttgtccgggcctccagcatcttccccatccttagcgccatcctgctgctgctcgggggtgtgtgcgtggcggcctcccgcgtctacaagtccaagaggaacatcattctgggcgcagggatcctgttcgtggcagcaggtgagaggcagagggagggggcgac

SEQ ID NO: 37844 - DNA, 2051 bp, Artificial sequence
  DNA replication origin
atccttagcgccatcctgctgctgctcgggggtgtgtgcgtggcggcctcccgcgtctacaagtccaagaggaacatcattctgggcgcagggatcctgttcgtggcagcaggtgagaggcagagggagggggcgaccggggcggcccacctgggcgcgcacgtgtgtgtgtgtgtgtgtgtgtgtgtgtgcgcgcgcgcgcgtgagtgcaagtgcgcgttcgtgtgtctgcaaagccaccttgccccgagcacccccgggggcccggagccttcctaggcggtccccaagctccatcgccacccgctgggtaaggtgggtgtagttctcgcgtcgccttcggaggagtaaaccgacacaggcaggtgtctggcgcgtaagacgccgggcgcttaggatcccaagcccgccgtcctggagacggaaggggaggagctggggagggggtgggaccttgagacacaattgggctcttgaggatagagaggcggggctgggtcttggagggcgggcccaggagaggtagaaagtgatctgagcgccgatgaggagcctgctttaaggggcgggcctttggagactttggtggatccaagagggggctggtcctgggaaaccgtccagggccgggaagtggaaactaaaggggctgggtaagggagactgaatcggcccttgcccgtggccatttggagaaggagaggctagaaaagacggggcgatgcctggaaaagccaaagggggaggggttatgtccttaagggcacagagaatcaacctggctgattgaagcaagaggccgaccaaagccagtcagtacctgggattggccgtctcaagagctagggcctagacgagcagagagctaggactggaacacttaagaggcacgcaattaaggggtaaggccccctttctaccccgtatgagtagcattgggaaattccaggggcagagcttttttggaggagtagaatacagagaagagggagggctttgcatatttgaagagcagggtgtgctttggggatgggtctagatctgcaaggggtggggcttggaggatctgaaaggccggagtagctggacctgagaccggcaaggacccgagaccggcaaggaccctggccaagatccgcacggggcggggtttggtaagctggaggtggggcctagagtagaaggcggggcctgctttattaaaggcaaatttttgaccagtaggggagggcctagaatggatactccggcaggaattatatgaagagagattagataagtgaaaggcagggcctgatcacagcaggatgacatcattaacagagttcaaaggagcagagggatgaggcttgggaaaaacccaggtttataacgttaagggtggaggtagactaactagggcagggcctggaaactcatctcatcaaaggtgggttttagaccagtcagggcagggcctggactcgctgggagtggggcttaggccacctaggggtggggcctggaccgcttggggtggagttaccaccagccagggtggggtttagaccagcagagttgggaccttagctagaggagtggggtttatgccatgtgggggcagcccagaccatctgggggtgggtcctagaccacctggggcagagtttagaccagccagggctgggttagaccggcagaggtgggccgtgggctatctgggggcaggacctggaccatccagggccgtgtctggaccattcagggcagggcctggaccacctgggggtggaatttagaccatctgagggggtgcttgagcctgcctgggccaggaccacgcatgatgcagtctggaccattggcggccctacaccacctgggggatggagtttcgaccagccggggttggattagaccagcagaggtgaggcctgggccagctaagagtgggccggagccctctgggttggagcttagaccagcagggaagcgcctagagcatcgggcggggagttgtgttcacttctggcaggacttgggtcagccagatccaggacgggggtctagac

SEQ ID NO: 37845 - DNA, 705 bp, Artificial sequence
  DNA replication origin
tgggggcaggacctggaccatccagggccgtgtctggaccattcagggcagggcctggaccacctgggggtggaatttagaccatctgagggggtgcttgagcctgcctgggccaggaccacgcatgatgcagtctggaccattggcggccctacaccacctgggggatggagtttcgaccagccggggttggattagaccagcagaggtgaggcctgggccagctaagagtgggccggagccctctgggttggagcttagaccagcagggaagcgcctagagcatcgggcggggagttgtgttcacttctggcaggacttgggtcagccagatccaggacgggggtctagaccactcggggtggggcctagaccgcctgggggtggcgcctgggcccgctggcgcaggcgggcaggggtcggggccgggggcgggggcggggccgggggtggcctcgaggctcccgtctgaccgtccccgcccaggcctgagcaacatcatcggcgtgatcgtgtacatctccgccaacgcgggcgagccgggcccgaagcgggacgaggagaagaaaaaccactactcgtacggctggtccttctacttcggcgggctgtcgttcatcctggccgaggtgataggcgtgctggccgtcaacatctacatcgagcgcagccgcgaggcgcactgccagtctcgctcggacctgc

SEQ ID NO: 37846 - DNA, 1590 bp, Artificial sequence
  DNA replication origin
cgggccgcccgccccgcccgcgcccgcgccacccgcgccctctgcgcccgcccccgggaccctggccaaggaggccgccgcctccaacaccaacacgctcaacaggaaaaccacgcctgtgtaggggcgcggcgggggagccgaggggcgtgtccggggcgcgtgcgcgggcgcgcgtgcatcgaggctgccggggtcgggggcgcccccgctttcccccgtgagcgcgctggagactgctgggcccgccccacgcccaccctccccgcccccctccccctccgaagcagggaccccgagggagggggcaggggagggagggggccgctgtgagggagcgtcgtgttttatttttttgggggatctatggggaggggggagggccatggtgttttttgcagtttcgagatgttttctttttcatgttttgctgtgtgcatggggggcggggcggggggaggggagggagggactcccagcccagcccaactcctggagaggggcccataatacacgaatacatagttacacccacaaactatatatatgccctatataaagagacacagcgaagggatgcagaaaggcagaaagaagggttggacgcgggcattcattcatttttttcattcattattccacaagggcttattaagcacctactgtgtaccaggcactggtacataagaaggcattggagcaggggacacgaacgaggcacagaaagggccttctcattcattcattcattaccggcaatttatttgtgcgccttaaaaagctaggcattgtgctccgtgctcagcgtgcaggaggcaggaaaacagccaggggccccgacgtctcatagagtaaacatcttgtgcatgagacaggcattaatcgatcatgtacatacacaataaattacagttaggctataggagaaacgagatgctatgaaatgctccatcaggggagcctaacccagttgtgaggaagagatttcagtggacagtgaaaggatgagaagaagccagcagggcggagctggggcaggagtgtggcaggcagagcagcacgtgcaaaggccccggggcaggaaggagcttgcagcgagggctgaagggtagtgaggcaggtgagcggggatcaaggtgaggccggagacacagacagggccagattgtgcaggggctcgtaggtcaggagttcagattttattctaggagtggtgagggccgtggaacgggtttaagcaggacgctaacgtgaatggtgtacaaagggaagacaggaactcggaggcaagagtaggaggcagagatgtgctgaaatacagcatcaaacatgggcacgggcccttggagctcacactcttgtgggaggaagcacgtaattacacagatgctgaagcatagtcatggtgtctggtgtgcaggagaaagccgtggggcttagagactcatgtgtctgtcactcgttcattcagccactcacccattgccatttttggccatctgctaaggtaccaggaagtgtgttaggatccagatccccaggggtgaaacagactctagccctgctctcaagcagtttattgtcatcaaa

SEQ ID NO: 37847 - DNA, 885 bp, Artificial sequence
  DNA replication origin
ggtcaggagttcagattttattctaggagtggtgagggccgtggaacgggtttaagcaggacgctaacgtgaatggtgtacaaagggaagacaggaactcggaggcaagagtaggaggcagagatgtgctgaaatacagcatcaaacatgggcacgggcccttggagctcacactcttgtgggaggaagcacgtaattacacagatgctgaagcatagtcatggtgtctggtgtgcaggagaaagccgtggggcttagagactcatgtgtctgtcactcgttcattcagccactcacccattgccatttttggccatctgctaaggtaccaggaagtgtgttaggatccagatccccaggggtgaaacagactctagccctgctctcaagcagtttattgtcatcaaacaccgccatccaggcagggcaatcggtgctggaacccggaccaccgtgggtaccgtggcacacggtggacagagtgaccaactgccaggagtgagcagcacttggggtaggcttcctggagaatatgatgcccattctgggtcttgaagaaatgagtgggcatcttctggttgatgaaaggcatgagaaaggcttgtggggccaaagaacaacttgggtgaaaacgggaggaagtgaacgagcatgatgtattggggtcagtgctaacagttctgggatgctgatgtacaaggtggggctgggagatgaggccgggaaagtagccacaagctagagtgtaaaggtaccagggtggccgggcgcggtggctcatgcctgtaatcccagcgctttgggaggctgaggctggagtatcacttgagcccaggagtttgagaccagcctggataacatggcgaaaccctgtctctacaaaac

SEQ ID NO: 37848 - DNA, 1110 bp, Artificial sequence
  DNA replication origin
gggtgaaaacgggaggaagtgaacgagcatgatgtattggggtcagtgctaacagttctgggatgctgatgtacaaggtggggctgggagatgaggccgggaaagtagccacaagctagagtgtaaaggtaccagggtggccgggcgcggtggctcatgcctgtaatcccagcgctttgggaggctgaggctggagtatcacttgagcccaggagtttgagaccagcctggataacatggcgaaaccctgtctctacaaaacattaaaaaaaattagccgggcgtggtggagcacacctgtggacacagctactcaggaggctgagggaggaggaccatttgactccaagagttcgaggctgcagtgagctaggatcgcggcactacactccagcctgagcaacagactgagatcctgtctcagaaaaaaagagaaaaaggtgcctgagttccaggcagagggactgaggctcttctaaggatggtgagagaggatgacagctgcgcgggggcaagggctgtgcggtgattggaggggatgggtttgaagttcactgagaaggcagaggggacagcgcccagtaggcttcccttccatatttgctcagcaagtgtttcctgaggcctcccccgaagccttgtgctgggcggtgctgggagtggagaggtgattttgatcttgccctgctctcaaggggctcccagtctggcgggaaaacaggcacagacgcagcttgaggaggacgtggcagcggtggtgccatgctgccaggggctctgcgtgcccttctcttgacggaagggtacagatcagagctgggtgttcagaatttctctccgaggcctgtgtggaaggaccaggaagagagagactgaaggtccctaggaagaattctgccaaggcggtttcaggaagagatgctgggaaatgtaggaaaaggaatacaaatcagtgagacggagaagcgctgagtgagagagacggatacgtggagagaagagggatgccggagcgggtgttaaaagagacaaatctggccgggtgctgtggctcctaatcccagcactttgggagactgaggcaggcagattgagctcaggagttccaga

SEQ ID NO: 37849 - DNA, 879 bp, Artificial sequence
  DNA replication origin
ctggttgctggaggcctggaccaaggtggagttagtgggatggaggaagtggaagaaggcatgggattttggaggctagagcctgcattggtggtgaactggatgtcatagaggagggaaggaaaaggaaccaggaagagaagaactctctgaattgggcacgcacatctctgatgggcaccgatgaggattgttaccaggaacgaggagactgggatcaggaaagtggctttgggagggaggaaccaaggcttctcttttggatgtgtcaagatagatctgccttcgagaaatccgagttgtggtatcaaatagccagttggatatgtgagactggagtttgggggaaagagaggccgtggctcaaaaacgtaagttttggaaacgtcaacataaagccacaggattgggtgacgtggcctagcaggggggtggggacagagaagcgaccctggccagagccttggggacatctacatctgggggagaaggggatgtagcaaaacgagcttaggagtgatctcgaggtaggctgaaaccaggagggttacagagggcaaatgcacctttgtgtttcaagaaggagaggagacagccagctgtgccaagggctgctgagacttggacaaggatgcagagagcagagtgaccattaggtctgatgacatggacagggttggtgatcttgataagataagatgtcagttcagtgcagtggtggggacagaagccctgctggagtggaggggagagagaatttggggggaagacagaaggaaagggaattcaggcaagtgtgtgtgtgtgtgtgtgtgtgtgtgtgtgtgtaactgacacaaaggccaggtgcgatggctcacgtgtgtaatcccagcactt

SEQ ID NO: 37850 - DNA, 732 bp, Artificial sequence
  DNA replication origin
tggacagggttggtgatcttgataagataagatgtcagttcagtgcagtggtggggacagaagccctgctggagtggaggggagagagaatttggggggaagacagaaggaaagggaattcaggcaagtgtgtgtgtgtgtgtgtgtgtgtgtgtgtgtgtaactgacacaaaggccaggtgcgatggctcacgtgtgtaatcccagcactttgggaggccgaagtgggtggatcacttgaggtcaggagttcgagaccagcctggccaatatggtgaaaccccgtctctactaaaaatacagaaattagacaggtgcggtggtgcacacctgtaatcccagctacttgagaggctgaagcaggagaatctcttgggcccaggaggcagaggttgcagtgagccaagatcacaccactgcactctagcctgggtgacagagcaagactctgtctcaaaaaagaaaaaaggtaaaaaaaaaaaaaaatgaccctgaaaggaagtagggagacatgcagatagggagatgggaggcagaaaattgcatcctgcaattagctgtcacagcaggcaggagcaagagagatggggaagcccagggccaggaggggaagatgaattcagggggcagggaagagaggatgctgtcagctaggctctggcagatcccctagccagggatgctctgcccagctcctgtctcttgctgctgtcagcgccgggcacactctgg

SEQ ID NO: 37851 - DNA, 1281 bp, Artificial sequence
  DNA replication origin
agcaagtctgactggggttaccagggaggaggggcgggaggcagggccccgggtctcagggaggagggcctgaggccaggagtcttgggtccctaagggagaagaagcctcggtaccccacttctgagtggtagaggaagaaggcctgggtacccagaatcttggatctgagaggagaggaacctggtctcctaggtcctgggctcctgagtctgagggaggaggggctgggggcctgaactcctgggtctgagggaggaggggctggggtctggactcctgggtctgagggaggaggggctgggcctgggctcctgagtctgagggaggagggactggggcctggacttctgggtctgagggaggagggactggggcctgaactcctgggtctgaaggaggaggggctgggggcctggactcctgggtctgagggaggaggggctgggggcctggactcctgggtctgagggaggaggggttgggggcctgggctcctgggtctgagggaggaggggctgggggtctggactcctgggtctgagggaggaggggctggggcctggactcctgggtctgagggaggaggggctgggggcctgggctcctgagtctgagggaggaggggctgggggcctggacttctgggtctgagggaggagggactggggcctgaactcctgggtctgaaggaggaggggctgggggcctggactcctgggtctgagggaggaggggctgggggcctgggctcctgggtctgagggaggaggggctgggggcctgggctcctgggtctgagggaggaggggctgggggcctgggctcctgggtctgagggaggaaggcctgggcctggactcctgggtctgagggaggagggggcagggggcctggactcctggatctgagggaggaggggctgggcctggactcctgggtctgagggaggaggagggccggggagcctggactcctggtcaaggcgttggcagacccagagtcctgggcctcagggaggagactggggccagaaccctgggtcttgaaggatggaaggcctgatttccatgttggagaaagcgcaggcctcagggcagggccggctgtcaggggcacagaatgaaagcagcactcctcttcatcgagtttattagacggggcacccctgggggaccttccatgcagtttcagctcccccaggagcagggacagaggacagccgtgtggcatggcggcagggcctgatcttcaacccctcaccccctacccctcagccct

SEQ ID NO: 37852 - DNA, 1525 bp, Artificial sequence
  DNA replication origin
tgagacccggggccctgcctcccgcccctcctccctggtaaccccagtcagacttgctgccccgcccgtctcctgctgcccgggagactgcggagctgggactctcggcgccgctcttgccccttagtgaaatgaaagtcccatcaggctcggccccttcctccccgggcggcctccctccccccttcctcgtccccttaaaacacccgggatccctatggcaacaggcgccgggcgacaggtgcgggtgttatttacgggtcaagcccgaaatagccccgagggtggagggtggagggtggggggtgggcgggtggggacgaggccgggcgcgggcggaggccaggccggtggcggtggcgggcacagccggacgcttcggaggcagcgcggagctggggtcggcgcggggccgaggcaggagagcgagaggggcccctgctcgggagtcgggggtgggagccccgagggggggccctggcctggggctgagcctggcgcgaacccgaccgggaaggccctgggagcccgggggagggagacggactgatcccgaaggggcgcagcgtctcttgcgggtcgcggttggcctttgaaccctggggggactcagtcctggttttccgagccgcagtgcggaccacagccccatagtgtgagccccaggagggcccccggtcccatctgccccagccctcggggaggccccgtagcctcccgcctctggactccactctgtcttccggccaccggccccttttccaggctcagtagagacctcggatcttttctgaatggcaggggagacccctatccccttttcctgaattccagcgaggcccagtcctcttctgagccccagccagggctctgttcttctccttctgtggatgccggggtcctactgcctctcttgagacccggattgaattccgacctccccttgggagcttcccgggaccccaggtcttccttttccgaatcccagagggtccccaagtcctctgttctcaaactctgagcccaagggaaccccggccacatctcctccaaacacacacaggacctcaggtcccttcctgggtaccccaaactcttagccctagtggggtgctcagatctctcaggaaaaccagtttcccttttgttaaccccccagcggggaccccaaagcagccccttggagctgcagggagcttcagcgggcaccagttctcattcctctggagctcttggggggactccctcctgggaagccgaattctatctctaaacctcagggtgggggccttgtttttcctctgggccccgtcttctttgccaagttcttgagggcaacctagaccctcctctgaaccccagaggcttccccagccctggggatcatttttctcttctgaaccccagaagcaatctcgactttcgcatttgagattccagacaggactcggctctccctctttcatacccaggggaaactgagtccctcacccccttcaagaccccaggccgctcctcgctcccg

SEQ ID NO: 37853 - DNA, 1171 bp, Artificial sequence
  DNA replication origin
catgcccagggataaaacagccatgatttgggaaaggagggagtatgggaatgtctctcggagaaaatgagaaacgctgaaatgtccagtctgggcatttggaggcgagaggacaggaagtgaagaacattgcagggaaggaacaaggtctgccctcgggtgttgggaggcgtctggtgagagcttggtttggtggaagcagtaggtggggaacaggcatagatcctgctttggggtgggcgtctgtctccccagggctcacaggatgggagcgcaagctgtctccaggctgggaagaggaagctgacaccaggaacccaggctgtctctccatgggcacaggctgtctgtgggcacatgcagagtgggcacgggctgtctccagggcacaggcacttccagagggtgcaggctgtctggggtgggcacaggctatctgaggacaccagctgtgtctggaatcacaggctgggtctggggacacaggcaagatttttctagtgacacaggctctctctagagctgtaggctggtctggggggacacagcgatgcctgggaacattggctgtgtgggggcagggactttgggggtcatagaatcatctgggaccatagcctggtgtggaggtgcaggctgatctgagggcacaggctggtgtaaggatgcaggctggtctgggggtatagactggtctaggggtgcatgttagtctgggggtggaaactgtagctggggacacaggctcatctgggggtacaggatagtcggggtacaggatggtcttggggcacaggctgtaggcgggggcacaagctctctttagaggtgcagaataggggtacagactcgtctgagggggtctcaggtcacagcctggtctgggggtacaggatggcctgggggcacagactccctgtaggcacattctggtcttggggtacagtctgtagcaggaaagcaagctctaaggcacaggttctctggcggtaggcccgtgagggacctgggccatatctgggggatccctctatctctcagcagtttctgagagcagaggacgaagtgggcactggcgcttactgcgaggcaagctgtctcctccgggctcaggcttttgtccctggggcgggttttctcctcggacacgggcccctctccctccctgtcc

SEQ ID NO: 37854 - DNA, 1072 bp, Artificial sequence
  DNA replication origin
tttctgtagctgctactactacagtgagtagacggcagtgctgggattcgaaccctctgtcttctggcttggaagtcttaaccactaatcgcgtcttcctttcagctactccttgggaaaggcctggaaagaagctacagcacagggcacagcggggtctaaggaccgttccgcggagctcagccagcaggactgtggggctgcaggaaaggacagtccagcccagggtcccagcttctccgccactcaggttggaagtctcgggctgcagtgctcctggggctcaggggcggataccagcaggagcgcggttctgactgcgccagtcaaaagtgaccagcgcgcccagggagatgaggaccagcccggccagccccaggcggactaggttcccccgggtgtagtcggaggagccagagtctgcgggcggagccgggagagaggggccatcagctcccggaccccaaagtctgggccctgaactccaggtttccagcccctggggtggacttagggacctgactctacagtctcaaagttgagggggagtcgatggaggcttcaactcctgggtccaggaagaaggggctggggcctggactgctggatcaggaaggaggggctgggggcctggagtcctgggtccaggaaggaggggctgggggcctggagtcctgggtctgagggaggaggtactggggcccgggaatcctgggtctgagggaggaggagctggaggactagactcctggatctgagggaggaggggctgggtcccaggaatcctgggtctgagggaggaggggctgcaggactagacccctgggtctgaaggaggagaggctgggggcctgggctcctgggtctgagggcggaggtcctggggcctgcattcctggggcggaggaggcgggccgggcctcagggccctcaccttcccagctgatgaccagcacctcgctgcgctgcgacagcacgtagggcgcggagggcgtgtgatagtagcagctgtaggtgccgggggcgcgggcgcccagcagcgtgaagtcggcccagggctgcgcggagtggc

SEQ ID NO: 37855 - DNA, 2124 bp, Artificial sequence
  DNA replication origin
gatttgtgaataagtgatatctgccagtactatcatttgtcctctagttttgtcttttagcatacacaacttaagaaatttgaagtggtcaaattaattaatcttccatacaactttttattttatattttaagaagccttccttaccccaagacaaatatattttcctatagttttttgaatacttttatagtttaaaaaaaaagaaacacagggtctttaattaatctggaagttgttttgggaaatggtatgaggtagggatccaacatttttcttttccaaatagcaagttttggcaactcttgaaatactatattgcaaatattctggaaagctatttaaaattagagttctggctgggcgtggtggctcacacctgtaatcccagcactttgggaggccgaggtgggaggattgcttgagcccaagagttcaagagtagcctgggcaatatagcgaatgctcgtctctactaaaaattaaaaaaaaaaaaattagcctggtgtagtggcatgtgcctgtggtcccaggtactcaggaggctgaggtggaggactgtttgagcccaagagattgaggctgcagtgagttgagaacatgccactgcactcctgcctgagcaacagagcaagaccctgcctcaaaaaaaaaaaaaaaaaaaaaaaaaaaagtctgggtgtggtggcacaagcttgtaaacttagcactttgggaggccgaggtgggaggattgcttgaggccagtagtttaagaccaacctgctcaacatagggagaccgccccctcccatctcattacttaaaaataataataataataaaattacagagttctgggacctgaccttttgaaactgtgtttacaaactgtggagtaaagctcagaagtttctgtcctgcccctctgatttgcacctggttttaacaaggcttgattgtagtccagtctctccctgattttacaaacaggaaactgaggctaagaaaggggcagtaattgtccaaggtgattttcctccttccccaacttccctttcatcttctggggctcccaggaggcccgaggacccaggcagccccgtttattcagtccccccagcttcataccaccctaagccatggctgggagctcagccggctacagttgtgacccctggggtcaacgtgaccttgagatgccgggcaccccaacccgcttggagatttggacttttcaagcctggagagatcgctccccttctcttccgggatgtgtcctccgagctggcagaattctttctggaggaggtgactccagcccaagggggaagttaccgctgctgctaccgaaggccagactgggggccgggtgtctggtcccagcccagcgatgtcctggagctgctggtgacaggtgaggtcctggggtcggggaggagaagtgggtggaacaagggagttgggggagggacagagagatatagggaaagagagacagagcgaggcgggcaaacagattcacagacacaagaaaagacagatacagagacactagggggagagagagagacaggggagcagagagagagagaggtacagtgcggggggagagagagagaaagaggcagaaggagaaagggaggcagagagagagggaggcagagagagagggaggcagagagagagggaggcagagagagaggcaggcagagagagagggaggcagagagagagggaggcagagagagagggaggcagagagagagggaggcagagagagagggaggcagagagagggaggcagagagagaggcaggcagagagagaggcaggcagagagagagggaggcagagagagagggaggcagagagagagggaggcagagagagagggaggcagagagagagggaggcagagagagagggaggcagagagagggaggcagagagagagggaggcagagagagaggcagacagagagagagacaggcagagagaaagagaggcagaaagagagagagaggcacagagaaagcgagagacagaggagaaggagaaacagagcgagcgagcgagcggaagacgctcacgcggccccggactctcaccccgtctctgcagaggagctgccgcggccgtcg

SEQ ID NO: 37856 - DNA, 960 bp, Artificial sequence
  DNA replication origin
atcccagcactttgggaggccgaggtgagtggatcacaaggtcaggagatcgagacaatcctggctaacacggtgaaaccccgcctctactaaaaaaatacgaaaaagtttgcgtgtcgtggtggcgggcacctgtagtcccagctactcgggaggctgagcttgcagtgagctgagatcgcgccactgcactccagccttggcgacagagcgagactctgtctcaaaaaaaccccaaaaaacaaaaacgaagcacaaacacagaatagtatacgaattatatctcaattcttaaaaaatggaacggggggtccgggcaccactgcagaatctctgataactgcttaggaaagacctgcccataactgcccttacgccagcacagggaggctgggcctattccggggatccctgcctggcccccactcacctgggtagttgtagggcgtggccttgttgatcatgacggagtacttgaagtaggggctcaatgggggcagaattacagctgtggagagacacaggggtgaggcccaggggaaggtggctctgaagagaggggaagagaaggtgagccttggcaaagggaagataaagtgcgcagggggagggcagcagggagggccagcacgtccaggaggatccttggtaccttgggatccctacttatagacaggagggtttaaaactcttttttggggggttaagtggaggtaggggttggagcctaacactcacagatacgtggggcctggaggaggcagcagtggggttggtcatggaatgagcacgtttgagtgtagggtcatcatggagcatcctgggggtagtgtcatgggactgttctggagaaatcaagactgttacaaatttggccgggcacagtggctcaagcctgtaatcccagcactttgggcggccaatgtgggcggatcacctgaggtcaggagttcgcgacca

SEQ ID NO: 37857 - DNA, 810 bp, Artificial sequence
  DNA replication origin
ttaaaaagcaaaacaaaatgaaaacaaaaatggtgaagctgatgggattttctagattcccaggcctgttaacaccttgttccttatctcctgcagattaaggttgaggaagactttggctttgaagcagatgaggccctggattccagttgggtttctcggggtccagacaaactgctgccctacccgaccctggccagcccagcctctgactgacgcatgcccaataaactgaccccacactcaccccggccaccgtctacttgttcccacctctgatcacacacatgctcacgttcgggggttggttttcacatttttattgggagccgtgggaggggccgcctctgtcagtggaggtgctcacagtttcttcagccactccaggctggggccctgagggtcctgggggtggctgggcacgtcgggcatgttcccatcatcacggacgggcactgtggggcaggaggtgggccactgagaccagcacgtctccagggccctggagagaagagctggtctgtcgctttatgttcagagagggaagggggaccccaggggtgagaggggaagggtcagagaatcagtgatgcagaaagaggcgggaaatacagagactgagagacacggaaaaccagagagatagcgagggagagatcccgcgcactagagagctagggtcaaaagagatggggaaacaggacagaaacctgagaagatggagaccaagaaaccaccacagatgggaacccagagagagacagaaatctggaaaggtaatagaaactcgaagcacaggccaggcgcggt

SEQ ID NO: 37858 - DNA, 969 bp, Artificial sequence
  DNA replication origin
cgttgagtggagtgggagctgagctctatcctgtggcccttttccccagccgctaggagataagttattccgttggtggcttctccccctgagcaggttcctcatgagagtgctggactcctacggggatgactaccgggccagccagttcaccattgtgctggaggtgagtgttgggcctccaggagggtcaggaactgggagctcaggacccacccatcacctacctccccctcctgcctgccaggatgagggcagccagggcacggatgcccccaccccaggcaatgcggagaatgagcctccagagaaagagacactgtccccgcccagaaggactcctgcacccccagaacccggcagcccagcccccggtgaggggcccagtgggcggaagaggcggcgagtgccacgggatggacgccgagcaggaaatgcgctgactccagagctggccccggtgcaggtgaggaaggcgggaactcaaggggagggactggggctccagagccggcgccagtgcaggtaaggaggggggactcaaggggaggggccagggctggggctgagttaggttcagggctcttgggttttggttctgcaccccgaggggcccagggctggggaaagttggagaagggaggtgaaccaggacatgttggaggcctaggatcaggcagggaagtagttggaaaaagtggggtaaaggcttgggtaaaaaggaggcaaagttggaaagggaaagaggaagacctggagaaggaaaaatagctagagaaggctgggagtagaggagaaggaaggatcagagaagacggagtggaagggaaggcccagtgtggggaggaaagctggaagaacatctggacccaggaacactgggattgcctctgaggtgtaaggaggaaggtgactggcctgggcagacaagaactgtgaggctggccaggtgcagtggctcatgcctgt

SEQ ID NO: 37859 - DNA, 2105 bp, Artificial sequence
  DNA replication origin
tttagtagagacagggtttcaccacgttaggctggtctcaaactcctgacctcaggtgatccgctcgccttggcctctgaaagtgctgggattacaagcgtgagccaccgtgcctggcactttttttttttttttttcttttgagacagagtcttactctgtcacccaggctggagggcagtggtgtgatctcggctcactgcaacctccagctcctgggttcaagcgattctcctgcctcagcctcctgagaaactgggattacaggcatgcgccaccatacccagctaatttttgtatttttctttttttttttttttttttagtagagatgaggtctcatcatgttggccgggctggtctgcaactcccgacctcaaactcttgagtagctgagattacaggcatgtgccacaacatccggccaatttttgtatctttagtagagacggggtttcaccatgttggccaggctggtcttgaactcctgacctcaagtgatctgcccgccccggcctcccaaagtgctgggattacaggcgtgagccactgtgccccgcccggaactcaggtctttctgacccaggagcagcacctgcttcagccactgtctttgggtccctgtttggctgagtcacatctctccctccatgtctaggctggagtcctcagaagctgcgtgcagggctgtcccctcagcctggcatactttcctcctgtcacccctttgtctcctccttattcaagtctgggcccacgggccttctctgcaggtcgtaactaaagtcgcacctcctgccctaacctccagcatgtctgactctttggtattcaccaagcacttctcactttgcaaagtcattgattctgcaaatgttcatcgaggatgtactacgtgccaggctctggttaaggcacgggatgtagaaacaagttgctgtcgtttttcagctcatgctctggctggagaggcggtcagtcagcagaataagcaaagaggcggagaggctgcgtcctgcctcctcagatgagcactaggaggaaataaagccaggagtgaatggccgggtggggttctggcatgggaaggggggtcgggtgtgttgcaatttttttttttgaaacagaacctcgctctgttgcccaggctggagtgcagtggggtgatctcaactcacttcacccctccacctcccaggttcgtgcgactatcctgcaggcacctgccaccacgcccagctaattttttgtatttttagtagagatggggtttcatcatgttggccaggctggtctcgaactcctgacctcaggggatctactcgcctcggcctcccaaagtgctgggattacaggcgtgagccaccgcacctggcctggtgtgtttcgacttaatgggaggttcaggctctctgagcaggtaacagttgacctaagacttggagtggggagtaagttgtgcggatgactggggagagggtccaggtagaggaacagcacgcggaaggcccccactggagggcactcaggactgtggcatggtgagaggggagccggagggatgggaaggtggaaggacctcaggccacgggatggtctttggccagtctccagagtttagtgcgtgccccattaaacatccgttaaacaaatgaacgggagccgtgggatccagctgatgggcgtttcccaccccataggtgaacgagcgggtcctgaacaggctccatcaggtgcagaggataactcggaggctgcagcaggaacggaggtaaccccttctctgtcccctctgggcctgtgagcctcagctcccaaatgctcccagcccctctgtctctcccacttccacatccacccaaccctcacaagccacaaggagaagccggagatgagggccgggggctgaggcaaacaaggaggaagagtgggattcggtgttggaggagagggctgagcactgggactgagggagggccgggtggagagggctgagcactgggactgagggagggccgggtggagggcatcctccccctgaagggagggaacagcaggatggaaggcacacgagcacagacctgactgcaagtattttctttttt

SEQ ID NO: 37860 - DNA, 1550 bp, Artificial sequence
  DNA replication origin
gccgcgggggctctaagcagcggagacacaggctccaagggtcgcgagggtcgctttggggctgaacggatggaaacgagaatagaggccggggggggggaggctggggcagcgccctagacatgagccagggccacaggacgagaggaggggcggtggcaggaggcagagggcggtggcggctggctggctgtggggttgaggagggcgctctgggagtctgacctctccgaagctcatacggttggcctgcttccggatctccgtcagccccagccgctccttcatcttgcggtacctggggacgggtgggtgggcggcgccagggagtcggctgggaggaggacgccggcttctcccctccatgacccccatgcctaccggacccccagggcccctcacctgcggccgcctcgcttcttccgctgtccatccaggggcgcaggcagcggcttcacctgcttcacaggcggcggctcctgccacttgtcgaatttgcgctcgatctcatccttcagttcgtagcccacctggggagggcgagggggaggtcctgcagctgctcgcgtgggctgcccacccaggcctcctctgagcgggccccccgagtatccacgtgccttagttaaatcagcacctaatgctgcctcaccgccaccccctttctttttcttcttggtgttgacttagcaccgctagacgcaggacagagttcacctgttgactgtctctttgacccggccccaacaagaatgtccacgccacggggcaggggtcctgtctgtgctactcacagctgcacccccacacccagaccaggggtgagatggggagagggaaaggagaaggggacacggaacacctgaacgctgtgccaggccgggtgcttggcaaacgacagttcacaagacagaaaacgtctcctctcccgagtacatctaccaaggaagacagaaggtaactgaataattacttgaataacatcccctgttgcagcggggacagatcctggtgtggaaggcaaattacgcccccaccaacacacacatgcccaaagaggcccatgttctaattcccagaatcacagggcaaaagggacgtgaagaggttaagaaggattttaaggattgtgagctgggaagactatcctggaccatctgagtaggctcagtatagccacaggggcccttaaaatagaagaggggaacaaaaacagaggcggagatatgaagacagaagcagagtcagagagaggtctgagggtgctatgtggctggctccgcagacagagggagggccacgagctaaggggtgccagtgacccctagaagctggaaaagaccagggaatggattatcccttgaatcccccagaaggaacgctccaggatgacaccctgacttcagcccagtgaaactcattttggacttctgacctacaggaccacagataataaacctgtactgttttttgtttttgtttttagatggagtctcgctatgtcacccaagctggagtgcaatgatgcaatctcagttcactgcaacctc

SEQ ID NO: 37861 - DNA, 1874 bp, Artificial sequence
  DNA replication origin
ctccccccccccggcctctattctcgtttccatccgttcagccccaaagcgaccctcgcgacccttggagcctgtgtctccgctgcttagagcccccgcggcttcccatcgccccgggctccttggccggttcctccctgcccagaggctccttagtgccctgctgcacggccgccccgtccctgggccccgccagtctcctctgttatcccagcgtcatccccttggtcctgcaggaccgaactcagaggccacctcatcctattaaacctgttctggttcctgacatcccccgacccacacgagtaaggaaggaatggcctcccaactctgagctcacagagcagtgctgggaccgggcccctctcaggctccccagcatcccccgcgtgtgtgggcccccaggcctcagccgggccgagtgggtaccggagcaggtgcccgtgggaccggccggctggtgaccgctgggcttcgggctggtggagggggtgcctcggtggctggagggcagggcctggtcgctgaactgcagggcgcctcctctcccccctagatcgaggaggacgcctaccaggaggacctgggattcagcctgggccacctgggcaagtcgggcagtgggcgtgtgcggcagacacaggtaaacgaggccaccaaggccaggatctccaagacgctgcaggtatgggccagacccaggtggggctggggaccgagggacacaaggtggggggagcccagatcgcagcctccctgtcctccccacagcggaccctgcagaagcagagcgtcgtatatggcgggaagtccaccatccgcgaccgctcctcgggcacggcctccagcgtggccttcaccccactccaggtacctcccctgggccggctctgtccccagccctgagaccttggcaaggccccttgccctctgcccctgtgaagaaggccaggatgagtctcctcatggggctgttgtggagggtgtggtgacgaggtatgcagaggacgtagacagctcctggcacacaggaagaggttagcagagacgagagcccagcgctgagcagtcctcgtgagcacgcactgctttagaaccaggcccacagctgtgttcagggcacccagttcctctgtcgggctgtgagcgggtaacactgctcagcctccaggccctccagttcaaaacggccaggacggttaaggtaacctcaggaccccactcgagaaagttcccggctaggcgggcttggatgtcaagtgtgggtccaggccccagccagtcagcagtgagcagcgtggagcatggcagtcaccgcatcgtcggagcctcggtttaccatccacagagcagggcgagcctgcaccacggaggcgagacagcagcgagctcatctgcccagtcagcgggtgtctacgcagcacctgctgagttctgtcagtgttcccggctctggggatgaagcaacgaatgagagacaagtcttaccttcttggagccagtgggtggccgggcgcagacagctcagtaagatgtccagtgtaggagaaggcagaaatgccaggccgggcgcagacagctcagtaagatgtccagtgtaggagaaggcagaaatgccaggccgggcgcagacagctcagtaagatgtccagtgtaggagaaggcagaaatgccaggccgggcgcagacagctcagtaagatgtccagtgtaggagaaggcagaaatgccaggctgggcgcagacagctcagtaagatgtccagtgtaggagaaggcagaaatgccaggccgggcgcagacagctcagtaagatgcccagtgtagtagaaggcagaaatgccaggccgggcgcggtggctcacgcctgtaatcc

SEQ ID NO: 37862 - DNA, 1106 bp, Artificial sequence
  DNA replication origin
agaaggcagaaatgccaggccgggcgcagacagctcagtaagatgtccagtgtaggagaaggcagaaatgccaggctgggcgcagacagctcagtaagatgtccagtgtaggagaaggcagaaatgccaggccgggcgcagacagctcagtaagatgcccagtgtagtagaaggcagaaatgccaggccgggcgcggtggctcacgcctgtaatcccagcactttgggaggccgaggcaggtggatcatgaggtcaggagatcgagaccatcctggctaacacggtgaaaccccgtctctactaaaaatacaaaaacttagccgggcgtggtggcgggcgcctgtagtcccagctacttgggaggctgaggcaggagaatggcgtgaacccgggaggcggagcttgcagtgagccgagatcgcgccactgcacttcagcctgggcgacagagccagactctgtctcaaaaaaaaaaaaaagaaggcagaaatgccagggaggggaggaggtggaaggtaggaggtgggacaggggaggctctcgtttcggagcagccagggagggcctctttgagaagatgaggccagtggctgtgcctttccaagcctcccctcctccatcatgaggtgctcaggactgaaaagaacgcacaggaagcacttggcactgggctcaccattagagcccaatgactgggtcctgttattatttttagagacgggggctcgctctgttgccttgaaaatatttaggaagtgccagccaggtgttggctcccattgctgccactatgatcgtcagtggtgttggtgtgatttgtgctaggacctcgggccagccatgtcccccagggactcagtttccttatgcagaaactgggcaggattggctgtcctcaagcattggttgtttttagcacccctgaggaacttcgtacaaatccaggcgccctggttcctccccaccctctccctctagacccactgagtcagaatctcccaagacagggcaactccagggacaggcaaactgtctcatgcccaccaaggcctgagtgccatggggaagggcctggggggctctgatgggtcacagttggggcctt

SEQ ID NO: 37863 - DNA, 1225 bp, Artificial sequence
  DNA replication origin
tcagacaggacctagaaagtcagagggagacccagatagcatgagctggagagagggagggagagagagagagggaaggtggagagagggagggagagagggaaggtggagagagggagggagggagggagagaggggaggtggagagagggagggagaggggaggagagagggaaggtggagagggagggagagggaaggtggagggagggagagggaaggtggagggagggagagggaaggtggagagagggagggagggagggagagagggaggggaggtggagagagggaggggaggtggagggagggagaggggaggagagagagggagggagaggggaggtggagagagggagggagggggagaggggaggtggagagagggaaggtggagagagggagggagggggagaggggaggagagagggaaggtggagagagggagggagggagagaggggaaggtggagagagggaggggaggtggagagagggaaggtggagtgaggggaggtggagagaggggaggtggagagggagggagagagagaggggaggtggagagagggagggagagagagaggggaggtggagagggaggaagagagagaggggaggtggagagagggagggagagagaggggaggtggagagaaggagggagagagagaggaggtagagacctggaggcatcatcttcccaccaggctgctgcttgtcctggtaacatctcttaggtaactaacagaagcccgaccttgtaggtcaggtgactagcgctgcctccttagtaccaccgtgtagcccagctccggagcacatagtaaatggaacccctggagttgctcttccttaacctctccagggagacggtttcatgccacccgctaggacagcccctgctgtcccctggaaactctcctgactgtctgcaggccacattcccctcagtccaagtaaaggcgctcctggccgagccccggttcccgagactcagtgactggaggtcaggggaggggaagtgtgctccttctgctcacctggcaggacttttatagcaaccaggtcctaccagggcaggaagcctgcctgcttcgcctgtgcccggctccacacagtccctcaacactggttataaataagaggctgggccaggcacagggtaatcccagcactttgggagacgaggcaggcggattagttgaggtcaggagttcgagacc

SEQ ID NO: 37864 - DNA, 1420 bp, Artificial sequence
  DNA replication origin
cacccctaccggggggcccgacgcgatgccacgcggggaggcggcggcgggcggggcccggggtccgggtcgcggaaggacccccgggaggcgctgaggaacgtgaaagaggcgcaggaacgggagggcgagagggagggagccgccccccgccgggagccccgcgctgcagaggcggcggcagggggcaggcgaggggaggccatgtcgcgacagacggcggtgtcgccagggcgggaggcggcggggagggcggccgatggcgccggggggaggaagggaaggggtccggcccagtcgagcctgacgctctcaccacaggagctggcgccgccgctgaggagcgtatcgcgacaggcgggggaggcgagcgcccgccgcctttttctcgcgccccgggcccgggcgctatcgcgatagcggcgcgaagcggaagtggggttgggggagtgggcccggggttgttctgacgacgggggtcggggctcaagggaggccgcggcgtctgccgatggctccgcggaagctgaccgggcccggtccaagatggcggcggcggaggaggcctcccctcctctcttctcgtctctggcgccgacccgcccccgagtcccgaatataggccagtcattgctcccgctgaacgtcgctcctgacccttggaggctttctattggttcctggcagggatgcgccctgccccctttcgcggattgggtgatcgctccaaggcgcggcgttcgattggcctcccgcgcaggctgctaggattggctcaggttttcctccccgctcctcctcctcctcccgcctcagggcacaacacgccagcgcgaggacccgaacgtcaatcaagagacctgtgtcgtgctgattggatgtatccgcccccctctcttaaaacaattggtctgggggaggagctacgacagtccaggggcgggaagtcgtccgtcaagtttagagctctttttaattggttgcgggggcatattctgccttgaagtcattggttggtcctggaagtgggtggggaaagcggaggaaggcatggagtgtgggcgttaggggccgcgtacctaatgggagacagacaggtgcctttaaagcgggggccgagccgaagtcatctgccaatcaaaacagccacagggccaagtgggaggagctgggcaagaaagtccacccctttttcttcgttggccctaaaagttatcattcatgctagttggaccaatagcgtggcgagtgggcggtagctgctcgtagagcgtgtgaaagagggtgtatgtagctggcagaagtgggacttggtcgcaaccgttgcgtcccggccaggtaagcagcttccctctcagctgcctcgtctttctccaagtgcctctatgttggcacatctctgaaattcattatttgctga

SEQ ID NO: 37865 - DNA, 887 bp, Artificial sequence
  DNA replication origin
tcgcctgccccctgccgccgcctctgcagcgcggggctcccggcggggggcggctccctccctctcgccctcccgttcctgcgcctctttcacgttcctcagcgcctcccgggggtccttccgcgacccggaccccgggccccgcccgccgccgcctccccgcgtggcatcgcgtcgggccccccggtaggggtgtgagggtgcgaagcctcccgggcgcgaggtgcccgcccctctccgcgtcggtattggctcctggctggaaggatggaggcgcccctggtcccaggtgcccgccctctcggggctcaggtgcctgcccccctcggcctcggtccttcgcgttgtggggcagcctccgcgccggggcttctccctcgacggtggcggggagggggggtggtggtcgggacgaggaccccagctgggtgggggagtcacccttcccaggaccgaggccgccctccgcatccctcctcactgctcccgggagcgcagcctcccctggatctcaggttccagctgcccgtctgtatcggatgggagcctcttgggagaggagtggaggagaaactccccgttagttggagcctttgccgaagtttccacctctgtagtctgcagctcttccctctcatagcgagtagcgccctgggtggctccagcctcgccatcccgctgcactgggcgcctgcctttttgggggagtttggctttcccccacctggggtacaggaccgtcctcagtgtggcccacgtctggtctcagctctcacacttctttgatcctggcgtctgcccctggctttgcagccttgaactcccctgcatcgtgactctccgaccttctgggtgtgggcgtctcccagtgatatcaggaccactgt

SEQ ID NO: 37866 - DNA, 720 bp, Artificial sequence
  DNA replication origin
aacagccgggattagggatttgagagacaggattgggagggcttagcagctgcacgcgtggggcaggaaggaggtcagacagaatctcagggtcccctgggtgtctgggtagaccgtggggcctttgtgaagaggagcgacttgggggaaggtgagtgcaggttgagcttgggccacagagtaaaagtgagacctgaaggacacccatggcaagaggcctcctggcacccagagggccctggtcctagggagagcacagtgggtagagacaaggcagaacatggagaaggcagagaaccaggcctgaaggaagacaggagtctgggacaaagctggatgttggggtcccaggttctaaaatccgggattgtggggtatgagttcaaagggatacaaactgtacagacttgctgaaaccagaaagacagggaggggagagccgggtcctcagggaagctgtgggtgggagagggtcaggaagtggaagatgacagggttgggtgtcagactctgaggggtttgggaaccaggggctttcggggagatgatgggtccttgaacagagcagagatttggaaccaaggctaagatgttaaatcctaaaggggccttgaggggagggcaggagcgaggcttaggaatctgggctctctcagggataaatgggtagggttgggggcctagtgatgacagatatcacaattctaaacagcaagctcc

SEQ ID NO: 37867 - DNA, 941 bp, Artificial sequence
  DNA replication origin
ttcagaacccaccgatgcgggggtgaggcgcctgcgcctctctgtttcaaaaggctgccatcccaaccctgccgatggccgagacactcacgaggtgctgggaggtgggttgtgggggccggaaggggggcccaaggcctggctgctggcattgttgcccccactgctgctcaaagccacctctgccgggctgtctgccacaactgagctgtaacctgggaacaaagagtaaatggaaagggctgctgcctgctgcccagccccgcccacgccccccaccccgctgcctcctcactcactggtggcgccattctgcttgccagcccctccaccggcactgctgttactactgctgctgctccctccgcctccgctgccgccgcctccgcctccgctaggctggacgctggggggccggggctgggtcgtgctgggcccactgggagctggtggggccacagcctgggcatagggagcaggggtgcccgagttgtggctgggagctggactggccttggggcccagggcacttgggggtgctgcgggggcggggaccccattgttgccaggagtggtgctcaaggcagaggcagcaggcggggggccggaggggtaggtgggcggcacagctggggactgagggtgctggttgctgtggacaggcttggagccgtttttggctggagactgcgggtgggagagagcagagggtcaggacccagtgggccagctggtctccctcaccacccccacctcaggctccatctttgtcccagcagcctcctctctggcctcgctgcccccacctgctcctgccctcttggggacctgggtgaccttactcaccctcatggcttcaatcaccttcatgcttaaaacactcacactgatttccagcctgcccagcttcccaagtcctgcctggacaccgccccatggac

SEQ ID NO: 37868 - DNA, 1169 bp, Artificial sequence
  DNA replication origin
ttcagagaagctttgagaaggaagaaaaactaatgtgtgatgagagctgagagaggaggcaatttagaaaatttcccaagtggggatgagggtggaggtcactcatgactcactggggttgggagggggctggacagctccccagtggtctccagggaggcctgagaatgtgccaatgagcagagtggggtcggcctagactggggctgctggagcagggctggggaggggccgcgggtgagccagtgggcaactggaagcggggctgaggtgtgcctcagtggaccagcctcgctgtcaacccaagcagttctaacatctctgggctggaaggcggggacggggacaggtggatttggggcaggggcccaggagtgggaatagggagggggtgcggtcccagtggccgcagtggggcacccacctcacccctccagcccgaggggggacggcggcggtggcggcgaagccggggggcccgaggctgccccgggggccctgctgtacctccagatagtagaagatgaagaagagtgtctcggtcgacaggcgctggtagaattccacagtgtccgagtgtgggggtggcatctggtggtggtaggggggcgtcggacaggggttccgggggaggtactgcctgtgagagcaacaggaaggtcagtgccagctgcctactagtcctgtcgtgatcaaaagggtgctcagacatgcatccctgcggggggaggtggtacagaaagacccagggcggtgctgaccttcagtggagagcccaagtcaggggcctggtgctctacccacagcctcacaggttcagccactgcctcctccgtaagactcaagtcccagaccatcccccttccctgtggcccctcaccgaatacgctcagagtcagaggggtgaggcatgtggtgccaggcggcctcttccatggcctgctgatagagctgctccttggtgaggggcacagggcccagtggacagacacccagcgacagcggtatgttcacctctgacagctgcaggggcggctgggctgaggccggaggtgctgatgtactgctcaggatgatgtctgtggggagggtgggggtccggccccctcagtggtgaggatgggtcaggggcagcccctcctctttggcccgctgcttccccaccatcc

SEQ ID NO: 37869 - DNA, 1464 bp, Artificial sequence
  DNA replication origin
cggcatcagggaagtatttggtggaaaaaaacatcactgtagaacacaccaactgaaagtaatttgaaaaaaaaaatccatgacactgactatgtagcagtcaccattaagtacttacatgttattaactcatttaatcttcataacaactgcattaggtaggtggtcttccccccatttttacagataagttaattgagacacagaggttcgagtgacttgcctagagtcgcccagctggactgggctgaaacccaggtaggttggttccagagtgtttgcaagcagcaggaatttcccagtattagaacttgagaagcccattcaaaaaaaatagtttccgcactgagcccctgccctgctgagtgctgggacctggaggtgaagtgggggccatcaaggtccctcggcagcagagcccacagcctggtgcagggacacatactgggaaaatcccacaccccaggcgagtgtgcccagcactgcaaaggggaggcactgggctgggtggctccaggaaggtttctttgaggaagggacatttgggctgagacctacaggaggcctaggagctggccaagtggaggatgagagggcggtgttccaggctgagcagacagccagagggaggagtacttggtcaggctgagggactgcgccagctgaaaggtggaggcaagggagcagaggccagcaggggctgcctggagcctggggactctaccccaaccctagcagcgggaagagagggggcggggccctcacctgctcaaactcgtcagtgatggtcttgggctcctcgtgcctctggaaccacatcatgtacttggtgtggaatcgccatgactgcttctttagggccttggctgccagatactgtgccttagtgccctgggggaggaacagtggagagggggatcagggggcccccaaactgggtggggagccaggggaatggggcaggacatcagggctgaaccccggcccccgccacagaccacagttgggctggacaatcctcttggagatggggctgggggcacagaacataccaatgctgatcaggagaaggaaaatgagacaggaggtgaaaattgctttcagagaagctttgagaaggaagaaaaactaatgtgtgatgagagctgagagaggaggcaatttagaaaatttcccaagtggggatgagggtggaggtcactcatgactcactggggttgggagggggctggacagctccccagtggtctccagggaggcctgagaatgtgccaatgagcagagtggggtcggcctagactggggctgctggagcagggctggggaggggccgcgggtgagccagtgggcaactggaagcggggctgaggtgtgcctcagtggaccagcctcgctgtcaacccaagcagttctaacatctctgggctggaaggcggggacggggacaggtggatttggggcagg

SEQ ID NO: 37870 - DNA, 1563 bp, Artificial sequence
  DNA replication origin
gctgagaggtctcgggcagaggccctgctggcccgggtccaaggccgggcactacaggagggtcagccggaagaagacgagacggatgaccggcggcggcggtacaactcccaattcaacccccagctggcccggcgcccccgccagcaggaccctcaccttactcactgactcctgagggggtacaggagaggccgctgctgccagccgtcatataaaactatttattcataaatattttccaaaatgaaaataggtttaccaaaaaatgtccctcactggggaggggaggagggggcagccctcgcccccgggcccccagggtggggctgagaggaaaacctcccggccccctccctgcttcctgggagagggggatgccccgtggcttggggcctccctccagtcttccagggcagggccctcacctgggcagggggatcagcatgcgggggaagggggtgggtagagggaggggccggtgtcactggaggtcccggtcctccaggtagcggtactcaaaggtgaagccttccttcttccgctggccccacttctcgtagtcaaagtagatgtaggtgccctggccgggggagaaggcggtcagtgagtggacgaggaggtggtctgggatctgggccggaccaacagacaaaggggacaattcttagggctgtggatgtgtcaggcaccgggccagctgccctgcacgcacacactctcatccatcctcacaaggttcttcttgggtaggaaatgttatcatgccacttcagcgaggaggaaacggagggggccgcagaggttccaccgaagccagctgccagaacggggccccagccccaggtgtgagtgcacagccttcgtttcctcgagggctgtggcttttgagcacctctcacgtgagtacaggatgcacagcctagcatttaatcttcacaaagacctcgaggcagtgggtactgtcacccttgttctagagaatggaacagtctcagagtctaaatccaagcactctgcagggacattttattggtgacgaagtggtgtgggaatttctgaatgactggatgccctgaaatgtactaacttggaggatggttttgggccaaaccaggaaaggacaggaagtctgtggttaacatctgaggacacaatgggagaggacctaggttctaaatgaatgtcttaagtgcttcaaagatggcaacctgggagaaccaggagaggggactgagttctctgaggacaaggaccttgtactacttcatccccatgaaggggctcggcatcagggaagtatttggtggaaaaaaacatcactgtagaacacaccaactgaaagtaatttgaaaaaaaaaatccatgacactgactatgtagcagtcaccattaagtacttacatgttattaactcatttaatcttcataacaactgcattaggtaggtggtcttccccccatttttacagataagttaattgagacacagaggttcgagtgacttgcctagagtcgcccagctggactgggctgaaacccaggtaggttggttccagagtg

SEQ ID NO: 37871 - DNA, 899 bp, Artificial sequence
  DNA replication origin
agtgatgggagcggccagcagggcgtcttgatacagctgaactggaacttcaggccaggaataaagcgcagggccacctgggggcggagcctctgatgggcagggctgaccaggggcgggtcttgggatgctgggcggagcctcaggggcggggcctggggtgctgagattgaccgcggagggatgggggcttgggttgctggatccggccgcgaaggggcggggctgtaaagggccgctggtttcctggagcaggtggaaccaggactgcagaggttgttagcgggtggggagacggctgcatcagttcacgttaaggaggatctctggagagccagacctggggaaccgggaggcccgcgccttgggaaatggagtccaagcgggcatctctcctgccttcaggtggagctggaggagacagtggtgcggcgccaggctgcggtgcggacgctgggccagcaagccagggtttggttggtgcgggtgctgctcaacctgctggtggtcgcgctcctgggggcagccttctatggcgtctactgggctacggggtgcaccgtggagctgcaggtgcggacggtcttggaagaggaagccagggggtcctggaacctacatttccaacggtggagggaggggacggaagtttgggatgccagagatcttagagaggaagtatgggagagggtatgttcggaccctggacttagggattttaaaggaaaaagagaggctgggcgcggtggcttacacctgtaatcccagcactttgggaggctgaggcgggcggatcacgatgtcaggagttccagaccagcctgaccaacatggtgaaaaacagtctctactaaaaatacaaaaattagacgggcgtggtggtgggcgcctgtaatccc

SEQ ID NO: 37872 - DNA, 1197 bp, Artificial sequence
  DNA replication origin
gtgggaaacactggcccatatgaagccttggtggcctctgatgacaggaggggagccatcctttaggagtgaggaccgagcagatttagaaaaaccttcaattcctgcttggctttactagggggacatcctctctctagcagctggaggtcagggcacggttattagggcagtggtaacaaattcccgtgggggtgtcactacccccacaacagaatggcagtttgtgacgactaggggacaaccctagcagggagtagtagttcatcatttacatcaacaggctgttcccccagccgcagtccaagcccctgggggaaggctgactgcagctgtcaggaacacaagggcagtctactcctggttgccgggggtgccatctccctagcaacacgggggcaatacttcctcagccacaagagagtccacagctatggccgtgcgacttgcctagcaatgcaggtgccggggggtggagcctctctggcaacaagggtcaacccatagtttccagggggaggtttggcttccttagcaacagtgtaactgtagttggtaggaatggcgtgccctctgctggggaacagcactggtcagggattggaaattgctatttccttgcagagggctgctgagggctgctatgtgaggacatcccacggggtggagcagtgctagctcctagcaacaaaggggcagtgcagggagtgccgtatctgcagcaacagagcaaaacttctggtaaaaaggaggtgagctactgttgctagggatcctgcttccctagcaaatagtggcgttctgttgctagggaaccgtttccctagcaacagagggtgacccaccactagcaaaggatggcatccccagcaagcaggaacaatctggttctggggggtgacacttctgtggcaacagaggggtggcacagggttgctaagttaccaccttttcctagcgacagggggcagttcaccacactgcggggtgacaagcgctagcaacaaggggcatctgtcagtaccagggatcttttccctaccgacaggggctggcaggccatggttgccgagggggcgacactctgctcaaaaaggtggtggccctggccccttgctccccgctctcctcccggctaggggcagagccagcccttggaggtgggggctgctgggtcttgggaagcctccctcgcgc

SEQ ID NO: 37873 - DNA, 1158 bp, Artificial sequence
  DNA replication origin
actgttgctagggatcctgcttccctagcaaatagtggcgttctgttgctagggaaccgtttccctagcaacagagggtgacccaccactagcaaaggatggcatccccagcaagcaggaacaatctggttctggggggtgacacttctgtggcaacagaggggtggcacagggttgctaagttaccaccttttcctagcgacagggggcagttcaccacactgcggggtgacaagcgctagcaacaaggggcatctgtcagtaccagggatcttttccctaccgacaggggctggcaggccatggttgccgagggggcgacactctgctcaaaaaggtggtggccctggccccttgctccccgctctcctcccggctaggggcagagccagcccttggaggtgggggctgctgggtcttgggaagcctccctcgcgccgcctgacctgctggggggtgggcattggagggtggggccgcctccggcccgggctttggcggccacggggtaggccccaaagccggcggcaatgcagccgcactcggcggcaatccaggccacgtagaagcgcatgcggaaggcgaagaagacggggatcatgtagaagaggcgggcgggcagcgggcgggcgtagaaggcgtcctcgcgcacggcctccagcgggaagaggtgagaggagagcaggaacagcaggccgaagagcggggccggccaggcgcggcgcagcaggggccgcaggctgggcactgccccggggaagggctgctccagccagtccaggtaggtgcggtagcggaagaacgggcctgtggggcggggagggagggccgcggtcagacaggcaggtgggcagagctcaagtctgcaggaggaggacagggagcttggaaggaaggtgggaagagggagtgagaggggcagagactgggcgccggggagaccccaagggtagggactgagaccctgagagatggggataaggaacgagagacaggggggacaagaaactcagagagacagagacagtaacagaaaaacagacagaggggccggtgcggtggctcacacctggaatcccagcactttgggaggcctagctgggaggactgcttgagcccaacagttggacagcagcctgggcaaaacggcaagacccc

SEQ ID NO: 37874 - DNA, 1171 bp, Artificial sequence
  DNA replication origin
agttggacagcagcctgggcaaaacggcaagaccccatcactacaaaaaataaaaatcagccaggtgtggagggcacctgaattcccagctactggggaggctgaggcgggaggatcgtttgagcccaggctgcagtgagcagtgactgagctactgcattccagccagggagggagggagggagggagggaaggagtgaagaagggaagaaagaagggagggaaggagggaaggaaggagggagggaaggagggaaggaagaagggagggaaggagggaaggaaggagggagggagggaaggagggaaggaaggagggagggaaggagggaaggaaggagggagggagggaaggagggaaggaaggagggagggaaggagggaaggaaggagggagggagggaaggagggaaggaaggagggagggagggaaggagggaaggaaggagggagggagggaaggagggaaggagggagggagggagggaaggagggaaggaaggagggagggaaggagggaaggaaggagggagggaaggaaggagggagggagggaaggagggaaggaaggagggagggaaggaaggagggaaggaaggaagaagggaaaagggaaggacggagggaaggaggaaggaaagaaactaggagatagctgtggcactttagctacaatatgatggtggtctggcctagggaggaagcagtgtgattcacagaagggaccggggttaaaatttttatatgttcacaaaggccgtatgtttaggtcaatgtagcatgggaagataaaaggaaaaaaaaaacaaattaaaataaataaataagaccacatgttgtatgattccatttgtaagcgcaatgtccagaacaggcaaatctttacagatagaaagtcaattactggttaccagggatggatggaggtttgtgggatgatggacatggggtttctttgcagggtatgaaactgttctgaatataactacacagtggtcatgtctgcacaactcggtgaatatactaaaaatcagggagttgtatgttttgtgttttgttttttttcaggaaattaaagaagccaagagttgtatgttttaagtggatgagtatgtgaattagagttccctaaagctgttattggaaaaaaaacctttgatgaggtaaacat

SEQ ID NO: 37875 - DNA, 1074 bp, Artificial sequence
  DNA replication origin
ctccctacctagcatgactgctgtgttcacggataagccgccagtaggaaaccatgactctgtgggtctggggtgggccctaggattctgtttttacccctcttcccaggtgattaggagccagacctggatgccctagttttgttcccttcaccaagtaccttctccccagagctggtttttctcctttgcaaaatagctggctacagagattcaaggacagcatgttggtaaaccacccagctgggcctctggcacaccgcaagcacccaatggcacctactgttaccctatgtgggttatttcctcaccccaggaggagctgggaggtgaagacctgcccaagggcatgtgaatggggaatgctgtgcccagggcagcaagtgaggtgacgtcccacccccagggtgtgttggaggtaaaatcccggggagccactgaagggggaggtaaagtgggaggtgaaggggcccacagggaggctggaggggagtggcaagccccgagtctgaccttcagcgtcagcagcagctggacggcattggtgaagggcgtgggagtgggcaggcccaggaggctgagggctcggaagaacaggagataggagaaagtccaggccagagccagggcgtggcaggagctgggcaaaagcaggaggcgcactgtgttgggcacagaagtctcggccttggccactcactccacgagtccagccaccaatcctcccccagctctccccattcgtttagagacagaaacacagaagggcagagaggacaggagggtggatgtagggaccgaatgagtatgattgaaacagtgggagaagaggctcagccacatagaaacacacaccaacagagaatgaggttaagagaagcttcgggtgaagaccctgcaatcctccactttttctttatttccgaggtccagggctcaagaagagagaggtggatatgaatgaatatgaacggtggccaggccagcagacacactgtccacctctctccatgacatggatgtagcggactgggacaaacacacagggaccagacgcagaaggcaggggagaaa

SEQ ID NO: 37876 - DNA, 1249 bp, Artificial sequence
  DNA replication origin
tcgggtccaaagcttttggctcctccttgttccgagcccgaaggcccgccccttcacgtactcggagctcggatcccagtgtggacctggactcgaatcccgttgccgactcgcgctctcggcttctgctccggggcttcttccctgcccgcccggggccctgaccgtggcttcttccccggcctgatctgcgcagcccggcgggcgcccagaaggagcaggcggcgcgggggcgcgctgggcgggggaggcgtggccggagctgcggcggcaagcgggctgggactgctcggccgcctcctgcccggcgagcagctcaggtgggccagggtggcggcgcccagtggcgaggcgaggttacacggcggcagggtctctgcgggctggcgggtgcggggcggccccggaggcgcgttggaactcggggctggcgcaaccgcctgtggctctgccggggatgcgctggggtgcgcgggacgggttggggctgggcctgggcctgggcctggggaggggagggtgttcgatccccgggttctcagtaggagaggggtgtggagctccgaaggaggtgcaggttggagacccgggctcctctgggtggtctcgaaggagaagggctggggggtccggatatctggtttcacaagggccgggggatgggggatccaaagagggggtctgggttcctggatcctcgctggaagagggggctcggaggtctagattcctgggctgtcgaagaggaagggtccgggaggggtgccgtttctgggtttttaaaagaggggcgtcttcaaatctgggtccccagtatgggtgcggggagtagctttgatttctgcgttcgcaaaggaggggcttgggtgctgggagatccccacactttcctgggttctccaaggacaggagagctggaggcctgtgcgctcaaaggaggggctgggggtggattcctgtctcctccaaggaggaaggggctggagtctgggttgctaggttctcaaaggagaggagctgaggctcatactccatcatcctcaaaaactggggtctagaaggctgggttcctggatcctcgaagagggaggaggcagggggcctggattcctgggttctcactgtgaatctctgcccctcccccagaccatgtcgcctgaagaatggacgtatctagtggttcttcttatctccatccccatcggcttcctctttaagaaagccggtgagtcaggctccctccccagtg

SEQ ID NO: 37877 - DNA, 979 bp, Artificial sequence
  DNA replication origin
ggagcccgggtctccaacctgcacctccttcggagctccacacccctctcctactgagaacccggggatcgaacaccctcccctccccaggcccaggcccaggcccagccccaacccgtcccgcgcaccccagcgcatccccggcagagccacaggcggttgcgccagccccgagttccaacgcgcctccggggccgccccgcacccgccagcccgcagagaccctgccgccgtgtaacctcgcctcgccactgggcgccgccaccctggcccacctgagctgctcgccgggcaggaggcggccgagcagtcccagcccgcttgccgccgcagctccggccacgcctcccccgcccagcgcgcccccgcgccgcctgctccttctgggcgcccgccgggctgcgcagatcaggccggggaagaagccacggtcagggccccgggcgggcagggaagaagccccggagcagaagccgagagcgcgagtcggcaacgggattcgagtccaggtccacactgggatccgagctccgagtacgtgaaggggcgggccttcgggctcggaacaaggaggagccaaaagctttggacccgaaggggaacagacgggctctggaaaggaggcggggtctggagctcggcgtgaggaatgaggcggggtctcccttcgggttccttcgggcacaatcgggagcttgagttctccggaagcggggccacaaacttcggctcacttcggcaatagtcgagaacggagagctgaggccactgtgggcggagccacatgtttcggctttcttcggaggtagtcgagtccttagggtcactgttccgatgtgggcggggccacagactcggccggatgtgggtggggccacaagcttcggtttacttcgtagatagttgggtacaagtgacgctaggatgataggcggagtcaacaggttcgccagacacccatgagtatttacaagggggc

SEQ ID NO: 37878 - DNA, 851 bp, Artificial sequence
  DNA replication origin
acgggctctggaaaggaggcggggtctggagctcggcgtgaggaatgaggcggggtctcccttcgggttccttcgggcacaatcgggagcttgagttctccggaagcggggccacaaacttcggctcacttcggcaatagtcgagaacggagagctgaggccactgtgggcggagccacatgtttcggctttcttcggaggtagtcgagtccttagggtcactgttccgatgtgggcggggccacagactcggccggatgtgggtggggccacaagcttcggtttacttcgtagatagttgggtacaagtgacgctaggatgataggcggagtcaacaggttcgccagacacccatgagtatttacaagggggcggggcgaaagcgacttgccctcaaaggggcggaaccccgagggccggcgtgcgcctacgggaccgggccaggatgacgatcctcaagttcccaagtagaggagaggaagcggcagagggaggtgcgctcagtggggcggagccaaggtggcccccgcgggaggagggcggggcttcggtcctgcgaggggcgggacctgacttcccgcggcgctgatggggcgggatgacgaagttgacgagggtgtcggcatgagggggtggagcaaggagcgcgtggcgcggtgcgcagtgggtggctccacctcgactgcgaattactgtttatgaggtgactcgctggttctatcggtggacagtgggacattctgaagggaggcaaggaggcggactgagcgctcccaattggggtgagcccgcccgagcggagagtggacggcgggtgtccagggggcggggctttcggctgtggggttcg

SEQ ID NO: 37879 - DNA, 951 bp, Artificial sequence
  DNA replication origin
ggatgacgatcctcaagttcccaagtagaggagaggaagcggcagagggaggtgcgctcagtggggcggagccaaggtggcccccgcgggaggagggcggggcttcggtcctgcgaggggcgggacctgacttcccgcggcgctgatggggcgggatgacgaagttgacgagggtgtcggcatgagggggtggagcaaggagcgcgtggcgcggtgcgcagtgggtggctccacctcgactgcgaattactgtttatgaggtgactcgctggttctatcggtggacagtgggacattctgaagggaggcaaggaggcggactgagcgctcccaattggggtgagcccgcccgagcggagagtggacggcgggtgtccagggggcggggctttcggctgtggggttcggtcgtagggcgggaactccccaactggggtgcgctggcgctcggagggggcggggccacaggccgcgaggctgccgggagccgatgacgcccgaacgccgaacctattgcgtccgggaggaggcggggctacggattcggccgagccgagaacacccgaacgtcaaattgctggcgttcgagaagggggcggggctgcggattcggtggagccgaggacgcccgaacgccgaacttcctgtgctcgggagggggcagggttttgtactgtgggagtctgagagcgaggaggtccgaaagccgaatcacagtcgttcggaaagaggaggagcgaaggctcgagcgtccggaagagggtgtggcctcggcggtgccttagcctccagagcttctgaccgctgacgggaacacccgaagggggacgcccactttgcaagagggtggtgccaaaatggacctttgtaagggggcgtgtcgccgcgcttgcggaggtttgtttttcacgctccaaggcgcaatggtaggtacggcagtgcgggcacaga

SEQ ID NO: 37880 - DNA, 1085 bp, Artificial sequence
  DNA replication origin
ccctgggggcttggcgaggggagagggtcgggggcttgtctccggcgtctcgtctccggcggccgcgaggcctggtgggatcgcccgggggcggggcctggcgctcgggcccagcaggtggtgaacggcggctgagcgaggccccgccccctgaggcctaggggcggggcttcgccgagaccccggaggctttgggtgcgctgcagcggtccgcggcgcgcagctgtttcggtaactgctttgcctcccggctcccgcaggaggatgctggtggtggaggtggcgaacggccgctccctggtgtggggagccgaggcggtgcaggccctccgggagcgcctgggtgtggggggccgcacggtaggcgccctgccccgcgggccccgccagaactcgcgcctgggcctcccgctgctgctgatgcccgaagaggcgcggctcttggccgagatcggcgccgtgactctggtcagcgccccgcgtccagactctcggcaccacagcctggtaagggggcggggctcgaactcgggttcggtgggagcgggacctgggagtcaagtttcctggcttctgaagggaccataagcttggaggttccagcgaagtgtgcttctcaggccctgacatccttcaagcgccagcaagaggagagcttccaggagcagagcgccttggcagctgaggcccgggagacccgtcgtcaggagctcctggagaagattacggagggccaggctgctaagaagcagaaactagaacaggcttcaggggccagctcaagccaggaggccggctcgagccaggctgccaaagaggatgagaccagtgatggccaggcttcgggagagcaggaggaagctggtgagcatgggaggtggagtccagggaccacgggaaggagaggagagatcttttaggaattttagctgggaatccagtgcctgggtctccctgagggtgagaagactttaccccttgaatttaccaaactcttctctgtactccccaccaggcccctcgtcttcccaagcaggaccctcaaatggggtagcccccttgcccagatctgctctccttgtcca

SEQ ID NO: 37881 - DNA, 1319 bp, Artificial sequence
  DNA replication origin
gcaccgtgaagatttattggatgctatgtttaagaaaatggaaaatccggcccggcacggtggtttgcacctgtaatcccagcactttgggaggcggaggtgggtggattatgaggtcaggagttcgagaccagcctggccaacatggtgaaaccccgtctctactaaagacacaaaaaatcagccaggtgtggtggtggacgcctgtaatcccagctactcgggaggctgaggcaggagaatcacttgaacccgggaggtggaggttgcagtgagccgagatcgcgccacagcactccagcctaggtgacagagtgagactccatctcaaaaaaaaaaaaaaaaaaccggggaatctttagaaagcacagtggaaacagatgtctgtttttacaagcccatcactgcacagaatgcaatatgggagggtttcactaatggttaaccataaccacactccagcgtgagcccagccactaggcaatgtgctgataaggattctaagtggtttatgtggactcctcatgacctatgacacacatacgtttacagtggagtggaacgaggcaggagggcttctctttgtcatagtctaccagctctgcagaggtgtcagctacatccggattggctcagggagcggccgtcagaagacttacacgtgtttaataactgaggttgtgtgtgtgtggcagggggtgggtaactgtgatgagtttggtgtggcagagggggagccatagcctgtgaagctggaaagtgtatcaggtttggtcatcaacaggcttgaacatgaagtacaggaacgtgcatcttatttttggaagatggagccccgttgggggaatttgagcagtggagggtcacagccaggtaagatggtcagaagaggcctcggaagtgatgagagggatggactggagtagggatgggagccagtagggggccaggagggaggttggtgcagtgcacagacagggcgtcctcggtccccagctgagcttagactgtggggatggaccagcggacacgggtggagccgggtgaggagggatgtgggcagagaggtttggatttgttcactgtgtgtgaagcagaagagtgtgaggagcttttccactctctgccttggttgatgggaggaaccagtggggctgccgcaggacagacgacccgcgtgggagaaggaggctcggggagatgtttctaagacttaacttgctcacagagggaagcacaagcttccttcgagcctgggctttgttttcccaaacaggtcccttcactgactttcttttttgagacggagtctcgctctg

SEQ ID NO: 37882 - DNA, 1678 bp, Artificial sequence
  DNA replication origin
agaagtcctctgtgtacgaaagtgctcccacctgtaaaagatgcccgtatttgtgtaaaatctccgtcccacttttattcctagcctgcataaggacacagcttctaagcacaaacactcctatgtgtagaggctactccagaatgtatggaaaaatccacacgcctgtgtagcaagccttcatgctgcataaggaccccttctacctgcataaggaccctggtcatctatataggggcccttcccatcctgtaaactgactcgggattacttcggtgtatacaaggacccctgccccttggcattcgccatacagttacagagtatttttccagccactccccatgttacatctcactggaatcctccgatgccacaccgatagatggggaagtgccaaccctgggaggggacctggccaccctgacatcatcacccagactgtcactattgcagccaaaactaggtgctcaggaatctggccccaggggtcccctcttgctgtagggcagggtgagactttgccatctggaaaccacacacgtggcctctcttgtgggaattgggatgagtggaagaaagggagattagttctccacttaacccatttccatattttgctccagattggcaagaaagggctagggaaaagaggaatgctggtggtagcggaggtggtggtgatgacgatgatggtggtgattatgttggtgatatgatgtcatgatgatggtgatggtggtgatggtgatgatgatggtggtggtggtgttgatgatggtgatggtgatgatgatgatgatggtgaagacatgattatgttgacatgtcatgatgataattatgatgatgatggtggtggtgatggtggtgacggtggtgatgatggtgatggtggtgatgatgttggtgatggtgatggtggtggcgatggtggtggtggtgatggtggtgatggtggtggtgatgatggtggtgatggtgatgatgttggtgatggtggtggtggtggtgatggtggtggtgatgttggtgatggtggtgatgatgttggtgatggtggtggtggtgatggtggtgatgatgttggtgatggtgatggtggtgatggtggtgatgatgctggtgatggtggtgatgatgttggtgatggtgatggtggtgatggtggtgatgatgttggtgatggtggtgatggtggtgatgatgttggtgatggtggtggtgatggtggtgatgatgttggtgatggtggtggtgatggtggtgatggtgatgtggtgatggtggtggtggtgatggtggtgatggtggtgatgatgctggtgatggtggtgatggtggtgatgatgttggtgatggtgatggtggtgacggtggtgatggtggtggtggtggtgatggtggtggtggtggtgatggtgatggtgaagatgaggatatgatgatgatgatagtgatgatgatgatggtggtgaagacaagattatgttgacatgtcatgatgataatgatgatgatgatggtggtgatgatggtgatgaggacgatgatgatgacggtgaggaggaggatagtgatattggtgaaggtattgatgatgaaatgggagagtgagaataggcgccttatctctgtctctctctctctctctcacacacacacacacacacacaca

SEQ ID NO: 37883 - DNA, 886 bp, Artificial sequence
  DNA replication origin
cccagccagaccccgcgccgcccgcgccccgctcgactccggaggctcccgcagccccggcgtccgccccgctgccccctcccccgggggccatgggggcgcccccgggctaccggccctcagcttgggtgcatctcctccaccagctgccccgcgccgacttccagctccgcccggtgcccagcgttttcgcgccccaagagcaggaataccagcaggtgggaccgggcgccagggcctgggggccagggctgggggccggagctcctgggtcccgagggagaagggggctgggtcacagatttcctgagctccgccggaggctgggggccggcccggactttggggtttcggagggaggaggagcctgggggcgcccatgcctggaggttctcctgggacgcgcgctgggggtccagacctcgagctctctaaataagggaaggctggggacctgcacccctgagttcatggagaggaggggaggggggcccggattcccgggtgtctgatacctgcctgggaagccggcctccagggtcatcgggagggtaggtctactcttcctgccctaaaagatgaccctgccccacaggatcagagcaggtgaatatgtcccagataaggtgggacccaggagacagcggacctgataacggtggcggggaaaacgctggctgctgcggtgctgggatgggattgagagtctgaaatggggaagggggcttcaggggctgaggaccagggctggaaaatgaaggggctctgggagaggaagcttcttgcccgtcccaagaaagaaggggtggtcagggcgctgcaggggtgagggccgagatgaggctgggtttggggagcctcgggatgacagacccgggtcccgagg

SEQ ID NO: 37884 - DNA, 868 bp, Artificial sequence
  DNA replication origin
agggtcatcgggagggtaggtctactcttcctgccctaaaagatgaccctgccccacaggatcagagcaggtgaatatgtcccagataaggtgggacccaggagacagcggacctgataacggtggcggggaaaacgctggctgctgcggtgctgggatgggattgagagtctgaaatggggaagggggcttcaggggctgaggaccagggctggaaaatgaaggggctctgggagaggaagcttcttgcccgtcccaagaaagaaggggtggtcagggcgctgcaggggtgagggccgagatgaggctgggtttggggagcctcgggatgacagacccgggtcccgagggtggggccggtgtgggaacctcacagaagccggtgtccctggggaaggggcccggctcggggcagctccaatgggcgaaagagctgtcccctgacccagtttaattcaagtccttgacttcgagattaatgaggagaaaggcttggctgagctggggacgggtgggggtgctgggagtcccgatgtggccccaggacgggtcctggccctgctgatggggcctgagcccctgggctccgtcttgggttgctcctgggagaagggggctgggattggagagctcagggggcgtggagggggtcccagaaaagcgcggaggggatgagtgctgtgttctgagctatttgggtcacggctggcacagccctgagcagctcttccccgcctgctcctcgccgccccctctccccacacacggggaccgccgtcccctcgcccacagcctcgcggttacacaacggccacctccaacaacgccgctccaccggctccggcctcggcccagactcacgcccgct

SEQ ID NO: 37885 - DNA, 1317 bp, Artificial sequence
  DNA replication origin
aagggagagagagcgtgagaacactatggagacgggagagacacacaaggacagagaggcggagagagccaaggcccggaagacaggcaggccgcggaaacgttctgcggtgggcagagccttgcagaataacagggctctccacgtggcggggatttcacagctgacctgtgcggtcccagaggcccacagtggcccagggggtttgcactgagccccggagcatggagggacaacattgggatcagagtcacacctctggacttgccaaggctgtttcccctaaaccacggtgtttctgcctttgtccacacacatacacacacacagtggcacagtgtgtgtgtgtgtgtgtgtcccaagtgtgtgcagtgtttgtgtttctggttgagactggatgtttttatctttgggctgtctccatgagatgagggggcacctgagtgtgtctcctgggtgcactgctgtctgcaaatgagaacatctgtgggcatttgtgtgttctgggcacagttccttgggcctgtgagtgggtccggttgtgtgtgtgtaacagtgtggatgagtgtgtgtgtggatgcgtgactgcatgtgagtgtgtgtgtgcacatgaatgctatagtcaatatgtgtgtgcatgtgtgtgtagatgtgaatggaatgtacgtgtgtgtgtgtatgggagtataaacgtgtatgtgacggtgcatgcatgagtgtgtaagcatatatatataagtgcagtgtgtgcttgtatatgggagtaaatgcttatacatgtgtatgtgtgtgttgtgagtcactgtgcgcaatgtgcgtgtgcatatgtgtgattgtgtatgtgtaagtgggtatatccatgtgagtgtatgcatgtgtctatatgcgtgtgttgtatgtgggtgtgagtgcatagcgggagtagtaaatgggtatgtgtgtgtgcatatgtgagtgtgtaatgagagtaggtgggcgtgtgtgtgtacctgtgcatatgtgtgtgtgcatgtgtgtaatgaaagtaagtgggcgtgtctgagtgtgtgcatgtgagtgtgcatgtgagtgtgtaatgggagtaagtgggtgtgtctgagtgtgcctgtgcatatgtgtgtgcatgtgagtgtgttggaataagtgggcgtgtctgggtgtgcctgtgcatatgtgtgtgcatgtgagtgtgtaatgggagtaagtggacgtgtgtgtgtgctgtgcatatgccagtgagtgtgtgcgtgtggctgtgtgcctcccccgggccagtgtccctgaggccctggctgtgtctgcagctgtacccacggt

SEQ ID NO: 37886 - DNA, 810 bp, Artificial sequence
  DNA replication origin
cccgtgtgttccacactcagatcccccttcctgcgtggctggggggtcggggtctgggatgtcagagtgaaggtgggagacatccctggcctaatcttgggggagattgggtcccagcccctcccaggctggcagctggggctccaggtgtcagggccagcttgctggagggagcttccaactgggggccccaagccttgggtcccaattctgctctgccctccattggctgtgcaatctttagcaggaaccgccccttctccgagcctgggtttccttctctctgcagccagcagttggaatggaggttttcccaaggacctgccaaggcccctccacaatcgtgtgggatcagggggcgggtgggggtgtgggggcacctgttcctggtgcctcgggccaggctgggggaggcgtgcttcctccccctctcctccctgctcactgtctcccctgctgctgagcgctacaccccacagcgcctgagcttgtcacccagggacgggacgaggggctgtgtggcaacgtgtgtgtgtgtgtgtatgcaagactcagaaatggaaactggaagagtgaagacagaacagaaagagagagagagagagatggagggaggcacaggcagaaagacacaaccaaaaaaagagacaaagataagacaaggttcgggcatgagtcagaaaaaggcagagagcaaaagggatcaaatcagagaggaagagcagagtaagggagagagagcgtgagaacactatggagacgggagagacacacaaggacagagaggcggagagagccaaggcccggaag

SEQ ID NO: 37887 - DNA, 1739 bp, Artificial sequence
  DNA replication origin
gcgcctggccagcctcgtcataattgtcatggtggctggatcattccctgccaatgggtggggagggggttcttgtgcattgcagggtgttgaacagttcctgggctctacccattggatgccagcagtgcgcacacactccccagctgtcacaaccaaaactgcctccaggcattgccaactgtccccccggggactccgcctgagagctgccggcacagagagcaagaagagcagcgtctcacctgtactcctccacaaaggacacattttcagccacctgcagggggctcaggggcactccctgccagaaggccagcccctgcagctgctgggccgcagcctccgcctgccgtcgagcccctcgggcggcagccaccagctccgtgcgcggctcgagcacctcctccagggtggtcagctctgtcctcaccgcctcgcccagcctctccaccgtctccaacacctggggataggacaggggctgaggtctggaaggacatcctggggggagcccgcggtcgaggcatggggttttagaagtgaaggaggggtgcatagtagcgggtgtctgagatctggagtctgggacatctgaggattgagtaagggaagggattggggaggggcttcaagatcaagttcatggagttctgtggcctctatccagagctctggatggttggtagcttgagcccagggtagtaagtccagccccaggactgagattaagtgtggagctttaggtctgaagttttcatctgccttccagaatctggggtctcaagtctgggtcccatggtctagagtctgcagctggacatggaatctaaggcatgaagtggggccaggcctcagccccagggcccagaatcctggagctgatgtcggagctgaagcctcaagtcggggacctgggcctcagggcgggggtccctgagcttgcttacgggccaagaatcaggtctggggccctggatctggcccgtggacaggggctggtgtcgctggtgcttggtttctgtgtggcttgggggttccaggtaaggtccagggctgggcctgtgtgtgaggtcctcaatttgcagccagggtcgggggttgggtggatagtctgaggtctgtgggtctcaggatgaagttctgaatctgggttcctaagcttcaagcctggggtcttagctctgagtttggatccctttgtccttgggtgtggggagcccgtccaggtgtgggtctggggtcccactggttgctggcccctcaccaggtggtcaatggtgctgagtgtgtggttggcgtgcagcagcgcagagctgagctgggacaccccatcactggtctcactgttgccatagaaaccgatgccaatgccagtgctgagcggaggaggagggagaggaatctcagcgggtcccaggaccccgggggccaccgtcccctcccaccccatcccctccacctcgccttcttatccacccctcccatctcagccccacctcattgggccagcccgtgggaaaagggcgacttcagcctggcccccgtcggttgccaagggaacgggaaggcctcactcccccagcggagggacgtcattgtgatgttaatggtgggtggagtggtgggggggagggagcccccgatttaactcgcacctccctggagcagaaccccagtcacacccagctccgggatgggccgtcttcccctccctaggactgcctgccccacaccct

SEQ ID NO: 37888 - DNA, 1169 bp, Artificial sequence
  DNA replication origin
cacgcccggctaattgttgtatttttagtaaagacggggtttcaccatgttggccaggctggtctcaaactcctgacctcaagtgatccgcctgcctcagcctcccaaaatgcgcggattacaggcgtgagccacctcgcccggccaagtattaactattaactaacatctcagttccctcgttcacgctcaggctaacctctaagtgtgtccacgtgcttggcactctcctaagcacttctagtcatgcagcccactcgaggcaatattctcaagccagtgttgttgtgctccccacgttacatgtagggaaactgaggaacgagaggctaaggttaccgagacaagagttacccggccagttaagcggaggggctggggttgagaccaggcagcctctgcctccagacgtcatgccctccagggatgcgatgggatctttggtgcagtcttgagaacgagtatctccactctgcagggtggggttggggatggggagctcggagagaacacatcacgtgtccctggtcacagggcacatgtgtgtggcccggccaggggatagtcccaggtgctcaggacctgtattctaaaccgctccagtgtcctgtctcatgataacactatttcacagaggacctgggctgtggcccagacacagtaaacagcaggaggctgagcttggagggtggtgaatgtgaggctgagctggggggcagggtgaatgctggtggagggttgctgttccgccggggtgcctggaggcaggtttgtggtttcagccctaccctctcccctcccaggtggctggcctacgtcctcctgctgctcctggagctgctggtctgcctcttcaccctcctgggcctggcgaagcagagcaagtggctggtgatcgtgtaagtgcaggcagtagggggacccagtgcttgcctggcactctcctggcaggcaggacctcagtcttacaactctcctacacggaggaccgtggtccttcacggccgggtacacacgaagaaaagagagtcagagcagcccaggagggaggcggggacagacctgaaaacaggcagccctaacagtatgaagtatgctggaatcatggcagaaataatcattgtgttggcaataaagatgaggatgaggccaggcgcggtggctcacac

SEQ ID NO: 37889 - DNA, 1003 bp, Artificial sequence
  DNA replication origin
ctgtctcccattctcagaggagacagggcagagccagaggctgatcaggctgtgggtggacttgggggagccttcgggggaagtgagcccagaggtgagcagtcaccgtcccagggtcctggagctgggatccaagctgcgaccacccagcccagggccctgctcataccccacaccctgctcatctgggcaggagccagatgtccagctggacatcagcagccactggcctacccccaaccactgaacttgtgtttccctaattctgatcctccaggctccagaggtgggtggaggtggggggcggctgtgatgggatttggggtgtggaaagaggctaggctaggagattaagaaccccgggctgatcctccctcccccactctaggatgacagtcatgagtctcctggttctcgtcctgagctggggctccatgggcctggaggcagccacggccgtggtgagtgccagggccgggccattgggctctgggactcagggggcctggagacttcaacttctggatctcgggatggcatggcttagtagagaaaggaattggggggcacgatcacagctctgaggtttagggcttgtttcctggggcctgagtgggtacagattggtgtcctggacgtttgagctgtaatggaggaggggctggaaacctggattcctaggtctgagggaggaggggctgggggtctggactcctgggtgtgagggaggagaagctgggggcctggactcctgagtctgagggagaaagggctggagagtctgaacccctgagtctgagggacgaggggcctggggcctggactcctgagtctgagggaagaggggctgggacctggacccctgggtggggaggggagctggggagccaggcactgggtgctgtgggagtgtggaatcggggcagttttgggtttgagccccttttctgctgcctcacgcagggcctcagtgacttctgctccaatccagacccttatgttc

SEQ ID NO: 37890 - DNA, 890 bp, Artificial sequence
  DNA replication origin
cagcacgtcgaaaaaccaaccagtggctcaagatgacaccgcgcacacaatacacactcaacatgccaacaaatgctggctctgatgactgtcgtcccaagaaatcagcagaaacggccttcaccgagtgctaagcacctgcacagcgtatgtattcagtgggggttgacagagcctgctctgccccaggcgctgcccccagtaccaggaaacttcggtaaacaggaccgagaaggtcatctcagaggctggtgtgcaacgaggtaggagggcgggggtcagtgcagggcaggggtaggtcgggtaaccccactagcagggatgggtcctccaggaaggagccaggcagagggctgtgcagaggaagctgggaggggctgaggccagaggcagacagatccaggactgaccacccaggcccttgtaggtcagggcgaggaacagggattttaatccatgtctgaggggaatcactgagcgttttaagcagaggaagaacttgatcggattgtgttttaaaaggatcacctggctggctggctgctgcatggaggacagacgggggtaggcgaggggggacagggaagaggcccctgtggtcatggtggctaggatgcggggaccagggcacagcaatggtggtaggaacagcggtgggagtccatataggtttcagaggaagggccaacagaacttgttctgagaatggttgtgggagctaagagcctgagtttctggcaggagcacctggttgaggtggggtgtctgttactaagccagtgagggttggggtacggacctgtcggggcaatggaggctctgttttgagagtattggtacatgcacactgtccttcatcctcacaacagccctgccaggcagacactgac

SEQ ID NO: 37891 - DNA, 966 bp, Artificial sequence
  DNA replication origin
aaaaataaggaatcagcagaaaaacaaataaatgactgtgtattgagtgttgggaagctgcctcctaattacacttgcttgaatgaatcatcacaattctgcaaagcaagcgctgtactgtgaaaaacgaaagctcagagaggtgaaagcttgcccctctccacaccacaaccaaatgcttccctctgtgtttgcctcaccaccacccccacccacagggattgtggcatcacctcccctaaggccacgggaggtcccaccccagaggacagcactgggtcttgcttcctctttccctcccgactggcctccatccctctcgcctcactaaccaatctgtgctacgttgatcacccacgttggccgccatctggaccttggggtataaggggtggacctcgggagccagactgctttttcactgtctatgagaaaaagaatgagttagggagacttaagggggagctaaaaacacgtcacaaagtggggaagaaaagtagatggactcaagagaagccgggcagaaaaggggaggctgactgaaaagccactggggtcaaggatctgaagagttctgggtgtggactagaaaggctggagtgaggggaagcccctggcccctttgtagagctccaggtggaaaacgaaggatttggaaacagggaagccagagcagacttcccaaagggaaggagaagggtctgaaacccatgtgagcaaagagaggctgtgatgaaaggtccagagggtaggggtgcctccatcaaggggaaaaggtctacaaaaaattctaggggccaggcgcggtggctcacgcctgtaatcccagcactttgagaggccaaggcgggcaggtcacctgaggtcgggagttcgagaccagcctaaccaacatggagtaaccacgtctctactaaaaataccaaattagctgggcatggtggcatatgcctgtaatcccagcta

SEQ ID NO: 37892 - DNA, 1283 bp, Artificial sequence
  DNA replication origin
tggaggtccgagcggttgggccctcataagagctcctgggtgtgaggcccgtggtgtgtgctgctccttgtttctgggtgttgtgatcgccaggctgggggtggggctgctctggaccaggcacatgtgtgctggagccctcctctagaacctgagcgctcctccctgcatttccacttcctcccgtcccctggggacccctggatgtgccggggaagggcctaaccatagctttcgctgccctcacagccgcccctgggactggaggtctcaagttcaacatccagaagcgaccctttgctgttaccacccagagctttggctccaacgcagagggccagcacagtggttttggcccccagcccaaccctgagaaagttcagaaccacaggtgacgtctgcccccttgccccgtcgcagccccacactctgcactcagcgtctatggtccagtcccactggccagctgcccaccctgagcctcagtgtgcgcctctgaaaagggcagaaggaccctctcttgggggttgctgtgagcactgaaggagacagaaggaaaacttggggactgcgtcccgctgtgtcagctcagagtggcggtggggatggtcttttgagtttgggatcgtctccagctgagcccctcatctgtcctcccgcagcgggtcctctgcccgggggaacctgtctgggaagccggatgactggccccaggacatgaaagagtatgtggagcgctgcttcaccgcctgtgagtcggaggaggacaaggaccgcacggaaaagctgctcaaggaggtgctgcaggcgcggctgcaggacggctcggcctataccattgactggagccgggagcccttgccggggttagtctgggtgggggacataggtgggagggtggtgctgtgagaggcatgggctgggtatggaggtaggagagttgcgggtcccaggtaccaggagctccaaagagaaatgaactggaaagttggatcctggggggatgaagtcctggttggagggaggccggtggggtggggtggggaccatgggtgctggagaggcgtgcattgctcagtggttaagcgcaccctctggagacggaaaacctgggttcgcgtctcatttctgcactgtagtagctgagccgcctggggtaagtgcctttcctttcggaggcgggtcggtaccttgagggaggtggtggcggctgtcctgccagtgtctggcggggttggtgacgccctgccctgctgtattctcaggctgacccgggagcctgt

SEQ ID NO: 37893 - DNA, 1093 bp, Artificial sequence
  DNA replication origin
cataggtgggagggtggtgctgtgagaggcatgggctgggtatggaggtaggagagttgcgggtcccaggtaccaggagctccaaagagaaatgaactggaaagttggatcctggggggatgaagtcctggttggagggaggccggtggggtggggtggggaccatgggtgctggagaggcgtgcattgctcagtggttaagcgcaccctctggagacggaaaacctgggttcgcgtctcatttctgcactgtagtagctgagccgcctggggtaagtgcctttcctttcggaggcgggtcggtaccttgagggaggtggtggcggctgtcctgccagtgtctggcggggttggtgacgccctgccctgctgtattctcaggctgacccgggagcctgtggctgagagccctaagaagaagcggtgggaggccgctagcagccttcaccctcctagaggggcaggctcggcgacaaggggcgggggtgccccgtcccagcgagggacgcccggggctgggggtgccggtcgagcccggggcaacagcttcaccaagtttggcaaccgcaacgtcttcatgaaggacaacagctcttcttccagcacagactcccgctcccgctcctcctccaggtccccgacgcgccacttccgcagaaggtactgaggctcccggctggggctgtgtgtgagggagggggaggcgtttcaggcctgaccctcctgcttcttcctgcagtgactcccactcagactccgacagctcctactcagggaatgagtgtcaccctgtgggccgcaggaacccgccccctaagggccggggcggtcgaggggcccatatggatcggggccgaggcagggcgcagcgtgggaagaggtgagactgtgtgagggctcgacacacgggccagggtggaggagggtactggggacccatgggagaaggaggaggagggccggacaggtggacagccagctgccaaaggggcgaggctgaaggggggctggagacgcctgtcgcgctcactgcccctcatcccttcctaggcacgatctggcgcccaccaagcgcagtcgaaagaagatggcg

SEQ ID NO: 37894 - DNA, 1105 bp, Artificial sequence
  DNA replication origin
tgacctcacgtggacagccacctggccaggctctcaaggcctcttcagtctaccggtcaacctcttcgaccagaatttctccaccttggcaagactgagctctgaggcccaatggcagtggcagggcagcatccctggcctccactcactagatgccaagagcatccccttgctgtgacaagcgaaaacctctcttgacattgcccagcgtcgcctgggcacctcaatcaccagacagaaccatgcgtctaaacatgagtcaagcaactcatccccacccacagcaagccaggcgcaatgtctagtgaacgaaggacactgcaggggcatggcctgaccaggggcctctggcaccgcgcccagtgtggcctcaacacaggtgtctccctaagcgtttctggtgctctcaaaggagctgagtgggactgggccttgtcctggtagaccagaggctgtctagatggtctctatggtgggagcacagcgacaagctgagaaagcagagacctcagggttctgaggaagcccagggcaaggagtgaactagggggtccaggcaggagagaacaggaggaagagacacacagatggggtggagaagaggccccagaggcagtgagctgggaacagtggggagagggagaggagtgacccggaacacagaggtgaccaacaaggagagcaagaggaactggagaggggagggctgaatggagaaagatgatggggaagcaaggaccaggacaagggttgggggctgggggaggcctgcggccaggagctggtctgaggggcggtgcgaggcggaaggatgggaagagcaaaggcagaagggagcttggcaccacatacgttttgatcatggccttgagggcgaccttgcgctcccgatctgcaaacttgtccacgaggtagccagacatgcagggtgcatggcagtagagccggaaaaagcggtggtagttgcccagggcccaggctgtccttaatgccaaggcgtgggccacgcaaggatctgccttcagttctcgtgtgaggtatgccagctccgtggtgatgtctagcaccaagacaaagagggtgaagtcagcagggctcaaccctg

SEQ ID NO: 37895 - DNA, 806 bp, Artificial sequence
  DNA replication origin
gaggaagaaaaataacttaaataaacacacacacaaagaaaagagaaggcaacatgacgtgagctggtgatccatgaaggcagggagggaggggaaccgttttacctgtgctgaaccaagggaagaatgcggagagggagggagggaaaggggaaaaaaaaatcagaagaaacactgggggcagagggaggaggggacacggagacaactttatacaacttgagacgaggcggcccggccggcgtgtcctcagtgcggtgtggcggcggaggatctggtgctggtggtgctggcacttcagggtggggggccgaggacgggcacagtctctaagcagctcccccaccccaaacacggaggccccaaggggctgggaacaagagtctgtggcgaagcaggtgaggcagcgggcggtgggcgggcttgctgggtgcccccgccgcaggcgggcacgggctggacggcctgtcttctttccactggccccccggcatgggatgggccagggcgccgggtcgggtaccggagtgcaagctcgaaagagagagagagaaaacactgagacagcattagtggagtgaaaggcggacacagatgagcctgcagaccatgcccccaaccctccgctgcccatcccctcctccccaatcccatccctctgaggcaaaaaataaaaacgtagaaaaatctctgtacagactccccggtgggaaaacgggggcagggatggtggctcttcctggagcgcactccccacaaataaatttacaacccaagtccacggctcaaaaacagaatccgcaaag

SEQ ID NO: 37896 - DNA, 2077 bp, Artificial sequence
  DNA replication origin
ccggcctgccgcttcttcctggaaggccgctgccgcttcggcgcccgctgccgccagccccaccctggggcgccggcgccgcctggccgcgaggcgcagccggaggccggggccaagaagccgccgctgcgcacagccgcggacgtcatccagcgcatccgctgggacccgcgcctcgaccccgccgacttctcggtgggctacgtcgaccgctttctgggtgtgcgcgaggagcccttcagcgccttttgctgggaccagccgctggcggcgctcgggccgggcgtgctggcagtgccccagcaccgcgtgcgcttcttccgcttccgtggccgccttgtgtgggaccgcgcctcgcgcaccgacctcgtctttggctctggctcggcggcgggacgcgggcccaccatcctggacgcaccgaacaccgagggcgcccacggggcagagggtgccgagtggacactggcggggacaggtcaggaggcccaggctgcccccaagcgagggagcacaaggccgctctgcacagggcaccaggaaccaggcgtggaggaacccggagagctggaggcggcccaggagagggcgctgggcacagctgctgatttgggaacactggccccaagaggacgcctcgccggagtgactgaggcactgaagccaacagcagccaccaggaccacattgctggggggcaaggaagcacaggccctgggagtcccggggggctccgctgagacgacagaagccgagtggggtcctgcggcctggcccgaggacaaaagggcccgccttagtgttgcagccccttgccaaccgcgccccacacattttgtggccctcatggtgaccgagcctgggctacaagcagaagtgaccaaggcccaggaatacctggtccacgtggccccacactgcgccaacttcctagtgccctctcagaacctacacctgaccctggccctgctgcgactggcaggcgctggggaggaggccgctgccattggagctctgagacgggccctcttggccccggggctaaatgcaccccctcggctgagctttagaaagctggtcctcctgggcccgcatgtgctgtgtgccccaccctctcccacactggaaagcatggcacaagtgctgagccagaggctggaagccgaggggctgagtacactacagtctccagggcagctgcacccccacctcaccgtggccaaggtgccccatggttcccaggtccacctccccaagctggagttcaccctcagccaggaagtggggtgccagcccctgcagacactctggctgtgccgtatagggaggacaggggggcctttccagcccctggctgagatccccctggagtgacacccccagacctctggaggagacaatggatgcaaacagcccacacaggaaagacaaagcaggagcgtgcacgctctctctttctctctttaattttggtttctctcaagcttccaaatggtgctcagtgctccaaggaaaggaaggaaggaaggaaaaggaggggagaggaggggaaggggaggcagaggaggaacatctggaaaaaaagcagcctgacagtccagctgtttgcaaactcatagcacatcctccagttacatggcagaagagggagggagggagggccaaaaagaaaagggagaggaggaagaaaaataacttaaataaacacacacacaaagaaaagagaaggcaacatgacgtgagctggtgatccatgaaggcagggagggaggggaaccgttttacctgtgctgaaccaagggaagaatgcggagagggagggagggaaaggggaaaaaaaaatcagaagaaacactgggggcagagggaggaggggacacggagacaactttatacaacttgagacgaggcggcccggccggcgtgtcctcagtgcggtgtggcggcggaggatctggtgctggtggtgctggcacttcagggtggggggccgaggacgggcacagtctctaagcagctcccccaccccaaacacggaggccccaaggggctgggaacaagagtctgtggcgaagca

SEQ ID NO: 37897 - DNA, 1345 bp, Artificial sequence
  DNA replication origin
cgtcatcggcctctaggttccctcattccccgcgcccttcccgcccggcaccccacttctgtatacataaacggccaaggtgtgtgcccgggctctgacttttcactttgcacgtggaaagggatgaatgatagggtcctggcgcctctgagagccggatgtgtcacccggaggcctggtccgggtccgatgattgccctggggtgggggtgcggctcctttaagagagcccgagggcgtggccaggcggtgccccttgcagaggcggcggctcccgcagtcccattcgtcaaatactgtgcgccaccgccggccggacgtggtcctggggccgggccagactcagccaccgcggggccagccgaggcggggctgcagagtgctgcagccccaggagtctttctggccctgaacgcctcaggtggactccgacccggcggagccgccgtttactctgggagcggctgcagagggaagtgtctgagaacacttttagagcagtaggggcctggtctccgtgggggaagggtccgcaggcatcttggttctttaaggcccccgagggatggggccgaacatgcaaatgatttggactgaggggccaggttctcgtaagtttcccagaggggcggggccgcaaatgtaaatcacttggactgagggcgggtccaggttctttaaagacgtcccctcatgggcggggcacacaggtatcaccgggaaaggggcggggcaccacatgtaaatcaccgggaaagggatgggacacaggtaaatcacccggaaaggggcggggcaccacatgtaaatcaccttaaaacggacagggcacacatgtaaatcacttggggagaggcacacacgtaaatcacccggaaagaggcagcacaaaagtatcactgggaaagggccagggcacgcatgtaaatcacccggaacggggcgggacacatgtaaatcacttgagaaggggagaggcactcgtaaatcacccggaaaggggcggggcattacatgtaaattaccctgaaaggagcggggaacatatgtaaatcacttgggaaggggagaggcacacataaaaaaaaaaaaaaatcacctaaaaggggtggggcactcgtaaatcaccaggaaaggggcggggcaccacatgtaaatcaccgggaacggggcggggcactacatgtaaatcacctaaaggtcgaggcacacgtaatcatcccgaaaggggcggggcattacatgtaaatcacccagaaagaggcagcacacatcaatcaccgggaaaggggcggggccaggctcccaagagctccgggagaccgagactgccgcagcctttacg

SEQ ID NO: 37898 - DNA, 1075 bp, Artificial sequence
  DNA replication origin
gggaacctagaggccgatgacgtcgttcagctcgaggtccgcgttggggcggcagcgggcctgggggggctgcgtcccggggcggggttccgcgtcgggcttggcggcagccgcctccgggcgcgccgcgtccatgacgcccagcaccgcgtccagcatggagggccccagatccaggtggaaggacagcagcgggtcggcaggcgagggcgctgcggactgcgggacggcgggcggcggcggggagcgcggggcccccgcggggggcgcccggggctcggggggcggcccgccgccgtggcggctcaggaacgaggtgtccccgaaggcgtcgccgccgcgccccacgtgcagcgtgtgccggaagtcgccgagcggcgcggagatggacagggcgccgcgatcaggccgcttcttgggctgcgcggggcccagctgcttcagcacgggcatctgcgaggggcacgggagggtcagcgcggccccagcccggggctcgcagccacgcgactgctcaaaggacgatgggggacggttcccgttttttgttttttgatttttgtttttgagacggagtctcgcccatgctggagttcaatggcgccatcccggctcaccgcaacctccgcctcccgggttcaggcgattcttcctcctcagtctcccgagtagctgggattacaggcacccgccaccatacccagccaatttttgtatttttgtagagacggggtttcacaatgttggccaggctggtcttgaactcctgacctcaggtgatcaacccgcctcagtctcccaaaatgctgggataacaggcgtgagccaccgcgcccggcctcccgtttcacagatggggtaagatgagactccaggaggtcccatgggcacagctgctgagctcacatttggatctaacctgactccagaatgcctatgaacaccatgctatgccgatcctcctgagagcgaatacttgagccttcctagaggtcaagtaacaaatatttcacaaacccttcagagtgcttcccagacttgactgatagaaaactccagcttgttggcccgggtg

SEQ ID NO: 37899 - DNA, 1860 bp, Artificial sequence
  DNA replication origin
catcctcctgctgctttcactgtctgacctgcctctcttctctctttctctctctctctctccctctctctctctccatacagctgcaatctggaagaaattactcttctaaacagccagacttccccagtttcaggaaattccaagctgtgcaggggaggggccaggctgggggcgcgccctgtccagccccaccccctctgccagttccccctgcacacttagtcctggcctcctcccgcccccacactccgcccagaggggcctcagcttttccaccactgctttctagtcctttaactcctagaggcaaacttttgggggataagaaagcctgggaggggcctgtgccaaaaccctctctgcctggggactgggcggtgattccgcttctgcctgggctcctgccatggcccccgagaggggctgacactttagctcccggtgcaggtaaaggggccttatgccagggcttgccaggggtggggcctggactcctgggtctgagggaggaggggctgggggtctggactcctgggtctgagggaggaggggctgggggtctggactcatgagtctgagggaggaggggctggggggtcttgactcctgggtctgagggaggaggggctgggggcctggactcctggtctgagggaggaggggctggggggtcttgactcctgggtctgaggaagaaggggctgggggtctggacccctgagtctgagggaagaggggctgggggtctggactcctgggtctgagggaggaggggatggggcctggattcctgggtctgagggaggaggggctgggggcctggactcctgggtctgagggaggaggggatgggggcctggactcctgggtctgagggaggaggggctgggggtctggactcctgggtctgagggaggaggggctgggggcctggactcctgggtctgagggaggaggggctggggggatcttgactcctgggtctgagggaggaggaagggctggaggtctggactcctgggtctgagggaggaggggctggggggtcttgactcctgggtctgagggaggaggggatggggcctggattcctgggtctgagggaggaggggctgggggtctggactcctgggtctgagggaggaggggctgggggtctggactcatgagtctgagggaggaggggctggggggtctggactcctgggtctgagggaggaggggctgggggcctggactcctgggtctgagggaggaggggctgggggtctggactcctgggtctgagggaggaggggctgggggtctggactcatgagtctgagggaggaggggctggggggtctggactcctgggtctgagggaggaggggctgggggcctggactcctgggtctgagggaggaggggctgggggtctggactcctgggtctgagggaggaggggctgggggcctggactcctgggtctgagggaggaggggctgggggcctggactcctgggtctgagggaggaagggctggggggtctggactcctgggtctgagggaggaggggctggggtctggactcctgggtctgagggaggaggggctgggggtctggactcctgggtctgagggaggaggggctggggggtcttgacccctgggtctgaggaagaaggggctgggggcccctgactttcgggtctggggtgggattaagaaagcgaagatctaggacgcctaggacctgagggcgaaggaggaggtggctctacggacccggatgcctggctcctgaatctccctccgggttccacatgacactttccttaccaggtgagaacccgcccggaggaagaaggaaggcg

SEQ ID NO: 37900 - DNA, 1405 bp, Artificial sequence
  DNA replication origin
ccaggagtcaagaccccccagcccctcctccctcagactcatgagtccagacccccagcccctcctccctcagacccaggagtccagacccccagcccctcctccctcagacccaggagtccaggccccacccctggcaagccctggcataaggcccctttacctgcaccgggagctaaagtgtcagcccctctcgggggccatggcaggagcccaggcagaagcggaatcaccgcccagtccccaggcagagagggttttggcacaggcccctcccaggctttcttatcccccaaaagtttgcctctaggagttaaaggactagaaagcagtggtggaaaagctgaggcccctctgggcggagtgtgggggcgggaggaggccaggactaagtgtgcagggggaactggcagagggggtggggctggacagggcgcgcccccagcctggcccctcccctgcacagcttggaatttcctgaaactggggaagtctggctgtttagaagagtaatttcttccagattgcagctgtatggagagagagagagggagagagagagagagaaagagagaagagaggcaggtcagacagtgaaagcagcaggaggatgaagagcatggagggtgtctgagaggggcagctctggctttgctgcggcgtcccctagatgaacctccctgcctggagccactccgtcatagaaagctcatatctcattctaagcaccagtgtctattgatgacaagagagtgaggtttgagtgttagggcaattccttcagggcggtgcgggcagggagagagagcggagggggagagcagagtcccaaggcaggatgcagctcagtgggaagaaggtgggaagcccaggtgggagtctaggtctgtgggagggaggtggaggcccaggtgggaggctgggtcagcgggagggaggtggagatgcaggttggagcctgggtcagggtcagagggagagggagagggaagcccaggtaggaggcagctcagtgagagaaaggggaggcccaggtgggaggctaggtcagtggttttacccctagctggggctggggttgtagtgctggagagaagacagtcaatttgcgataacaggaagcagccttgagctgggtcttaaggatgagtgagagttgatggagcccaggagaggaggatggatatcggagcagaatggggaagctgggtggggcagagggttctcagacaccaggtggagtttgatttgcctggagaagccagcttgaaagccactgggagcttcagtttgccctgcaggcgtggggggaccgcggaggaatggcagggaaagatccaggtgttagaaagttcccactggggtccccgcaggggatggagtgaagcaggtcaggactcagcac

SEQ ID NO: 37901 - DNA, 1074 bp, Artificial sequence
  DNA replication origin
aaagaggagagagaaagaaagaaagaaagaaagaaagaaagaaagaaagaaagagaaggaagagagagagaaagggaggaagggaggaaggaaggaaagggagagagagagaaagagagaaggaaagaaaggaaaggaagggagaaagagaagagagagagagaaagaaagaaagagaagggagcgggggaaggaaggaaggaagagagaaaggaaggaaggaagaaagagaaagagagagagaaagaagcaaaggaagggagggagagagagaaaaaagaaaggaaagaaaggaaggaagggagggagaaaggaaggaaggaagcaaggaaggaaggaagaaagagaaagagaaagaagcaaaggaagggagggagagagagagaaagaaaggaaggaaggaaggaaagagaaagagagaaagaagcaaaggaagggagggagagagagagaaagaaaggaaggaaggaaggaagagaaagagagaaagaaggaaaggaagggagggagagagagagaaagaaaggaaggaaggaaggaaagaaggaaggaaggagggaaacaaaaagaaaagaaaagaaagagaacctcagagctgaccccagggaagccacctgcagtgtggagtggaatccgggctgaggactgacgagctggcgacaggaagagcagctggggggagacgtggacagaggagacagcttctgtgaaagtccccatcaggagataatttgcctgttgtaagtcgagtggactccagatggaaaaataatgaagaagaatatgtgcattgattgagcaggagtctctaaaaggccaagtagagttttggtattttaccctcacgagagtgggacaggttttgagcctaagcgtggcatcatcatatttttgtctaaaacatatcggtaagaccttcctgaagtcagaattgcacaaggcaatcaaaggaagagataacctttctgagctctcgctctatgccagacactgctccgagtatcccttatgggtagttcctttaattctcacaactttgggaagatgttttcatcattaggccagttttacaga

SEQ ID NO: 37902 - DNA, 1076 bp, Artificial sequence
  DNA replication origin
aaacaataaaaatacatgaaaagtctttcatgttagcacagattttaggcatctcgtgttcgggaggttggatctgagacgtgttttgagttggtcatagtgaaggacgcgaggtgtcaattctagtgagagcaatttccaggaagccatgttccgctcttgagcgagcacccactgggcctcatgcaaggtagaaagagcctgcgtacgtcaccctcccatgatgtggtcaacatgtaaactgcatgggcagggcgccaaataacatcctgtgcgctgctgagctgagctggggcgcagccgcctgtctgcaccggcagcaccatgtcgctcatggtcgtcagcatggcgtgtgttggtgagtcctggaagggaatcgagggagggagtgcggggatggagatctggacctggaggtaaagatatgggcctagaggtggagttatgggcctagaggtggagttatgggcctgaagtggagatctgggcctggagtggagatctgggcctggagtggagataggggcctggggtggagatatgtgcctggagtggagatctgggcctggagtggagatatgggcctggggtggagatatgtgcctggggtggagagatgggcctggaggggagatatgggcctggaggggagatgtgggcctagaggtggagtgatgggcctagaagtggagcgatgggcctggagtggagatatgggcctggaggtggagttatgggcctgcagtagagatatgggcctgaagtggagatatgggcctggagtggagatatgggcctagaggtggagttatgggcccggaggtggagttaagggcatgaagtggagatctgggcctggagtggagatatgatcctggagtggagatatgggcctggggtggagatacgggcctggagcagacatacaagcctggaaaggagatatgggcctggagaggagatagaagcctggagtggaaatatgggcctggagtggagatatgagcctggagtggatatatgagcctggagttgagataggagcctggagtggagatatgggcctggagtggact

SEQ ID NO: 37903 - DNA, 1471 bp, Artificial sequence
  DNA replication origin
gtgacatccggcagccaaaagtggcctccaactccttggctctcttctcgttagcgaggccaaaggagtagtagcctgcttggatcaggtcggggttcctgagtctttctactccggaaagcagcttctgtacgtccccaatgtcccaggtgtggccgtccctatcctcttcctcctccttctccagggtgtagaacagggcagtgagaaactgctggaagctgaggtggatgaaggagtagcagcctttggagactctgtcctggcggaggatgtctccgtccaggaacagacggaggtcggactcctgcaccccgagcctttccagatcctctcggtgaagcacggacgtctgcgcccacaggccctgcgcggccaggaggctcagcgtccgcagcgcgccccgcagctgtgcgccctgcgggaaccggctgcagaggaaacgcaggaacagccccgtgcgggtgaggcaggtggggaccgggtcctcccccttctccatctgcagcttcagagtcgtgcacacgatccagcacaccgcgggggccgagcccagctggaacagggccgcgttgctcctcattagctcaaaggcacgcatggcttggtcctcgtctccaaagtgtctcaggaaataggccctcctgtcctcctccaggaagccctccacccttatgtagatcggctcctccgccaggatccggaggtccctcagggccctgggccgcgtggtgaccagcagggcggccttgggtaacatcaccctgttcagcaaactccccaggaggacgggcaccggcttcttcttctcccagtccccgcagatgtcctcgatcagcgccccaggtgcggctcccagctcatcaaagccgtcaatcacgaacaagattttccgtgcttgggctaggatgtgtggaatgtcatcctgcaattcaggccagtccctgaagaccagctctgcaaaactgcacgggcccaggcggctgagctccctgcagctgaggtagaacgcatatttgaatttgtggatgaggttgtcctctgcccagtctagcattagtttctgggccagcgtggttttcccaaggcctgcaggaccatacagcaccaccgtgtatgagaagggcccgggaagcaccctggggttgctgaatgggatcagcatcttgtatctctcagccataacctggacctctttgctatctccaggccagctcttccacatctcccggaacttcgtcttcaatatatacctgcacctattgtctttgtctttatcattggtgaggagggaagggagagaggatgcaatcagttacccatagggaaaaccaaaataacaaaatgccttgtgttggccgggcacagtggctcatgcctgtaatcccagccctttgggaggtcgaggcaggcagatcacctgacattgggagttcaacaccagcctgaccaacatgaagaaaccttgtct

SEQ ID NO: 37904 - DNA, 1661 bp, Artificial sequence
  DNA replication origin
atctgcggggactgggagaagaagaagccggtgcccgtcctcctggggagtttgctgaacagggtgatgttacccaaggccgccctgctggtcaccacgcggcccagggccctgagggacctccggatcctggcggaggagccgatctacataagggtggagggcttcctggaggaggacaggagggcctatttcctgagacactttggagacgaggaccaagccatgcgtgcctttgagctaatgaggagcaacgcggccctgttccagctgggctcggcccccgcggtgtgctggatcgtgtgcacgactctgaagctgcagatggagaagggggaggacccggtccccacctgcctcacccgcacggggctgttcctgcgtttcctctgcagccggttcccgcagggcgcacagctgcggggcgcgctgcggacgctgagcctcctggccgcgcagggcctgtgggcgcagacgtccgtgcttcaccgagaggatctggaaaggctcggggtgcaggagtccgacctccgtctgttcctggacggagacatcctccgccaggacagagtctccaaaggctgctactccttcatccacctcagcttccagcagtttctcactgccctgttctacaccctggagaaggaggaggaagaggatagggacggccacacctgggacattggggacgtacagaagctgctttccggagtagaaagactcaggaaccccgacctgatccaagcaggctactactcctttggcctcgctaacgagaagagagccaaggagttggaggccacttttggctgccggatgtcaccggacatcaaacaggaattgctgcgatgcgacataagttgtaagggtggacattcaacggtgacagacctgcaggagctcctcggctgtctgtacgagtctcaggaggaggagctggtgaaggaggtgatggctcagttcaaagaaatatccctgcacttaaatgcagtagacgttgtgccatcttcattctgcgtcaagcactgtcgaaacctgcagaaaatgtcactgcaggtaataaaggagaatctcccggagaatgtcactgcgtctgaatcagacgccgaggttgagaggtgagaaccgtttcactctaccagtcgttccatctttagcctcatcccatgcccccttaggaagaggccagagcctcctatgcactgtggcttagggtcaggaattccctcttgttggactctttgtttgtttttgttttgagatggagtcttgctctgtcgctcaggctggagcgcagtggcgcgatcttggctccctgcaacctccgcctcccgggttcaagtgattcttctgcctcagcctcctgagtagctgggactacaggcgcctgccaccttgcccggctaatttttatattttcattagagacgggatctcagcatgttggccagtctggtcttgaactccgcctgacctcaggtgatccacctgcctcagcctccaaagtgggattacaggcatgattcaccatgcccggcccaaatatatttttttaagacagggtcttgctgtgttgctcaggctggagtacagtggtgaaatcagctcactgcatcctcaaacttctgggttcaagtgatgttcctgagtacctggga

SEQ ID NO: 37905 - DNA, 2893 bp, Artificial sequence
  DNA replication origin
cagcctcgccttcctgggctcaagcgatcctcccaccttggcctcccaaagtgctgggatgaccggtgtgagccgccgcacccagcctcaacctttgtttttctgactcctgtgtgcaggcatgcatcaccacaccggtctatgacaacaacctcacatcagagtagtgtaggttcgtgtttaggagcggagaccctggaatcaaactctgtgagtgcagatttcaactctgccacttatgatcttggacaagttttttatttatttttaaattaaaatatgtccagctttgttgaggtataattgaaaaacaaaaatggaatatatccaaggtgtacaagttgatgttttgatatacgaatccactgtgagacagttactactagcaagctaattaacatacatcacctgacacagttaacttttttgtgtgtgagaatacttataatctaccctcttagcaaatttcagctgtacactgcagtattgttacctagagttggacaaattatttaatgccatgtgccttagtttcatttataaaatagggacattaagagtgaggactccataggtctctgaggattcactgaactgatatacatcataagtttggaaggcacccggaagctagcactgtcagccacatttacaacgtaacaattgtatgtggcaatacaagcttacagcacagtataagcttaagctatttacttactccagcgcttgctaggcaacaggcactctgcaaattactgtgtactgtctcattcagtcatccccattttaacagaacaaggcagtgaggctcagatacagagggagatttgtctccagggccaccaggcccctgaaggcagaactaggatttgcacccaagcactaggacgtgagcacagcctccttcctcaaccactgggtgactcgacctctctgtgagcttgggtgggggagtgcgctctctgggagggatacagccaaaaagctccccagctcttaggcaggtgtggggacctccccagtctcagctgagatgctggctcctgccttcaacatcagactttctttttctcccaggagtttttgccaaaccctcgctctcagcccagcccggcccggcggtgtcgtcaggaggggacgtaaccctacagtgtcagactcggtatggctttgaccaatttgctctgtacaaggaaggggaccctgcgccctacaagaatcccgagagatggtacagggctagttttcccatcatcacggtgaccgccgcccacagcggaacctaccgatgctacagcttctccagcagggacccatacctgtggtcagcccccagcgaccccctggagcttgtggtcacaggtaggggtagtgcagaccaaacctttcttcctcagcctttataggtcctgatggccattccaagggaggggccataagtgggaaggaagtgggagggcaggaagccctgggctgcaggggcggggccgtaggtgggaaggaagtgggagggcaggaagccctgggctgcaggggcggggccgtaggtgggaaggaagtgggagggcaggaagccctgggctgtaggggcgcggccataggtgggaaagaagtgggagggcaggaagccctgggctgcaggggcggcgccagaggtgggaaggaagtgggagggcaggaagccctgggctgcaggggcggggccgtaggtgggaaggaagtgggagggcaggaagccctgggctgcaggggcggggccgtaggtgggaaggaagtgggagggcaggaagccctgggctgcaggggcggggccgtaggtgggaaggaagtgggagggcaggaagccctgggctgcaggggcggggccgtaggtgggaaggaagtgggagggcaggaagccctgggctgcaggggcggggccgtaggtgggaaggaagtgggagggcaggaagccctgggctgcaggggcggggccagaggtgggaaggaagtgggagggcaggaagccctgggctacaggcagctgggagaatggaggtttcttttttttttttttgacgaagtctcactctgtcacccaggctggagtgcagtggcgcgatctcagctcactgcaacctccgccttccgggttcaagcgattctgctgcctcagcctctcgagtagctggaattacaggtgcctgccaccatgcccggccaatttttgtatttttagtagagacggggtttcactatgttggtcaggctggtcttgaactgacctcatgatctgcccgcctcggcctcccaaagtgctgggattacaggcgtgagccaccgcgtcggacttgactaccattcttaaagggggtttctttcaaaaaagagcagcatacctcataatgtggttatatacatgcaatggaatattatgcagccttaaaaaagaaggaaattctgacacatactacaacatggatataccttgaggacattatgctaagtcagtcacaaaaggacaactactgtatgattctagtcaaaggaggtatctaatgtcaacactgtagaaacacaaagtacaatggtggttgttaagggccagaaagaggagagagaaggaattagtgtttaatgggcacagaatttcagttttgcaagaaaaataagttctagaggtcaacatattgtaccacaatgtgaacatacccaacgccactgatcagtacatttaacaatgtcatattaaatcaaacaaaatacatcatttagtttttggtagaaaaatctgttttgcccccagggtcacagtgaggggtaggacacaggaatccagaagaaatagaactgaggttgaaaaaggtggacgggagctgcatgcatttccttgttaatagcccagaatgtgcca

SEQ ID NO: 37906 - DNA, 1355 bp, Artificial sequence
  DNA replication origin
acgaacaaataaataatacaaaacaacaaaataaagagtttaaaagtctggaaggaaagcaacatttacaagggcccaggctcgcccttccctccgagtgaccttgggccggtgacctggccggccagagcgcaggtttgccccactccgggcgggcactgcgggtcgggagctacggggcctggacccgggtgcgaggggcgggggtctccgccgccttcccggcccctgcgctgggggcccgccttgaccgcgcacgcggggctagaatgtactcacttgagcagcacggcggcgcctgctaccgtgcccagcgccgacagcggcagcaggtagcggctcatgccgggccggggacaggcgtcaggcgtcaggggtcggcgcggagcttgctgcacaccagccgcctgggtagctccgaggaagagcgcgcgacgcagccacaggcgagcggaggcgcaggcgcggctgggcccgcgtccggaactgggctgcgaggggcggggcgcgggcggagggggcggggatcctagggacgggacctatgagcatcggtcctgagcgctgtcacagctgggattggtggtttcaggagcctgtgggcgtggctagtccgggggcggggcctatggtttgttcgaatgacgtcacacttgccgcagcgtataaggcgctacgcagttctggagtgaaataggttcgaatcccaccactgtcaattccagactgtgaccctctgtgtgtctttcaactatatcagcctattccctcatctggaaatgtgtgtttaccttcttcatagacttttggagataatttgagaatttccatgcacagaaacaaggatctagtagcctgtgggtacccaagctcctggggtcctgcaggagaaggcggctgggggcctggactcctgggtctgagggaggaggggctgggggcctggactcctgggtccaagggaggaggggctgggagcatggacttctgggtccgagggaggagggccgggtgcctggactgctgagtctgagggaggaggggctgggggcctgattcattcccaaattatcagaatctcatccccatgtctggccctgcacagagatatcttccctgaactctgcctgaactacctttcttagattgagtattgcacacactcctgcacttacctgtccatgtttgtcacccccaccaaaccgggatgcacctctgggcacctgcttccccttgcactgctcacagcgagtgtatctgatcaccacctcctacccctgactgtgcctgaggtgccaggagcagacaccgctggaaacagggaagaattcaacccaatctaactaggagtaagt

SEQ ID NO: 37907 - DNA, 1419 bp, Artificial sequence
  DNA replication origin
ccaggcatagtggcctgcatctgtggtcctagctgcttgggaggctgaggtgggaggattgcttgaacctgggaggtcaaggtacagtgagccacgattgcaccactgcactccagcctgggtgacagagcaagaccttgtctcaaaaaaagtaattaatttatttattcaatacgtagctcctgagacaaaatgtgtgccgtactctagaccctgctggtgtgcacaattcatgggggatatgtgcgctaatggaagtgtggcacagggcaagggtgtccccagagaaagccctaatccagctttatgggtggttgtatgaggcacagaagcctttcctggttaagggataaatggatggggtttcaaaggatgaataggagtttgccaaggacaatgaagcaaagattgacattctaagcattgggagtgtcctatgcaaaatcccaaagtgatgtagtagcaaatacttaagcacctacagtgtgccaagcatgtttcatgtgctggagatacagaggaggaggagacagatgaaaccccagcccttgtgatattgtcatcctagtaggtgtggtggggagataaacaagtagacacctgcatgaataagactttcagattgtggtaaaccctgtggaggaaacgaaacaggtgaaggaacggcgtgactaggagcaggcaggtgcggctgcttcaggtagggtggtcagggaaggaggcggcatctgagctttgacctcaatttcgagaatgagccaggaatgcagagaggatttcaggcagaggaaaccttagggaggctggcgggttaaatctgcaggggtgtggctggccggaggaagtgaggtgtgagacagtcacgttgatggtgacagcagcagtgaccgtagcagcctagaggtggccgaatgcttactctaatgggctggcccatccctgagtgtctagagttcccagcccgcttaaggaaggaaggaaaacacaggcagctctaagtgtacgacgagggaggtctcatcggcggtgaggaagcccaggcgggtccccttcccagctgaaaggggttcgggtaggtttttcctgggcgttcctctgagaacagccagccctggtgagagtgcggggagaggcgcttatgacacagggagggtgggtctgggaaccagcctggcaggaggaggagggagactgccggtggccgggagctgtttgttctctgggagggatcgtggcggggtggtttgtgcagccctttcctgaaaccggaggagcctggctccttcccaggtctctgggggatgggtcggggcggggggtggtgacggggataggaccccagacagacttgagtttggatcctgggttggagccggtgacttcactctcagctccctgaacatcagggcctgcctttct

SEQ ID NO: 37908 - DNA, 956 bp, Artificial sequence
  DNA replication origin
tgttgcccaggctggtctccaactcctgggctcatgtgatactcctgccttatcctcccgaagtgctgggatgacaggcatgagccacccaccacacccagcttattgggaggataaagtcaggttatagagagttgtcaatacagtacctggcaaagaggaaacgcaaggctggtgttagcaatggcgaggacgatggcctttcttcccatgcgtgctgcaagggaggacacgaggggctctgccaaggccaggagaggctgctgagggtcaggacaggctgcctggaggaggaggacaggctgcctggaggaggagggcaggccaggaatcaccttgaaggatgagtttgacagccagtgtcaatcctagaagataggggtgttctgggccctgcaactgcctgagtgaaggatgggggctgcaggggtggccagcggggctagactgtgagctcctggctacccagcaggtggtcctggtgcgtgtagcagcgggtgggggaggtaggggtggaaggagggcccttacgcttctctttctttggcttctgcaattctgtgttctcatcacattcatgccacaagtattttctgtgcttgactgtacctgagttggggtttgagggaaggagcagaccccttgccccattgacaggagaaaacagaggctcagagagggaagtcagtagcctaaggttacagtggccctgggctgtgacacagatgcagatctgactgggcctgggctcatttcttcatgaacaaggggagaaaactatctcatagaagcatttggtatgggtccgaggcctttgggtctgagggaggaggggctggggtctggactcttgggtctgagggaggaggggctgggggcctggactcctgggtctgagggaggaggggctatctcattgctttgggggtggcgcaggcggccctccaggccatggt

SEQ ID NO: 37909 - DNA, 1115 bp, Artificial sequence
  DNA replication origin
aaaggaaggtggaacgggatgggtggggaggtaagggcatgagcagaggcagtgatcgtgggcaggaggtgtccatagaagacgggctgccactggccctggagacagaaggtcagccccgggttcaaatccctccttaaccaagtgctgaaatggacaagttgctcaacctctctggccttcagcttcctcatctgtcaagcaggaatcaaacctcgaacttcctcccgctgttagaatttcaagggagttttaaagacagagctttcaactctgacctgtgaacaagtgtgacatcaaatgtactgttcgttgctattattctgttgctacaaggcagacagttagtttcccagctcccctgcagtccccccagcccctcctagatctgtctgccagccccgccccggggtcactccagccaggctgtgccaggtgaatgctcaggtatgcggaggcggaggcggaggcaggacggccctgggagggagcaggaggaggggccggcagcctggaagggaaaggacagcggagagcagggcagagcctgagcaggcaggtaaggagatccgggtcaggagagaagggggccggggcttgaccaatgggtctgagggacggggggactggggtctggactccagggtctcagggaggacgggctgggggtctgaactcccgggtctgagggaggagggcctggggtcctggactcctaggtctgagggaggaggggctgagggcctggactcctgggtctgagggaggaggagatggggcctggactcctgggtctgagggaggagtggactggggtctggactcctgggtctgagggaggaggggactggggtctggactcctgggtctagggaagagggactggggcctggacttctgggtctgagggaggaggggctgggggcctggactcctgggcctgagggaggaggggctggggcctggatgcctgcattgagggaggaggctggggtaggaattagaggctcctactggccaggccttcacatgtttgctggctcccagggcacctccaggtgggcaggagctaccactcagcaccatgagcaccgccacagggtaagcgcccccgg

SEQ ID NO: 37910 - DNA, 2321 bp, Artificial sequence
  DNA replication origin
caccacacccagctaatttttgtatttttagtagagacagggtttcaccatgttggccaagatggtctcaatctcttgactttgtgatccgcccacctctgcctcccaaagtgctgggattacaggcgtgagccaccgcgcccagcctacctgtcttcttaaagtccagctctggctctgagctctcctgctcaataataataataataataataataataataataataataacccttccatcgctccccattaccttcgtcatgaagcccttgctgccctgcttggcatttccacaggatctgcccccagtcccacagtctctctcattcctcttttcttcaccagcccagaagctgccccaaagccaagcgccaagtctatctatggtgagcggggggcaagggagccccaggcccatagaactgggtctaaagaaacaggacctggcatccagggtcttggaggaggaggggctgggggtctggactcctgagtcagagggaagaggtgctgggggtctggactcctgggtcagagggaagaggggctggggggctggactcctaggtttgagggaggaggggctgggggcctggactcctgagtcagagggaagaggtgctgggggcctggactcctgggtcagagggaagaggggctggggggctggactcctgggtcagagggaagaggggctggggggctggactcctgggtcagagggaagaggggctggggggctggactcctgggtcagagggaagaggggctggggggctggactcctgggtcagagggaagaggggctggggggctggactcctgggtcagagggaagaggggctgggggtctggactcctgagtcagagggaagaggggctggggggctggactcctgggtcagagggaagaggggctgggggcctggactcctgggtcagagggaagaggggctgggggcctggactcctgggtcagagggaagaggggctgggggtctggactcctgggtcagagggaggaggggctggggggctggactcctgggtcagagggaagaggggctgggggcctggactcctgggtttgagggaggaggggctgggggcctggactcctgggtcagagggaagaggggctggggggctggactcctaggtttgagggaggaggggctgggggcctggactcctgggtctgatggaggaggggctgggcctggactcccaggctcattctctttctcccctggcagagcagaggaagcgttactccacagttgttatggctgatgtatcccagtacccagtcaatgtgagtctggggtctgtgttcccccaggacatcttctggggcaaaggtggcctcaggagatagggcttttgaaagcagctaggcccccaagcaggaagcatgtggaaagtcagtttgcccatccataaaatggacctccgttgcctcacctcagtcatggatatgaagccaggggcctcgggtccacttaatctgccagcctttcctccaggccagctgttgtgctggacagtgggaccacggaggcaaatcaagacacagccctgcatgaggaaggggtagacaaggtccagaggaatccacagaggcgcctggtgctctaatggaggtggcagggggcatggcaggagacccgaggaggcatttagaaggagagagctataatccagactccttccctgcccgcaaggagcctccagtctgtgagaagccagactcaggtgctagtcactctgatgaaagggaaacaaagggcactgggaggaggagctgatttgtggaacaggtgatcaaggaaggcttcctggaggaggtgtggttagtctcaggctgaaagtctgattattctgggggattctgagcccacctggcatcatcttgggcctcactgctttctccatggtccgtaccagcacctggtgacgttctgcctgggtgaggacgatggcgtgcataccgtggaggatgcctccaggaagttggccgtcatggatagccagggccgagtctgggcacaggagatgctgctgcgagtgtctcccgaccatgtcacgctgctcgacccggcctccaaggtgccggggggcacgtgggtgggaggagtgtctggggcagggacttcagggggtctgggtgtgaatcttggctcctgcacgtccttcctctgggaactctggcgagggaccccagcccccttcttgagccttaatagcctcatctattaaacagggctgttatccctaaccccctaaccgcctgaggttgccctgacctgctggcccac

SEQ ID NO: 37911 - DNA, 1339 bp, Artificial sequence
  DNA replication origin
tgccggggggcacgtgggtgggaggagtgtctggggcagggacttcagggggtctgggtgtgaatcttggctcctgcacgtccttcctctgggaactctggcgagggaccccagcccccttcttgagccttaatagcctcatctattaaacagggctgttatccctaaccccctaaccgcctgaggttgccctgacctgctggcccacactcccgtcgccatttagtagtaccatcatttcggggcctcagtttaccccgccatcccacccggcaggaggagctggagtcgtacccactgggcgccatcgtgcgctgtgacgcggtgatgccacccggcaggagccgctcgttgctgctgctcgtgtgccaggaacccgagcgcgcgcagcccgacgtgcacttcttccagggcctgcgcctcggggtgagcagatgggctggctctgggggtggagctggaactgggcggagcctggagccggggcggaaatgggtggggcctctaggtggggcggggcctggggctaaggcgggatcagagcaaggaagggcaggggacctgggaaggaagttctggaaggcagtggggtttgagattggacccagggtcaagatagaacatgaaggtgggatgaggacatgaacagaacatggccaagaaggatctgggggagcagccaggacgaggtgggggcgaggaaccacccggactgggtctccatgggcggggtcgtggcttagggcagggacaggtgtagggcgaggggtgagttcggggcgtggacgtgcgtgggttcacaggtgtgaacggtagccgcacgtgggctgggactgagctgaaaaatcggccaggggcgaggcccgggtaggaagtgggtgcggcgtggggaggcgtggcctgacggtgtgattggcaggcggagctgatccgagaggacatccagggggctctgcacaattaccgctcgggccgcggggagcgcagggcggcggcgctcaggtgagagggaagaagttggcagggtctctgggaagccggtttcccctccttgtgcctcagtctacaacaccagcctggaacagaacaagagttttgcatggagtcaagcacaccctagtcgagtcttgtctgtacctcccagacgagctgaccccttctccagaactctgcttcttttctctgttccctgtccaggccctcagtttcactctagagaggtgctatccctccgtatatcggatttctccctacctcgttgaacttgttcactccctttgagccttttgagcctgtgtgtctcgttctgcgccctggatttccccctccctggacccct

SEQ ID NO: 37912 - DNA, 1015 bp, Artificial sequence
  DNA replication origin
agtttcactctagagaggtgctatccctccgtatatcggatttctccctacctcgttgaacttgttcactccctttgagccttttgagcctgtgtgtctcgttctgcgccctggatttccccctccctggacccctcagtggacccagtcttggtgtccccgtcgccctccgcagggccacgcaggaggagttgcagcgcgaccgctcgcccgccgctgagaccccgcccctgcagcgccgcccgtcagtccgcgcagtgatcagcaccgtagagcggggcgcgggccgcggacgaccccaggcgaagcccattcccgaggcagaggaggcgcagaggcctgagccggtggggacctcgagcaacgctgactcggcctccccggacctgggtccccggggtcctgacctggcggttctgcaggcggagcgggaagtggtgagccgctaaggaaggggtctgggggcagggccaggcgactggaggcggggctagggcgtggaagggcggggccggctgcgggacgggcgttctctggtcagacttctgcgttatggaagaggggctgggtcgggggcggggcttggttgtggggcgtggccaggtgtttggggcgtggcctgatctggggaagtgtataggtgctcaggttcagggcttcgacggggatggttttggaactcgggagccctgagcgtccccctcctctgtcccctaggacatcctgaaccacgtgttcgacgacgtagagagctttgtatcgaggctgcagaagtcggcggaggcggccagggtgctggagcaccgggaacgcggccgcaggagccggcgccgggcggctgggggtaaggggcaccctggcgtgggatctgaaccccctcccgatctcttccaaatgtccccgctctccccaggctctcccctcccgccacttgccagggctgacctcaccgccatcttaaccgggtgtccacctctctctgcctgcctggtgctggccccgcgtccccatcgcc

SEQ ID NO: 37913 - DNA, 1335 bp, Artificial sequence
  DNA replication origin
cccctcagagggcttgctgacgctgcgggccaagccgccctcggaggccgagtacaccgacgtgctgcagaagatcaagtacgccttcagcctgctggtgaggacgcgcccgcccctgggccggggcgcgggcacgacgaacctgtcccgtccccgcacccacgccaaccacctccctccccacgccccaggcccggctgcgcggcaacatcgccgacccctcctctccggagctgttgcacttccttttcgggcctctgcagatggtgagacccgccccaggccctcgggcccccctgcagcgggaggaatcgggttcgacttgtagaaggtgtggcggcacagcctgcccctcctgctcccctgacagattgtgaacacgtcgggggggccggagttcgcgagcagtgtgcggcggccgcatctgacatcggatgccgtggcgctgctgcgggacaacgtcactccacgtgaaaacgagctctggacctcgctgggggactcgtggacccgccccgggtgaggggcggggctgggaggcagggggcatggtgattggaggagcataaggcgctgggaggtgggtggcatgatgattggaaaataggactaggagagtagggaggggttagaggcgtggcttagttgtgttggggcggggcttaggacagatgccaagattcaattggaggaaaggccaggaattaacgtgaaggaaagatttaagaccaccagaccaatcggattgaaagaaaaggggggcttaaaggaatagaggggctaggggctacggggcaggggcggggctacgcgaaggggcggggcttctggaaggtttggtctataactttggtgatgggacagagtctgtgcactgcgggctggcagttccgcagggaaagggtcagaacctgaaaccgaccttacggaaaacctgatttggaatcaggtgagatttagaggctggataaggcaatttttttccagagagagagatggatggggtctcaatattttgcccaggctggtctggaactcctggcctcaagcgatcctcccatcttggcctcccaaaatgctgggattacaggcgtgagccaccgtgcccggtctagaaatataaattgctgttgagttgggcttagagctaccggcaggacttggtgaaaagtggcggggctagaatcgttggaatacagcgagctttaggggaaaacttagtgaagttaatgcaggaacgaagttgggggctgtatcaggatccctgagctcttggccctgtccctggccgcaggctggagctgtccccggaggagggacccccatacagacccg

SEQ ID NO: 37914 - DNA, 1406 bp, Artificial sequence
  DNA replication origin
tcccatcttggcctcccaaaatgctgggattacaggcgtgagccaccgtgcccggtctagaaatataaattgctgttgagttgggcttagagctaccggcaggacttggtgaaaagtggcggggctagaatcgttggaatacagcgagctttaggggaaaacttagtgaagttaatgcaggaacgaagttgggggctgtatcaggatccctgagctcttggccctgtccctggccgcaggctggagctgtccccggaggagggacccccatacagacccgagttcttcagcggctgggagccgccggtcactgacccgcagagccgcgcctgggaggacccagttgagaaacagctacagcacgagcggaggcgccggcaggtgacccaagcgacacagcagggccgaggctgggaagtccgggggcgcggccggtccgcctggccccgcctgacccgactgtcttacttcctacagcaaagcgccccccaggtcgctgtcaatgggtgagtgtccgccccagggcagggcaagggggtcaaggaggggtgcgtcccgggggctcccgatgctgactccgccccctttttttctgtgtttttccttctgtcttcctggctcttctcaggtgggtgagatggtgatggggcgggccggggctgggagagagggaggagcagggtgggagggggcgggacccagacttctggggctaagggagttgggaatggagacccggattcctgggcctaagggaggaagggggctgggagtgggtaaagtctgagaggttggatccctggatccccaaaaggctggaagaagccagtttgttttcccagggcctgggaagcaccatgcctgggctccctaggaggacagagccctggatattggaggggagaggctggggaattggacctttgggttttgaagaagagcccaagtctggtgcttgggatcctggagacccagaggagcaggcttgggacttcaagggcttgggggcaagtttctgggaaagttaggaagtggtagtatctctgggcccccgagaggggtaaaggctggacgattaaactcttggttttccagaggctctaatgcaattgtctaagtcgctgctgggtgtcggactgggttaaaaggtttgagggttaaaaggataagattgaagcttgagacctggactcctaggtccctgggggaggaaagaacattccaagtcatggttctaccaagcagtgggggctcagactctgggtcctgggggagggaaggaggtagatggactagaactctagggtccttgagcaaatagagggcagactggagggaagcaacgtgggaggagacgaaaacaaagcagtgaggctggaggagacaaaggggggtctgggtgaggg

SEQ ID NO: 37915 - DNA, 754 bp, Artificial sequence
  DNA replication origin
cttcaagggcttgggggcaagtttctgggaaagttaggaagtggtagtatctctgggcccccgagaggggtaaaggctggacgattaaactcttggttttccagaggctctaatgcaattgtctaagtcgctgctgggtgtcggactgggttaaaaggtttgagggttaaaaggataagattgaagcttgagacctggactcctaggtccctgggggaggaaagaacattccaagtcatggttctaccaagcagtgggggctcagactctgggtcctgggggagggaaggaggtagatggactagaactctagggtccttgagcaaatagagggcagactggagggaagcaacgtgggaggagacgaaaacaaagcagtgaggctggaggagacaaaggggggtctgggtgagggcccgagcagagggtctcagcagggacagcgtgctgggagctgccggccccacacagggggtgccgcggccctgaagaccccccctctcccctgcacaggtaggcctgatccaggctgaggtccctcttattgggggtcagagctgaaatcccacccctgcccccagctgcctgatatcgcaaccctggtccctgttcacagcttcaagtcactttctccgagcctcaagttcttttttgcagggaaactgggaataatgattatccgttcccggaacagtgagaagtctgtggtgttgtaggaactagcagttaagggcttaaggctgtgaccaggttc

SEQ ID NO: 37916 - DNA, 1667 bp, Artificial sequence
  DNA replication origin
atgttgccacccggggggcgtggccgcatcctgctttcaaagggtacgggatttccctaaggaatccagtcggagtctgaaaaaacatggcaatcacagcctgccattgggtgttgctaccagacagaccctcacttcgggctaatcccggctccctgtggtctccacgactgccgccccccgactcccggccgatcggaacgctccgctcccagcgtccgtatcaacccgcgccgagagggccccggccccactcacccggagctaaagcccttggcctgcagccaggcgcggacctcggaggcgtccgagcccgggctgagctgcggttccggggcgcggggccctgggactgcgcggctcggtcccgagcggccctgggccaggcgcgcctgcagttcctcgttgacgatgagcatctgggagaatttctctgcaggcgggaaaccgggaggtagggagtgcgggctcagggcgaggggtcctggggccagagggcggggcgggggggcgctccagcgtccccagaatgggacgggagtccctttgctctttctgagcccccgtttctctgcctggaaagcaaggataaggaccgctccccgcagccggcgtccccaccactcacccttctcgctggggtccaagccgttgaggctatcgcagctgtcccagcggggcctgtcccagcggggccgagccagagctggaggtggggccggggctggggctggtggtggaggaggagtgctgttctgaaaggaaggagaggagagtacctgggttagggagaggactcagagtcccagcctctcccctttctggagatgcatttctgaacccccagtcaccacctgctccagcactcttgacagctgatccccacgccccttgttcccaggatctggtcccagcctctccaccctcaagatcccagcgtctgcgctggctcaccaggctgcgggcagggctttggctgtggtgcagccggggtccggggtagggtgtcaggatgttgtagggcacatatccctcctgccccgctgggtcccgaaccttccaccacttacgactgtcatccaggacctgggtgtggtaaagaacagagggttcagagcctgtctgcagctagggctggctaattcctgcccctcagcctcccgctcctctaacctccagtacgtcccgctgcttgaccgacagctcactgctgttgcgggcctggaagtcataattacacaggacccattttcctgctgtctctgactccagctgaggctcagattctggctccaagtctcggtgactgaggagaagcgggagggttggagataaggaggcagccagccccattgctctgggctgcagggtgctggtgtgagctggggttagagccaagctgggggcacagcaggggccgggttaatactgttaatagaaatttgaaacaagaataacagactgaatatatttgctccctccgttgcttggcattgtgctgtaggcatatgtagtgggtactatcccaccatcgattccattttacagaggagaatgaggctcagagcgagaaaatgacttgcccacatcacacagctagaaacagctgtcatttattgagcatctaataggcactgggctttatatatcataactcataagcataa

SEQ ID NO: 37917 - DNA, 797 bp, Artificial sequence
  DNA replication origin
ggccccgctgggacagctgcgatagcctcaacggcttggaccccagcgagaagggtgagtggtggggacgccggctgcggggagcggtccttatccttgctttccaggcagagaaacgggggctcagaaagagcaaagggactcccgtcccattctggggacgctggagcgcccccccgccccgccctctggccccaggacccctcgccctgagcccgcactccctacctcccggtttcccgcctgcagagaaattctcccagatgctcatcgtcaacgaggaactgcaggcgcgcctggcccagggccgctcgggaccgagccgcgcagtcccagggccccgcgccccggaaccgcagctcagcccgggctcggacgcctccgaggtccgcgcctggctgcaggccaagggctttagctccgggtgagtggggccggggccctctcggcgcgggttgatacggacgctgggagcggagcgttccgatcggccgggagtcggggggcggcagtcgtggagaccacagggagccgggattagcccgaagtgagggtctgtctggtagcaacacccaatggcaggctgtgattgccatgttttttcagactccgactggattccttagggaaatcccgtaccctttgaaagcaggatgcggccacgccccccgggtggcaacattgtgattggtgggtggggttcaggaggtgtcgggcctgcccccgctagagctagaatgctgttctgattggaccatcgccgggtgggcgtgacatgattgtccgggctggggcat

SEQ ID NO: 37918 - DNA, 1853 bp, Artificial sequence
  DNA replication origin
ggagcaaagaggtttgggggaattgcctacctttcctattcccctactaagaatgaggggtggggccccgggcaagtggtagaggggctgagagtattctgggcagaagcaaccacatgaaccaagcttggcagcaggaggagggaagctgagccccgtggtcggagaagctggtgagccgagtgggcaacctgtgactgccaagctggggcctggttttatccggtgagccatagggagccaagggaagtatgtgaataggatctagggacggggcagataggagaaggactcttggagatccaaagaggaaggaaggaaccagaaggaaccaggcaggaggtggcaaagtggggactgagaactcctgcctgccccaagggcggggggcggggtgggggtgggggggcgtctctctgatcctttcccatcttggagggcgccatctggtggcccaggttggaacaactccgggagaggcttgaggcccagaggcccagaggccctcagtaatctggggaaggcagagccaggggagaaagagaaagggccattcttcccaaaggcagagaatatccagtctggaaaacagtgggatccagagaaaagcagaccttaccagccacctggataatggggaaaagaaagttacagggcttgccagagggagaaggagctagttcttgagggattaggaagttttcagttggctgccatctcccagaacaaagagtggccagaaagctgtggcatgcttgggaggcagccagttctacctggtagggccgtggcaggaggtgggggacaaaatggagaagtggatgctgggaaactagcttcggggatgagggcaggcttccccacagtgagtgtttgagctgggccagggaggctgaacaggagttcgccaggcagggaatggccgtttcagccagcagagacagcaggtgcaaacctcagaggttgaacgcttgggagcgtttggagaagggcagggccaggacgcaggaaggaatgaagtgagaacgttggtgaggcgggaagggagacacaaagcctcatgcccagcagccgcgagccagggaaacgtgaaggtggggcaagctggactaggctggctaggaggtcaggagggagcctggtttgggaccctggggatggaaaggagggttcagagagaaaccaaagagggtggaacattttccaggttccatgaggctgtgactgggtcgaggggcaggtttctgagccccctggtagccgggtagaggacagcagttggcacaccatctgctaagcacggaggctgtttataggctgggccgcatattacaatgctcagggctccactgcaccctctcgggggtctgctagcgctttccgtagactgtctccacgccctccccactcccagccagtccagatcctctccggagggactgcagcaaggatcgttaagtctgtccaccgggatgggggaagaccagggccggagcagattggccatccttcagaagatcgacttccgctattggggagagtctgaggagtccgttctcccacggggcctcgtcactctttgcgaagggcgcctggcaggtcaaatgacctccatttccacctcgccttccaccttcttcttttgcttctccatcactgcctccagctctgacactttctctttgtcctggagggcggggtggaaatcgctttgtcctggcgtccgagccctcgtcatcccaaccctacccagacccagggaccagcggtccggctcacctccagcagcgagcgctgcacggtgacctggctgtacacacgtgccccctcctcggggctcaccgcccgcagct

SEQ ID NO: 37919 - DNA, 788 bp, Artificial sequence
  DNA replication origin
gctagagaggtcacggtggctgtgtggagacttggccctgggaagggcttgagctgtgagattggagctctgggtgtcttttggagcatggccatggcctgacttaggttttaacaggtccctctggcatggagaacaggctgggggttggtggtgaggattggggggaccagctaagggtctactggtgaaatccaagcaagagagagggtggctctggctggggtgatgggagtgaagatggtgagagatggtcaggttctgagaatattggaagatacagctgccaggatgttcaaacaagctggcctgtgacgggggtagggctgaggcccggctggctcacttgggtctcttgtcgggttcctgcaggcatttcagtttgcagcctaggtggcgagagccacgggggcttattggggggcggggggcgggtgcgggaatggagcaaagaggtttgggggaattgcctacctttcctattcccctactaagaatgaggggtggggccccgggcaagtggtagaggggctgagagtattctgggcagaagcaaccacatgaaccaagcttggcagcaggaggagggaagctgagccccgtggtcggagaagctggtgagccgagtgggcaacctgtgactgccaagctggggcctggttttatccggtgagccatagggagccaagggaagtatgtgaataggatctagggacggggcagataggagaaggactcttggagatccaaagaggaaggaaggaaccagaaggaaccaggcaggaggt

SEQ ID NO: 37920 - DNA, 1177 bp, Artificial sequence
  DNA replication origin
gtaatcccagcactttgggaggccgaggcgggcagatcatttgaggtcaggagttcgagaccagcctggccaacatggtgaaaccccttctttactaaaaatgcaaaaattagcaggcgtggtggtaggtgcctgtaatcgcatctactctacttgggaggctgaggcaggagaatcgcttgaacctgggaggcagaggttgcagtgagccaagatcgagtcactgcactccagcctgggcagcagagcgagactccatctcaaaaacaaacaaacaaacaaaaaacaaaaagaattttgccttcttttgaaagaacaggaatctgtgacaatatgaacttttcagtcctgcatagccaccgttgactagagctgagtaggagccatcttctgagatgaggcattcattcaacaattagtataacaccaacaggaagaacaggactgagtgagtacagtgtgactgatcattactgaacaaaacaaagatccaatacttttaggaggggggcatccgatgttaaaataaatgtatttcaaggtggcggcgctctggagaaaagaaaggggttgggaaggtgggtgcacgtgtgtgcacatgtgttttgaatagagtggtctaggcaggcctcagggaaaagctggtgcaggcagatggttgaaggtggtggagagggagctgtgtaggtatttgagggaagggtgctctggatgatgggagctctgtgtgtggagaccctggggagggagctgtgtaggtatttgagggatgatgggagctgtgtgtgtggaggccctggggtagggcacctggtgtgctgcaggaagctgaggagctggagaaagcagggaatgaagctagagaggtcacggtggctgtgtggagacttggccctgggaagggcttgagctgtgagattggagctctgggtgtcttttggagcatggccatggcctgacttaggttttaacaggtccctctggcatggagaacaggctgggggttggtggtgaggattggggggaccagctaagggtctactggtgaaatccaagcaagagagagggtggctctggctggggtgatgggagtgaagatggtgagagatggtcaggttctgagaatattggaagatacagctgccaggatgttcaaacaagctggcctgtgacgggg

SEQ ID NO: 37921 - DNA, 890 bp, Artificial sequence
  DNA replication origin
gaccaagggagccacattgcccttcccagctggcccctggccttcccctgccctcctcagcctcactcagtttctgcactttccctgttcattccaggagcgcagggccctggaacgcaaggccgcagagctggaggaggagctgaaggtgggggctgtgggggctgtgggcagagggccgagggtgggtgggggtgcaacccgccagggctgcccagctgacccttgccgtcccccaggccctgtctgacctccgcgctgacaaccagcgcctcaaggatgagaatgcagcgttgatccgcgtcatcagcaaactctccaagtgacccggagggactttcccgcacccgtatttatacagctgcttctgccacacgcaccccttcccccgtgtgaacacgagtgacagggctccgggggaagtctcagagaagccatagcccccctgggacctccggactgggaggggagcagagtccccaggagccgagggggccacccgaggccaggatggaggtgggaggccgagccaagcagggggacgttgccagaggggaccagggccagagacgggaccaggaaggaactgaggaccaagaagtgcaaggatcagtagccaggaccagagtggccgcctggaggtccccatctcacgtgtgatgccaccccgtcacccctcccctcctgagcagggatccaagaatgtgccaagagtcccgccagcctcagccaggtgggcctgtatatagggtccatgtgcaatagggagggacgtcttctattttttgctgccccctccccgcccactgtctggggcagggggagaaggtattttcgagataaagcacaggcaccacaaataaaagtcgtgaagttgccactcaagctct

SEQ ID NO: 37922 - DNA, 1236 bp, Artificial sequence
  DNA replication origin
tccaggtaggggcggggtgggagaggtggggtctgcgtgcgggccgggccggcccctgacgcgcgctcctcccctgccccagcaccctggagggcggcccctcggcccgcaggcagcggtggcagcgggacctcaacccagaacctgagccagaatcggaagagccagacggaggctttaggacggtgcgatcccacccctccgtcggggctttgcctgctgggtgcccagcttcctggcttccccgcccccccagcatcgccccatcctccacctgaccctcctctacctgacccccagctgtatgcagagctgcgcagggagaacgagcggcttcgcgaggccctgaccgagaccacgctgcggctggcgcagctcaaggtggagctggagcgggccacgcaggtaagggcgccgaggccagggtcacgggaactggcagggccgcctgggtggggcttagactgctgggaggtagagcctggcctgggggtgccggcggggctgggcttcacttgaggggcggggccgagatctcggaggcggagtctgagcgaggggatggggctgtgggcctgccggtggcggggcctggcccgtgggggaagggcttgtgggctgcctagtgggcgggcgggtgcccagcaggagcctaggacccttcagagcagtgctggcttcttctgctgacccctgtgctttctgtgtcctcaccagaggcaagaacgcttcgctgagaggccagccctcctggaactggagagattcgtgagtaggggcagtggggatgggggccagaggcgtccccagcctcacatccctaagtttggaccaagggagccacattgcccttcccagctggcccctggccttcccctgccctcctcagcctcactcagtttctgcactttccctgttcattccaggagcgcagggccctggaacgcaaggccgcagagctggaggaggagctgaaggtgggggctgtgggggctgtgggcagagggccgagggtgggtgggggtgcaacccgccagggctgcccagctgacccttgccgtcccccaggccctgtctgacctccgcgctgacaaccagcgcctcaaggatgagaatgcagcgttgatccgcgtcatcagcaaactctccaagtgacccggagggactttcccgcacccgtatttatacagctgcttctgccacacgcaccccttcccccgtgtgaacacgagtgac

SEQ ID NO: 37923 - DNA, 953 bp, Artificial sequence
  DNA replication origin
ctgggtctgagggaggaggggctggaggtctggactcctgggtctgagggaggaggggctggggcctggactcctgggtctgagggaggaggggctggggtctgggctcctgggtctgagggaggaggggctggggcctgggctcctgggtctgagggaggaggggctggggtctgggctcctgggtctgagggaggaggggctggggcctgggctcctgggtctgagggaggaggggctggggtctgggctcctgggtctgagggaggaggggctggaggtctggactcctgggtctgagggaggaggggctggggcctgggctcctgggtctgagggaggaggggctggaggtctggactcctgggtctgagggaggaggggctggggcctggactcctgggtctgagggaggaggggctggaggtctggactcctgggtctgagggaggaggggctggggcctggactcctgggtctgagggaggaggggctggaggtctggactcctgggtctgagggaggaggggctggggtctgggctcctgggtctgagggaggaggggctggggcctgggctcctgggtctgagggaggaggggctgggccctgaccccagcgtcccctgactgtcccctttccctgccagggtgtgactcttacagacctgaaggaggcagagaaggctgcagggaaggccccagagtcagagaagccggcgcagagcctggtgagaggggtcagcgagggcgagtggggtggtgcgggatgtcctgcttccctgactcgcctccccctcccgacaggacccttcccgaaggccccgcgtccctggagtggagaactctgacagccctgcccagagaggtgaggtctgctctcggggaggtcattcccagggaatcatccagtttctcccatagtcttcttgctttcctgggggcttgacccgg

SEQ ID NO: 37924 - DNA, 936 bp, Artificial sequence
  DNA replication origin
cgaggtgcacactgaccaccctgctgccaccacggcgccgtccgcacacgcacaccctcccgctctcagttctcgcactgctgcttctgtccagagtcctttatccttctgaccggttgcgtagtgtgctggtcttttcatggcttttgtgggttttgtgtatttctgctcagctctgactctgttgtggcccagataatttgtttctttcactcacggctgcatctccagtgccggcacacaatgcacctgggtaatgtttgtggaatgaatgaattgatgcaggtctgaggtcaccaagcctcctccttgcttggagaactcctcgcctccctccaggattccggagcctgaatccccagcgaagccaaacgtccccacagcctccacggcgcccccagcggactcccgggaccgacggaggtgaagaggccagggcaggaagctgccgcccccgcccccagcagggagagacgatgtgaagcaggagtcccggggctttgggtgggctcctgagggagagctggcctcaggtctgctgggagttggagtcccctcccacagaacttgcttcccgcggagggtgtcagccacggaatgggacagggtccccaggttccctgtctgaggttgggacccttccctcaggtcctaccagatgcctgtgcgggatgaggagtcggaatcccagagaaaagctcgctcccgtctcatgcgccagtctcggaggtccacacaggtgtggggtgggctggggtctggactcctgggtctgagggaggaggggctggggcctggactcctgggtctgagggaggaggggctgggggcctggattcctgggtctgagggaggaggggctggggcctggactcctgggtctgagggaggaggggctggaggtctggactcctgggtctgagggaggaggggctg

SEQ ID NO: 37925 - DNA, 1118 bp, Artificial sequence
  DNA replication origin
ccctcctccctcagacccaggagtccaggccccagcccctcctccctcagacccaggagtccagaccccagcccaccccacacctgtgtggacctccgagactggcgcatgagacgggagcgagcttttctctgggattccgactcctcatcccgcacaggcatctggtaggacctgagggaagggtcccaacctcagacagggaacctggggaccctgtcccattccgtggctgacaccctccgcgggaagcaagttctgtgggaggggactccaactcccagcagacctgaggccagctctccctcaggagcccacccaaagccccgggactcctgcttcacatcgtctctccctgctgggggcgggggcggcagcttcctgccctggcctcttcacctccgtcggtcccgggagtccgctgggggcgccgtggaggctgtggggacgtttggcttcgctggggattcaggctccggaatcctggagggaggcgaggagttctccaagcaaggaggaggcttggtgacctcagacctgcatcaattcattcattccacaaacattacccaggtgcattgtgtgccggcactggagatgcagccgtgagtgaaagaaacaaattatctgggccacaacagagtcagagctgagcagaaatacacaaaacccacaaaagccatgaaaagaccagcacactacgcaaccggtcagaaggataaaggactctggacagaagcagcagtgcgagaactgagagcgggagggtgtgcgtgtgcggacggcgccgtggtggcagcagggtggtcagtgtgcacctcggggtggggggaagataggggagaaggtgacgtttcaacacagacctgagggagggagagagcccccaagaggaacacagcacaggctctggagtggcggcaggaaccagaccccagggggtacatggtctcactcaggatcacacggacaggcttggaacccacatctgccacccacccctgaggggcccaggccctggggactcacaggacagagggctccggcagcttcggggagggggtcggggtaattctggcaagacggagctccttggcctgtgtggagaggagaagggg

SEQ ID NO: 37926 - DNA, 997 bp, Artificial sequence
  DNA replication origin
ttctcatgggtgggggccgtgaggacaagacggcagtgcctgcacgtggcagctgcgggcgcctgctggacgcagggcacctcctgcccctgaggtgtgtggccatctgtaggaaaaccagtaagcccacgagccctcggtgcccgcctgggcagtgagctcctgcacagctgtttgtggtggtgttgctgtggggcacgtgtgctccacccctcccctgcagcccccttccctccttgcagcttcggaaccaaaaagaagcttcccagagccggggccaggagccccaagcgccctctagcagcaaacacagaaggtatagggagggaggagtccagggctggcggggtggctggaggccccgggcttgtaccccagcaccctctccttccccaacaggagctctgtgtgtcgtctgagcagtcgcgagaagatttccctccaggacttgtccaaggagcgccggcctggtggggctggggggccccccatccaggacgaggatgagggggaagaaggtcccaccggtgaggggcctgaatctggactcctgggtccgagggaggaggggtcgggttctctgaatctagaggcaactggcatcttctgtgacctgcccggtgttcccacatcacagaaccaccccctgcagaacccagaaccctcaatggcgtctcctccccgccgcaccccagccctaagagtcccgtggtgagtggatgccctgagaggtcctgtgaggctgggagggcccggaggtgggattccatacagcctgtgaacctctggcaggggcagatagggggaagactatagttcccagagtcgtcctggacaaccggcttcctttttaggctgtgcctgccccgggggctgatgggaattgtagtttgttgcagtcctttgggggctaacccttgaggtctgagaagagggatcctttctctctaactgagacctcctccttctcccagcagcttgaagaggcccccttctc

SEQ ID NO: 37927 - DNA, 2182 bp, Artificial sequence
  DNA replication origin
ggaagtactgagcctgttggaggaactggcccggaaacaggaggacgtgagtgtcagggctgaggggcttaccccagactccccatgtcccctcagctcctcagaggagggtgcagagggggaacccccccgacttctgacacccaccaccccagcgacctgctatttccctcttggtgacccagccccagccccagcctcaggagagacccccagccggggcaggacagagatggggctgcagagcttcctgcctgcctggtggtgggggcggcagaaggatttggacagggttgtctgacaccctgatgaggttgcttagcacacctcatcacctcagggtggcccttggcagcagccatgtgcaggattgtcctagactcaggctgggctggtcacccacaaggtgtcccccagccatccccggggcagccttgctgggaaaacttagagtgaaggagtgaagggcgtgagccttggccagactgcctgggttggaatcccggctctgccatggatctgccgtgagtctcagccagccactttcctttccgggcctcagtttccttatctgtcaaatgggaatggtatggtgcgcaactgtatgaggggtcatgcgtgacacgtggattgtgctgtcaggagctcgggggagtacgtgcccctggaaagcactagagccatgccagcgttcagtgagctctgtgaggtgacaggaagctcccaaggccaggcctagggcttctggtgcgtgggcaggggagcggagacagcttcctcttttgaaaggttggcaggagcgaagtggaggctgatggatgtaggagaagatctcacacaggctggggggcaagtgtgggtgccctgaggtgcccagggaggggagcgtaaggcagggcagacccgggagggccacgagtgccaggcgaggagcatggtggcttccatcctgagggtgatacggccatgaggggtttaataggtggggcagggtcagctcagggggcccagatatggggggagaccagcctgggagcatctggggacactttctggaagacgtgagtactacagcactaagagtttgctagaagggcaggaatgaagggccctcccagtacaaaggtgtgaagacggtggtgaactgcgcggggaaggggcgaagacggtggtgaactgcggggaaggggtgaagacggtggtgaactgcgcggggaaggggcgaagacggtggtgaactgcgcggggaaggggtgaagacggtggtgaactgcgtggggaaggggcgaagacggtggtgaactgcgaactgtgcggggtaggggtgaagacggtggtgaactgcgcggggaaggtgtgaagacggtggtgaactgcgcggagaaggggcgaagacggtggtgaactgcggggaaggggtgaagacggtggtgaactgcagggaaggggtgaagacggtgaactgcggggaaggggcgaagacggtggtgaactgcagggaaggggtgaagacggtggtgaactgcgtggggaaggggtgaagacggtggtgaactgcgaactgcgcggggtaggggtgaagacggtggtgaactgcgcggggaaggtgtgaagacggtggtgaactgcgcggagaaggggtgaagacggtggtgaactgcagggaaggggtgaagacggtggtgaactgcgtggggaaggggtgaagacggtggtgaactgcgaactgcgcggggtaggggtgaagacggtggtgaactgcggggaaggggtgaagacggtggtgaactgcgcggagaaggggcgaagacggtggtgaactgcgcggggaaggggcgaagacggtggtgaactgcgcggggaaggggcgaagacagtggtgaactgcagggaaggggcgaagacggtggtgaactgcggggaaggggcgaagacggtggtgaactgcggggaaggggcgaagacggtggtgaactgcgcggggaaggggcgaagacggtggtgaactgcgcggggaaggggtgaagacggtggtgaactgcgcggggaaggggcgaagacggtggtgaactgcggggaaggtgtgaagacggtggtgaactgcgcggggaaggaggaggcgagtgccggctgcaggagccggggcagctgagggcccaccagtgccctgggtatgctgagg

SEQ ID NO: 37928 - DNA, 870 bp, Artificial sequence
  DNA replication origin
tgtttatttgatgatactcattcgatgcttatttttgagcccctgctgtgtgccaggcagtctgttaggtgccagggaaatgggtaaacaagacagatctgggcctgtgtgcggctcatagcctcgtggggagacagacattttgggctgatcgctcttgctgcggggccgtcccatgcatcacaggatgtggggcagcctccctggcctccacctatgggatgttgggagcatccctggttgtgagaaccaaaaatgtctctggacgtggccaaatgtcccctggggggcagcattgccccagttgagaactgctggcttaagatataaatagggttatgggagaagacaagtgtgatgaggaggggctttggggtcaggagacagggggatgagggggtggtgactgccaaaaaggggctcagcgtgagatgctgcagggcacagaacactgcccggctgagagcagcaagtgcagaggccagcggcgagcggacgcttggggaaatagcgagggcccagcacagctggggcagggtgagctccgggcaaagcgtgggaaaggtgaagggcaaggtgggcgggaccagagagagggacttgtgcttataaggcctctttgtagaatatcccaggctgtccatctgttcccactttgtgaagctctttctcattgacacagaaactcattccagttctccaaaaatagacacgtcctaccgttaagctgagcttggagagtggccttggacttgtaaccctgcctttgccctcagattgaatggtttaaggtggttattgttttctcgcagaacactgtctcgggtgagggtttctcagcctgggcgctggcagcatgttgggtcaggt

SEQ ID NO: 37929 - DNA, 1116 bp, Artificial sequence
  DNA replication origin
tggccaagaagcaggggagctgggtttgggtcaggtctgggtgtggggtgaccagcttatgctgtttgcccaggacagcctagttttagcactgaaaccctcagtcctaggaaaacagggatggttggtcactgtctctgggtgactcttgattcccggccagtttctccacctggggctgtgtttctcgtcctgcatccttctccaggcaggtccccaagcatcgcccccctgctgtggctgttcccaagttcttagggtaccccacgtgggtttatcaaccacttggtgaggctggtaccctgcccccattcctgcaccccaattgccttagtggctagggggttgggggctagagtaggaggggctggagccaggattcttagggctgaacagagaagagctgggggcctgggctcctgggtttgagagaggaggggctggggcctggactcctgggtccgagggaggaggggctggggcctggactcctgggtctgagggtggagggactgggggcctggactcctgggtccgagggaggaggggctggggcctggactcgtgggtctgagggaggaggggctgggggcctggacttctgggtcttagggaggcggggctgggcctggacccctgggtctgaatggggagaggctgggggcctggactccttcatctgagggcggaagggctggggcctggcctcctgggttgaatggggaggggttgggcctggactctggagtccctggtgcccaggcctcaggcatctttcacagggatgcctgtactgggcaggtccttgaaagggaaaggcccattgctctccttgcccccctcccctatcgccatgacaactgggtggaaataaacgagccgagttcatcccgttcccagggcacgtgcggccccttcacagcccgagtttccatgacctcatgctcttggccctcgtagctccctcccgcctcctccagatgggcagctttggagaggtgagggacttggggggtaatttatcccgtggatctaggagtttagcttcactccttcctcagctccagttcaggtcccggagcccacccagtgtccacaaggcctggggcaagtccc

SEQ ID NO: 37930 - DNA, 1118 bp, Artificial sequence
  DNA replication origin
gccacagcaggggggcgatgcttggggacctgcctggagaaggatgcaggacgagaaacacagccccaggtggagaaactggccgggaatcaagagtcacccagagacagtgaccaaccatccctgttttcctaggactgagggtttcagtgctaaaactaggctgtcctgggcaaacagcataagctggtcaccccacacccagacctgacccaaacccagctcccctgcttcttggccacgtaacctgagaagggaatccctcctctctgaaccccagcccaccccaatgctccaggcctcctgggataccccgaagagtgagtttgccaagcagtcaccccacagttggaggagaatccacccaaaaggcagcctggtagacagggctggggtggcctctcgtggggtccaggccaagtaggtggcctggggcctctgggggatgcaggggaagggggatgcaggggaacggggatgcaggggaacggggctcagtctgaagagcagagccaggaacccctgtagggaaggggcaggagagccaggggcatgagatggtggacgaggaagggggacagggaagcctgagcgcctctcctgggcttgccaaggactcaaacccagaagcccagagcagggccttagggaagcgggaccctgctctgggcggaggaatatgtcccagatagcactggggactctttaaggaaagaaggatggagaaagagaaagggagtagaggcggccacgacctggtgaacacctaggacgcaccattctcacaaagggagttttccacacggacacccccctcctcaccacagccctgccaggacggggctggctactggccttatctcacaggtaaaactgacgcacggaggaacaatataaattggggactagaaaggtgaagagccaaagttagaactcaggaccaacttattctgattttgtttttccaaactgcttctcctcttgggaagtgtaaggaagctgcagcaccaggatcagtgaaacgcaccagacggccgcgtcagagcagctcaggttctgggagagggtagcgcagggtggccactgagaaccgggcaggtcacgcatcccccccttcc

SEQ ID NO: 37931 - DNA, 1771 bp, Artificial sequence
  DNA replication origin
ttgggaagtgtaaggaagctgcagcaccaggatcagtgaaacgcaccagacggccgcgtcagagcagctcaggttctgggagagggtagcgcagggtggccactgagaaccgggcaggtcacgcatcccccccttccctcccaccccctgccaagctctccctcccaggatcctctctggctccatcgtaagcaaaccttagaggttctggcaaggagagagatggctccaggaaatgggggtgtgtcaccagataaggaatctgcctaacaggaggtgggggttagacccaatatcaggagactaggaaggaggaggcctaaggatggggcttttctgtcaccaatcctgtccctagtggccccactgtggggtggaggggacagataaaagtacccagaaccagagccacattaaccggccctgggaatataaggtggtcccagctcggggacacaggatccctggaggcagcaaacatgctgtcctgaagtggacataggggcccgggttggaggaagaagactagctgagctctcggacccctggaagatgccatgacagggggctggaagagctagcacagactagagaggtaaggggggtaggggagctgcccaaatgaaaggagtgagaggtgacccgaatccacaggagaacggggtgtccaggcaaagaaagcaagaggatggagaggtggctaaagccagggagacggggtactttggggttgtccagaaaaacggtgatgatgcaggcctacaagaaggggaggcgggacgcaagggagacatccgtcggagaaggccatcctaagaaacgagagatggcacaggccccagaaggagaaggaaaagggaacccagcgagtgaagacggcatggggttgggtgagggaggagagatgcccggagaggacccagacacggggaggatccgctcagaggacatcacgtggtgcagcgccgagaaggaagtgctccggaaagagcatccttgggcagcaacacagcagagagcaaggggaagagggagtggaggaagacggaacctgaaggaggcggcagggaaggatctgggccagccgtagaggtgacccaggccacaagctgcagacagaaagcggcacaggcccaggggagagaatgcaggtcagagaaagcaggacctgcctgggaaggggaaacagtgggccagaggcggcgcagaagccagtagagctcaaagtggtccggactcaggagagagacggcagcgttagagggcagagttccggcggcacagcaagggcactcgggggcgagaggagggcagcgcaaagtgacaatggccagggccaggcagatagaccagactgagctatgggagctggctcaggttcaggagagggcagggcagggaaggagacaaagtccaggaccggctggaggggctcaacatcggaagaggggaagtcgagggagggatggtaaggaggactgcatgggtcagcacaggctgccaaagccagggccagttaaagcgactccaatgcggaagagagtaggtcgaaggggaatggtaaggaggcctggggcagagtggtcagcacagagtggctaagcccagggccagttgaagcggctccaattcggaagtggggtggtcgaaggggaatggtaagggggactgggacggggtgtcagcatagggtggcaaagcccagggccaggaacgacggggcggatcgagactggcaacggggaaggaggatgccccaggtggcgcagca

SEQ ID NO: 37932 - DNA, 983 bp, Artificial sequence
  DNA replication origin
cgcgggcgggcggcggcgcggcggggtcgagctcggcgccggggccagggtcggcggcgcgcagcatcagacgcgcctcgtccaggtcgccgcccgcacaggccgccaggaactcggcggcgcgctcgaagcggacggtgcgggcgcggcgctctccggggccaggctcggcgcccgcccgcgccccccactgccgcagctgctcccgtcgccgctcccgggcagccgccgccgccgcccccgggccagccgccgggccatcctctccggacatcgcaccgcccgcccgcccagcgagcgagcgagcgccgagccccaaccgccgccaccacccgcccgcccgcccgccccgggggccgccgggaactgccgctggccccccaccgccccaaggatctcccggtccccgcccggcgtgctgacgtcacggcgctgccccagggtgtgctgggcaggtcgcggggagcgctgggaaatggagtccattagcagaagtggcccttggccacttccaggagtcgctgtgccccgatgcacactgggaagtccgcagctccgaggcgcccagtggaaatcgccagatgagggcctcctccggggaatgctgggaaatggagtctacaggccggaggggtgccccacggcatactaggaagtgtgtagcaccgggtaaaggggatgaatagcagactgccccggggcagttaggaattcgactggacagccgcgtgggagggagtgcggggagaggcagagttgttttgttattgttgttttattttgttttctttgttttgagacggagtctcgctctgtcgccacgctggagttcagtggcgcgatatcggctcgctgcaacctccgcttcccaggttcaagcaattctggctcagtccccagagtagctgggataacaggcgcgcgccaccccgccctgctaatttttatatttttagtagagacgggatttcaccatgttggcc

SEQ ID NO: 37933 - DNA, 1096 bp, Artificial sequence
  DNA replication origin
gagcaagcctccgtctcaaaaacaacaacaacaacaaaaaaaaacaaaactactgacaagttgctctacttaacccaaagaaagtgaaggagaaagcggctgcctcaccgcctagacattgagtcgccggatgtttcaatgcctcatgatacaataaaaccacaaaaattttcgtaacagcagcagcaacaacaacaacaaaagagaaagagagagggaaagaaacaggcctcgtgggatgcgcagtttacgtctccgcgcaaacccaaggacttcagagtgggtgggaaactcccacagcgcttgggaaacagtctgtagtctctgtcccgattttggcccttttctgtatgatttttatgggactcttcctgtcacaaagtgccagccaccttcccaatcttgagttgggcgcgggatccgtaaggtgaagatcaaggtgtgctcatcgcttgggcccgctgaaaggtgattcgccccccacctgctggaactccttgcccgggaccaccaatcccagcatgccttgagagcgcgcgagggcctgggcggttcccaggaggtccgggtgggcgcaggagaagcgcgggccagtgaaagctctgagagccctgtccctgtggacactgtgtcttgggttcctttactcggtgtggctcagggattaccattagggagtggagtgtggatttctcttgccccgagccctaaatgccttggggccctgccttgcaccccactgtgcttttaggggtgtggccctgtgggctacatttcccagcgtgccctaggatcgtggtcctgaccttttcaccgcaaatttcatttcccagcatgccctgcgaggtcacccagggaagcttggaagtggactgtctttcatggcttctaggttgcggactcagtttcccatggtgccctggtgaacccattcattcattcattccaaaaatatttgcgatcaggttctctcaggttctgttctaagaaccgaggacaagtagtgcacagaagacaaaagatcccgctctcgtggagcttatttctagttaaggggtcaggaaaaaaaccaaaataaataaaacccagctgggca

SEQ ID NO: 37934 - DNA, 1177 bp, Artificial sequence
  DNA replication origin
atcccgggctgcaggcattccttggcccagtggccagatttctggcacttgaagcaagatcctgatggaggaggtcctgtaggaatgctagaccactgcggcgtaggcattttgaagttcttgtgtgctggagatgtggctggggtttctctcacaatggaggcaaggaattgcaactcagaaatatgttgctatgcagctgcctctactctattaatgtacaccttgaaggcgaggttaattaagtcctgttgtgggggttttggagctttatttaatgtcaggagcagattgggtaataaaatgcatattgagaataagaggccttctgacccttcagggtctagggctgtaaagggcctcaggggtgctgccaaacgagccatgaactgggcggggtttttatatttgatgaaaaagagcctaaacactaactgatctgggagaggtcggataaaggaaaaggagcattaaccttgactatgcctttggctccagccacctctttcagaggaaattgctgggcaggtgggggagggctagctgcagaagaaaactgtaagctggatcgggtgtggggagaggaggtgatggaaggattatagggcgggggagaggaggctgaggaagaattggagcctgattcagcctggtggggagcgacctgaggaggagcagcctggggaagaggggagaggtcagatgggtcggtagaaaaggaagattgaaaagactcagtgacgcttggggttgagactgaggggacaggcaggagggaaagaaggaggatttgggacaagtcgcattaggaacagagactagggagggaccaatgtgtaaaagaatgcctggatatcaggtacctcagacctttggcccattttacgacaagaattatctagatcttgtaggatggaaaaatcaaaattgccgttttctggctatttagaaccattgtcgagtttgtattggggttaagcagcattgcagaagaaaataaggtgtttaggttttaggtcaggtgtgagttgaagaggttttaagttcttgagaacacaggctaagggagaaggagggtcggacggtggaaggttgcctatagtgaaggaggcaagcccagagaaaagagagagtagagacatggagagaaggggtggggggtgcttgccccccagga

SEQ ID NO: 37935 - DNA, 823 bp, Artificial sequence
  DNA replication origin
ccaccagcagtgtgtgaaggttcagcctgccgtactttaatgattattggtgacactctttcaagtaacttgttggtaataagaagtcaattaaccaggagagaccagctgcatctcaaccataataacatcagagaacccagcgggtgtctgaggggagcgtttatttcaagctaccgatgggacaaacactcccaggcttcccaggtgccactgtccggggcggcatcctcacttccagcggcctccaacgcggcccttccctgcccccttccggctgtagaagaatgaggtggtatcaggaaaaaggggcccctccagtctctgaaatgggccccaggccctcaattcaggaagcccattccccaaaatattagccctccctgcccagaggaagcagtgagcaaaacaactgtcacctcttttgggttctatgactggggggcagcggctggtggtcaaagcctcgctgacatgtgggagctgatatttgggggcgagtgcagggtgttcatgggggagctgatgaatgtttatgagtcaggggccagggtggggggaggaagggttggatgatctgggcatgggtgggtaacacgcaggaagggctggggtgaaagagacaggaaatgggagaagaggagaagggagagggagaggagggaggaaggaagagggagtggagaaacagagagattcagggaagaccctctcggctgggcgcggtggctcacgcctgtaatcccagcactttaggaggccaaggcgggtggatcacgaggtcaggagttcgagaccagcctgaccaacatggtgaaacccc

SEQ ID NO: 37936 - DNA, 916 bp, Artificial sequence
  DNA replication origin
ctcgctgacatgtgggagctgatatttgggggcgagtgcagggtgttcatgggggagctgatgaatgtttatgagtcaggggccagggtggggggaggaagggttggatgatctgggcatgggtgggtaacacgcaggaagggctggggtgaaagagacaggaaatgggagaagaggagaagggagagggagaggagggaggaaggaagagggagtggagaaacagagagattcagggaagaccctctcggctgggcgcggtggctcacgcctgtaatcccagcactttaggaggccaaggcgggtggatcacgaggtcaggagttcgagaccagcctgaccaacatggtgaaaccccgtctctactaaaaatacaaaaattagccacgcttggtggcgcgcacctgtaatcccagctactcagggggctgaggcaggagaatcgcttgaacccgggagatggaagttgcagtgagctgagatcactccactgcactccagcctgggtgacagagcgagacgcagtctcaataaaaaaaaaaaaaaagaaagaaaaagaaaaaggaactgagacccaggattccgagagcagagagaggaggacagagaaggaaggacaaagagaaaggggcagaaactcaggcagtgggggatggagcccacagagggagggaaagaggcctgagagtcagcgggagggtagggacaagagcaagggcttgagacggtcacactcacaacttctgggcgtggctgatgcggttgtacagcacgttgatctgcggaggcagaagacagatgctgggacagccggtggggacgtggggacgggccacccacccctgcctggagtttgctggtccctcccagcccagccctgccctctctccctccctccctgcggagctgggtctca

SEQ ID NO: 37937 - DNA, 1774 bp, Artificial sequence
  DNA replication origin
gaattgcttaaacccgggaggcggaggttgcagtgagccaagatcgcaccactgcactccagcctgagcaacagagcgagagtccgtctcaaaaaaaaaaaaaaacagaggggaagggacttgtaggtggtcacacggggagacgtggcagggccgggagtgggtacccctgcgtttctgctggttctgatgtcccagcagcctctgcggcactgggtctgctgatccctgtgccccagttccacatcccagggccctcctccctcagtcctacaggggagtccatgaggttaaccccttacttcccacaggaggagaagatgaggaaggaagaggaagaggccaagaagcgggcagaggatgatgccaagaaaaagaaggtgctgtccaacatgggggcccattttggcggctacctggtcaaggtgagtcagcctgcaggagcctgaggtctgagttctgagggggcaggggctgggggccagacctctggttcctaacggaggaggggctgaggcctggattcctgggtctgagggaggaggggctgggccctgaactcctgggtctgagggaggaggagctggggtctggacgcctgggtctgagggaggaggggctggggtcctggactcctgggctgagggaggaggggctgagggcctggacgcctgggtctgagggaggaggggctgggggccagacttctggttcctaatgcgagagggtctggggcttggactcagtctgagaggaggggctgggggcctggactcctgggtctgagggaggaggggctgggggcctgcactcctgggtctgagggaggaggggctcggggcctgcaatcctgggtctgagggaggaggggctggggtctggactcctgggctgagggaggaggggctgggggccagacttctggttcctaatgcgagagggtctggggcttggactcagtctaagagaagggactgggggtctggactcctcctgaatctgagggaggagggagtggggctggactcctaggtctgaaggagatgggcctggggtgcagacctgtggtcccaacatggaaatggtctgtgggatccgacgtgtgggtcccgacacggcagtgctctgtgggatgtggcccccagtttactgttccgcctcccccaccctcaggcagaacagaagcgtggtaagcggcagacggggcgggagatgaaggtgcgcatcctctccgagcgtaagaagcctctggacattgactacatgggggaggaacagctccggtaggtgctgtggggggctcggggtgtaggggcctgggtgtgagacagggggataaaggagctcacacccagatctgggtgggcagatactccgggtctcagctccagtgctatgtgactttgggcaagtggcttcccctctctgggcctctgctgccttctttgtgaaacatgtcactgaacccacttttcgtggctgccgtggcctgtagcatctgacaggtgttaccaaggaagccagacaagatgacttccctcccccaagtttaggagattttgttaactccgtgatgtgccttggagctcaggatgggctgtgccttttacctaaattcaagccaggaatgcgggtgagaattttccagctgagtccctcgcatctatagccaagacagcctgcctctcatgataagctacaggacggcaggctggtgggggcttgccttcaggagcccgcctgtttctccatgttctctggcctgggctgtggc

SEQ ID NO: 37938 - DNA, 1478 bp, Artificial sequence
  DNA replication origin
gtccagaaagagacctagatagaaagagggaacagagagaagaaaacaggaaacattccttatagcccatgtgtcattagtaggtcctccaaggacctactgtgtgccgggcatggggacgtcaaagcacagggagctataagggaggtagttggagcaccacgggagcctggggtgtggggtgggagcaggggcggggctcctgggccatgcagatggggttggcatggggttggggaggggcccacggaggcttctggactctgagtgtggagccaggggcagcagggctgtctctgaactcccaggcttgtgtttgagcaaaggaattctctccccctccctctcccctcggggcgggcccgagcctccagctataaactccccggagcttcagtgccctcagcaaggctcagcctcaagattcacagcatctcagacacagcctaggtaaggggctctgcggagccctgtggtcttcaaaaaccatgtccttgggggagggggcaggaggcaggtggggaagatgtcgggtgtggagaaatggtgcagaggtaggtggggcatacaactggaggtctgggaacttgagaggctcagactttagggggactcaggatagaggggaaaatactaggatttgtgggttacacaaatcctaacccggggctgccaggacttggatgtcccagaataaaacctcctaggatcttggggttctgggaatctgggggaaatctcagcagtcagggatatctggacttggaggtcaaacaatctgggtgtcaggatttggggcctcagactctgagggtatcaggaattgggggggtctcagaagaaattggggttttggtagtggagggctcggaatctgagacattatgatagaaagcatgaaaacttagagtgccattatctggggtatcatgaactgggcctccgagtttgggtatcaagattttgggggtctcatattcttgaggtttcagattttaggaggtctcaagacctgggggtggtcttaggatgtcccggcccatatctggactatcaagaactgggatttcagaatccagagctgtgaggacttgctggcctcagaaacacgggcatcataaatcggggtctcagaatctgtgggtattgggatttggggctaggcaccctgtggcctagggtgtctcaaagactttgaggtctaagaatgtaggggtcagggtgaggtctacggacagaaggtgccctttatgcccctgccccctacgtgatgtatgggaaggtgaaaggggagacaggtggggaggaaaccagccagtggggtggggcgagtgggagaggggatgcgggtgactaattctcccagaagccccccttcctcaaatcccttcttaggaaatgtcctcggtttcaccatctatgacatccccccaaaatagctcctgggggtggggcagctattgtcttcaggccactgt

SEQ ID NO: 37939 - DNA, 1304 bp, Artificial sequence
  DNA replication origin
gagggagaaggggctcggggcctggactcctgggtctgagggaggagaaggggctgggggcctggactcctgggtctgagggaggagttgggggcctggactcctgggtttgagggaggagaaggggctgggggcctggactcctgggtctgagggaggaggggctgagggcctcgattccagggtctgagggaggaggggctggggactggactcctgggtctgagggaggaggggctggggactggactcctgggtctgagggaggaggggctggggcctggacttcagggtctgagggaggaggggctggggactggactcctgggtctgagggaggaggggctggggcctggactccagggtctgagggaggaggggctggggcctggactccagggtctgagggaggaggagctggggcctggactccagggtctgagggaggaggggctggggcctggactccagggtctgagggaggagaggctggggcctggactccagggtctcagggaggagaggctggggcctggactccagggtctgagggaggaggggctggggcctggactccagggtctgagggaggaggggctggggactggactcctgggtctgagggaggaggggctggggcctggacttcagggtctgagggaggaggggctggggcctggacttcagggtctgagggaggaggggctggggcctggacttcagggtctgagggaggaggggctgagggcctcgattccagggtctgagggaggaggggctggggactggactcctgggtctgagggaggaggggctggggcctggactccagggtctgagggaggaggggctgggggcctggactccagggtctgagggaggaggggctggggcctggactccagggtctgagggaggaggggctggggcctggactccagggtctgagggaggaggggctggggcctggacttcagggtctcagggaggaggggctggggactggactcctgggtctgagggaggaggggctggggcctggactccagggtctgagggaggaggggctggggcttgggcttctgtctgggataggagggccacatggtcctgaaggagtaggttggagccaagactccacagacctgcacacaaagggtgttaggggccaggagtcccacgaaccatatataattgggtaaggacagccatattggacgcctgggtcccgagcagaagaggggatagaggctgtactgctgaattccgggactagaaacctcgcatccttgggagccggtacc

SEQ ID NO: 37940 - DNA, 1089 bp, Artificial sequence
  DNA replication origin
aagagaggaagtgggtttgcgagtcagactcctggaacccaaggaaggggaagcgcggtcccccgacctcttgttcagaggggactccaggggtcccttaggagacaggacacagcccaccactaacccccctccttggtttctctccttccaggagcagcgatgcggtgagagcagcgggctaaggcgtggctgggacccccagggccagggtgggcgctgcagtgaggggtctggggcgggaggctgcagccctagcagagggtgcggtacggtaagggctgggtggggtcttggtggtgatggggtccccactcctcctaacccaggctagggaacctcgccctgcaccagccccaatcagacgccgctcctccaactaccgcgcttatgccacggagccgcacgccaaggtgggacggggcttcctgggggcagagtacaggcgccggagggatccaagaccctgggagtggggggaggagccagggctgcgaagggggcggggactacgcggaggggcttcaggggcggagttttgcagagggtcatgctcggattggtgacagcagcctgcgggcggaactccgttgccctcggacttgcttagggatagatgggaagtgcctatccaaaggaagagacccagattggtggatgggaatgaggggcgtggcctcccgtagactcagggctcaagttggacgtgggcccaaatctggaccggctgggtttgctgggggtgtcttgaggtcccctccaccgtcgtctccgaatccccctccatgatccttccttgctccatctcaccctggcagaaaaaatctaagatctccgcctcgagaaaattgcagctgaaggtgaggacgggcgggactgggaaagagcaggcaggtgctcagggggcggagcttgagaatgggtggggctttcggggtaggtgggcggaagtgggcggggtttggccgctcggggcgtggctttagcggggagtactgctcggggtgggacggggccttggaacagtggagaccaaactggagggtttagaagggcagaggcggttccccacgcctggtctttatcctg

SEQ ID NO: 37941 - DNA, 1090 bp, Artificial sequence
  DNA replication origin
tcctcaccagggcctggtcagcacccagatggttcaagtaaagcaagttgtgtccacccttctgtgtgtccaagcgtctttcctgtcctatgtccgtctccagggctgggagagaaaggcccaggagtgctggacagaggaagccagaaaccagattcctgggtttccaagtggacgagggatggatttcccagtgctattgactgagagctagccccgagcacagctgcatcctcaaattaatcaacaacatttattgagtggcctggactcctgggtctgaggggagagggattggggtcctggactcctcggtctgaggggagagggattggggtcctggactcctggtctgagggaggaggagctgagggtgcagactcttgagtctgagagaggaagtgtgctgggggcctgcctggactcccttgtctgagggaggggctgggggcctggacccctgggtctgagggaggaggggctgggggcctggactcctgggtctgagggaggaggggctggggcctggactcttgggtctgagggaggaggggctggggcctggactcttgggtctgagggaagaggagctgggggcctggactcttgggtctgagggaggaggggctgggggcctggactcttgggtctgagggaagaggagctgggggcccagacacttgagtctgagggaaaagggggctgggggcctggactccttgtgtgagggagtggccagggtctcccagggtcctgggactgagggaggaggaggttgggaggtcgggcattctctgggtctgagggaggaggggtctaggactccaggatcagagggaggagggtccggattcctgtgcccggaggtggctggtgatccagctggagcagggcccaccccgcccctcacgcgcccccgttatctggcatagtgggcagggggaggaggaggtgacagtatatttagtctgtgtcctcgccctttatctcagtgtcctcggggagtctcaagcagcccggaggagactgacggtccctgggaccctgaaggtcacccgggcggccccctcactgaccctccaaacgcccc

SEQ ID NO: 37942 - DNA, 1061 bp, Artificial sequence
  DNA replication origin
ggagttccgggttccacagctgggacagtgttgcccagagctgattcctgggacttgcagaaacgtgcgaaggtctctgaaggcctggccccggtctgtggagcaaatccagctgcctgagctagctccctgacccgggtgttgaatccctgcagctgctcctgccgcacgtccaccaggtacctgcagatgggaagcgccctgtcagggacccagattttgatccccagccaggatgttccccaccctccaccccactgactcaccgggctaattccacaatcaagttccctccgggtgccacacaggccccaagctcagggatgagaagatggaccatactgcagagaggacggaggacaggctgagattcagctccaaatccggagggaggatggggctctgggatcccagacaatgagggaggaggggtggcaaaactggagtctgggtcctggggaaagaagggagcaggaggtctggactcctgggtctgagggaggaggggctgggggcctggacccctgggtctaagcaaggaggggctgggggcctggactcctgggtctgagggaggaggggctgggggcctgatcctgggtctttgtgagcacagctgcctccccgcttacccacaggccacatagaggagctggaatcggccgttgtagcagctcttgtggtggagagtctgagcagaattgagcggcaggaagtggacggtgaaagattccggggtcggggctgctgggggaaggggatagaggggtcacctctgacaggcggagccataagggcggaaaaccagagagatacacagagctgggcagagctgggcaggcacacaggacttggagataacactttttgtcctcttgcagctttttaaaaaatcctctaaggtaggctcctggaaagttctgggaaggtcagcctggcaggcagagactcactgtacagatcaggcaactgagactctagagagggaaagagggtgggtggccagggccacatgtgacatgccctgtcagacagacacgcagggagggccaggttggagg

SEQ ID NO: 37943 - DNA, 918 bp, Artificial sequence
  DNA replication origin
ggccgcgggaataatggaagcgcacagtccaaaggacgtgcgttgatggagcaggcggcgggctagggggttcgaatcccagttccccgactcccactgtgggatttggcctgggggcaggaggtggcttctgctttcggagcctcagtttttccatccgagaaacgggggaatcgttcccctgttctgggatggaagagagggtcaattagaatccgctctccctgcatccctctctgccttcctctgtcccaccgcgtgcctggccccgcagttccgcgagcgggatgccctggaggccgtattccgcttctgggctggcggcgagaaagggccccaggcgttccccatgagccgcctctgggactcgcgcctgcgccactacctgggctcccgctacgacgcccggcgcggtgtcagcgactgggacctgcgcatgaagctgcatgaccgcggggtgaggggcccaggagaggggctgggggcctggacccctgggtctgagggaggaggggctgggggcctcctgagtctgagggaggagggtttgggggcctgaactcctgggtctgagggaggagggcctggggacctggactcctgggtctgagggaggctggtgtaggggtctctccacgctcggttcactgagggctcccttcttcccgccccccaccccaggctcaagtcattcacccccaggagttccgacgctggcgggacacaggcgtcgcctttgaactcagggactccagcgcctatcatgtgcccaaccggaccctggcgtccggtcgcctcctgagctacgtgcgtgtccactgcctgtcctggcccactgctgctgctcggagtcctaggagtcaggggccccaacatcgacctcacctgcctcctctctccctccttttccagcgtggg

SEQ ID NO: 37944 - DNA, 1143 bp, Artificial sequence
  DNA replication origin
aacgcctggggccctttctcgccgccagcccagaagcggaatacggcctccagggcatcccgctcgcggaactgcggggccaggcacgcggtgggacagaggaaggcagagagggatgcagggagagcggattctaattgaccctctcttccatcccagaacaggggaacgattcccccgtttctcggatggaaaaactgaggctccgaaagcagaagccacctcctgcccccaggccaaatcccacagtgggagtcggggaactgggattcgaaccccctagcccgccgcctgctccatcaacgcacgtcctttggactgtgcgcttccattattcccgcggccacccgatcccagatggaggccgggcggcggcaccttgagggcgcggaggctgagccagggcagctgttcctccaggcggtcgggctcggggaccaggtgcgccagcaggtcggcctgggcacgcacgaaggcggccactggcgggcgcagcagcgcgttcccccacacttccaggaaggtctcgcttcgctctacggagagagggagataattgcgggaatgtgtggaggagggagcccagaaattacacccttaatatgttattatgtcatagtcatctaatgaaaacaatgaacccccgcaaactccccacgcatcccaaaaactacatgaagaacagggccggacatggtggcgggcgcctgtaatcccagttactcgggaggctgaggcaggagaatcgcttgaacccggaggcggaggttgcaatgggccgagatcatgccattgcactccagcctgggcaacagagtgagactccgcctctaaaataaataaataaataaccacctagaagagggaattagagttgcagattccacactcaccgcagacagagaatatttgggggaaaagataacaacacaacagtaaaaaataatacaaattgtaaaatatggtgtaagcatttacattgtattacatattataggtaatctagagatgatttgcggtgtatgggaccatgtgtacaggctatttgtaagtacatcttttttgttttgagacagtgtctcactctgttgcccaggctgaatgcagttgtgccatcatagttcactgttacctcgaccacct

SEQ ID NO: 37945 - DNA, 1509 bp, Artificial sequence
  DNA replication origin
aaaagtttgtagagggcgggcctcgctcactctcattggtcagttgctcgctgtggtcccatcccacatgcttccattgcttgattcctcgaaaagggcggggactctgggcagcggttgtggagtgccgcgggtccacagtgctgcactgagcagagaggaaggggcgtcccgggatatttggaggataaaggtgtgggcaaggtatcatgtggaggcaaaggggcgagaagtgaggggcggtgagaggggagcggggcgggcaatgtgtgcgattcccagaatgtcttttccgcagggtgatgaccacacctgccggctccggcagcggcttcggctccgtgtcctggtggggcctgtccccggcgctggacctgcaggctgaaagtgagtcccagcacgcaaggtctgatacaccgtctgccttcccagcctgagcagacggccttttagagctcgtagtcccagcgtcggtggcaaggggggcgctaacgttctccaacgctccagcggcagagggcgcgctcccaggggcagccccgaggtcctgtctgcggactgcgaatcccagaatactcagaggaaacacctccccttagaacctaggccacgggcggaacgcctactgggatttgtagtccattttttataggggatgctacggtggacgctctgccaaccaccatggtgccccagccagctgtcatcttgccaggtcctcctgtggacccagactcccaggccgatacagtgcacagcaaccccgagctagatgtgctgcttctgggctctgtggatggacggcacctgctgcggaccctgtcccgagcgaagttctggcctcgcaggaggttcaacgtgagctgggatgaagatgagagcccagattcccgagtccttgagggaggaagggattgaaattctaaaacctcaggtccaggaatgaaggggctggagactcctagatctgagggaggcagaagctgggagcgaaccgatgcgtcttgggggaaggaaggggctggggtttggaactcctgggttctatagtggggaagagctcgaggatgaggtcttctgagtaatggaagggaagagagctctggggacacagacttctgtgtttgaaggaagaggctggtgtacagaactcgggtgtgtggaaggagagagctgagggcctgctctcctgggtctcctaggacccaggcaaacaggtctcagaattattctgccctgtccatccttctagttctttgtgctggagaataatctggaagctgtggcccgacacatgctgatcttcagcctagccctggaggaaccggagaagatggggctgcaaggtctgttgctaggacccaggcattctgaccgctggtctcctccccctccctagagggattctggcatttcaatggtacaattaaaaagtttggttattttcctgggaggcggaggttacagtgagccgagatcgcgccattgcactccagcctaggcaacaag

SEQ ID NO: 37946 - DNA, 1210 bp, Artificial sequence
  DNA replication origin
gtgtggtggcgggcgcctgtagtcccagctgctcgggaggctgaggcaggagaatggcgtgaacccgggaggaggagcttgcagtgagccgaaatcgtgccactgcactccagcctgggcgacaaagtgagacttcatctcaaaaaaacaaaaacaaaaacaaaaaaacaaacaaacaaaaaaaaaacaagagaaaaagaaagaaaaggaaagacagaaagaaaacaaaaaggaaaaaagaaaagaaaaaagaaagaggtgaagttgaaatcattggctttccttgctgaactccaacctctctcgcaggctctggagattgtattccctggctccgcgcctctcctttgttttgatggcagtaagtcgcttggggggtcaggtctgtgtttggatattctggggccccagcactcaacagaagacctcagggaatatggaatggaaggaagaaaaaaaagagagggagggagggatgcagaaatgggtatgaaaatcgatgtgagtcatgggtgagcaagcgagtggataaattcatggacaagcaagggagttctcgcggactcctcacagccagcgtgtggcaggaattattattatcccaacattctccagaggaggaaacccaggctcagagtggtgagtgaggaatgaacgggtgagagtgtgagggagtccatggggtcaggccagtctctcagaggctttcaggacgaacagcactcacaccgccctgcgagcgcccattcctggaaacgaggtttcctcttgggtcccagcccttgcccacccccatcaaggagcatgggcccaggccaccggagctgctgaatatttatttggccccaggagcagtgcagggatgggctgtgttggaagagagaggagagcagacgaggatggctgattgtcaaagcagggggcaggacccgggggcaggagaaaccaggctgccttcccttcccggggtccctggggcatctgggtgtgtccgcgagggtcgggggagtgtgctggaaagttgtcgtgattggcatcgttgggggtgagaagacaggaatggttcagatggttggggtggaaggtggggggagggtaaccgtcagaggaagcttaagggtggggctggcttggctttggccggtctcgggagtctggggtcaggggctagagtccaggcttggccgggggcttggggtgggagtcaggg

SEQ ID NO: 37947 - DNA, 1559 bp, Artificial sequence
  DNA replication origin
tctctgacttcctgctctctactgcggattctctgtgcactccaggtcccctacgtggagctggggggcagggtgctggtcatggcggtgtacgacttcgaccgcttctctcgcaatgacgccatcggggaggtgcgggtccctatgagctccgtggacctggggcggccagtgcaggcctggcgggagctgcaggcggctccgcgggaggaggtgagcatgcgcggtcgcgccccgagccacgcccccaggcccagtcccgcccacaacatcctgagccaatcagatcataggctttccagaccctcagggcggcgtggattgtacccctgaggaggcatggatgtggagccggggctctggtgatgggcccctctcctttcagcaggagaagcttggggacatctgcttctccctccgctatgtccccacggccgggaagctcaccgtcatcgtcctggaggctaaaaacctgaagaagatggacgtaggaggactgtcaggtgtgtgggaagcaagggagtggggtgtgtggggatggcgtggggtgggttctcgttctgacagtttctgagcctcgagggtttcttcggggacagggaggacctggctgctgtggaaggcatggattttggcatagagctagggagacccgaagggtgtaggcagtgtttctatgttggtccaacaacccagcagtggggagctataagactcctccttcctctccccagatccatacgtcaaggtccacctgctgcagggcggcaaaaaggtgcggaagaagaaaaccaccatcaagaagaacactctgaacccctattacaacgaagctttcagcttcgaggtgccctgtgaccaagtccaggtgagctcaaacctgcccttctccaagagcccagacctttagtaatcgccattgctaggcggagggagactttttagcatctccctagaaaccaggtgagggggtctgaggttatgctctcagtctgtttcctcctatgaggaccaggaagcctcttccactccaggaagagactccttaaaattgggtgtgggtgtcctatctgctctaagcgggaccgggatgtcccacccctaagcagtaccagatgctccaccctaagcaggatcagtatgccccgccccaccaagcggaaccaggatgctccgcccccaagcaggaccaggatgccccgcccccaagcaggaccaggatgccccgcccccaagcgggaccaggatgccccactcctaagcgggaccagattccccaccctaagcaggaccaggatgccccgccctcctcaggaacgtggttctaagaaaaagagacctcccctcacttctttagggacggcgcctaccctagcccggcccctgttaaagttctgcagctttgcggctcttaggaggctgctcccccaggaggcgccgaacacacccgctccgcaaccgagtcctgagggttcatttccttagaaacctggctgcgcaggaagaaaggcgccagagcctcctcctcgccgcaggctccgtccctctcgtctcccacc

SEQ ID NO: 37948 - DNA, 1976 bp, Artificial sequence
  DNA replication origin
tggggaggcagacacagggaagacgcctatgtggggtcaagaggcagcgtggagaccgaggcggtcacgagagcagcacggatgcgtggagagaccaacaggccaagaaggatgagggggctcagcacaggcaccgggcagcccccgacccgccctccagcaaaattggggagagggaagagggaacctgcgtctcagctcccaggaccaggtgcggagggagcagtcggctgtgggcgctcggaccacaggctgcccgctccccacctcgcgggacctcaggatcccagtcgggctattggggggttcccaggcaccggtgggccccggagcgagcctgccccgccgggactccgcgtctgtgcgtcagccccgcccgttgtcctggcaacaacccgttgcccgggcaaccagctttgctctcaccccgcttgagaggagcccggctgttgctctgggcaacgcggtctgctggttcccacgtctgccttcgcccgcttccggttcagaccctgcggaggggcgaggacgaggcagaagtcagcgggatgcctgtggggccgtggaggaagagggtatccctttaggatggaactaggtcctggacaccccctctcaagtgcggggaggctgatactacaactcccagcatgactcgcggtggctgtccggtttctgcgcggctgttcgcgcaaaggcctcatgggagttggagttctttgttgtgcgtggggctcaaaggacgtctggggtgggaatgggggactagggtgcttgagtgtctctgcagaaaagactccaggaccccgccaccatgttcccggagcccccaaccccggggcctccatcgcccgacacgcctcccgactccagtcgcatcagccacggcccaggtgagcaagacccgggggtggggggccgagcagagagaaagcctggccaggattccgaggggcgggattcggacgggtgtactcgggcaggcgggctggaaaatccggctgggatcccgggtcgtcatcctggactggaatgcgaacgaaatggggtaaaaggaaggaacagatttgcaaaaaaaaaaaaaaaaaaaaaaaaaaaaaaatcgaaaccggatcaaggggtgttgcatggaatgggatcttagaattggaaggtccacctagctcttcttttacagataaggaaacaggcccgatgaggagcagggcttcttgtaaaagcatcaggagttgagcagaaatggggggcggggtcgggtaaggaaaggcagaactaacaagcaagcaaatccagatggtgtcagcctgggttggggcatcgaatctctctataggccacattaggtggaagaaaaacacaggaagaaatgcaatgaaaatggctggagggaaaaggaggccagcattccagcttccacgtgtaatcaggactgaatcagcctgcgtgctgcccaggcctcaatgtgtgttgtctccacccctctgcagtgcccccctgggccctggccaccatcgtgctggtctcaggcctcctcatcttcagctgctgtttctgtctctaccggaagagctgtcggaggcggacaggcaagaagagccaggcccaagcccaggtccaccttcaggaagtgaaggggctgggccagagttacatagacaaggtgtggcccagcccagcccctccacctggccccttcccgcaccctgctcctctcaatggcccagctggtcccagtccctgctcccttctgtcctataggaacccaccttactggctcatcctccctgtgtgtctagccctcaactggactctggggacccagagatggaacagaactagttgctattcccaagaacttcccagtctggtgggagagtcaggcactgacacagacactcaccacacagggtaatatgtgccatactacagggtctcataggagcacagaaaaggcatcccactgtatagaaacctac

SEQ ID NO: 37949 - DNA, 918 bp, Artificial sequence
  DNA replication origin
ggactgagtatcctggcatgccgttctttgggctatacagggtgtgtgtcgtgtgtgttggggcgggaggagtggagtggtctggacggccaacgactggaccagaaggcagaaaatgctaaagcaccaggataaacatctgtgggcgtcatcgaggttcccgggtggaggcgggaggaggggcggggcagggctttccgcctacccgagaccaaatacgggcacacacaatacacaccacacacgcgcgcacacgcacacgggcacacacgcgcgcacgggatcctgctccgctccgcggctcccccgccccggagagctccgcgatcagcacccgggacagcgccaccgcccacgtgcagggggtggggtccgggcggggctggcgcctcggcgtctcccgggagtgtcccgtccagccgccgagcaggtaggagctgctgggacccccgccctcagcccatccgcatccgcatccctagaggaaaggggtgtgcgagtgggggctggggcactggggagacaaccagagggagggcagcagcctgaagcggagagacagggatctggggacgcgagacaggtatggagaagacaaagagccgagggcggggagtggggcgcaggcggaggggagagggagagaccctggagacagaggccaggcgatagggaagagagacaggcgggttggggaggcagacacagggaagacgcctatgtggggtcaagaggcagcgtggagaccgaggcggtcacgagagcagcacggatgcgtggagagaccaacaggccaagaaggatgagggggctcagcacaggcaccgggcagcccccgacccgccctccagcaaaattggggagagggaagagggaacctgcgtctcagctcccaggaccaggtgcggagggagcagt

SEQ ID NO: 37950 - DNA, 933 bp, Artificial sequence
  DNA replication origin
atccttcttggcctgttggtctctccacgcatccgtgctgctctcgtgaccgcctcggtctccacgctgcctcttgaccccacataggcgtcttccctgtgtctgcctccccaacccgcctgtctctcttccctatcgcctggcctctgtctccagggtctctccctctcccctccgcctgcgccccactccccgccctcggctctttgtcttctccatacctgtctcgcgtccccagatccctgtctctccgcttcaggctgctgccctccctctggttgtctccccagtgccccagcccccactcgcacacccctttcctctagggatgcggatgcggatgggctgagggcgggggtcccagcagctcctacctgctcggcggctggacgggacactcccgggagacgccgaggcgccagccccgcccggaccccaccccctgcacgtgggcggtggcgctgtcccgggtgctgatcgcggagctctccggggcgggggagccgcggagcggagcaggatcccgtgcgcgcgtgtgtgcccgtgtgcgtgtgcgcgcgtgtgtggtgtgtattgtgtgtgcccgtatttggtctcgggtaggcggaaagccctgccccgcccctcctcccgcctccacccgggaacctcgatgacgcccacagatgtttatcctggtgctttagcattttctgccttctggtccagtcgttggccgtccagaccactccactcctcccgccccaacacacacgacacacaccctgtatagcccaaagaacggcatgccaggatactcagtcctaggacctaggagaccccagacccccattggagacccagactctgcagggttcagcatcaaagtccccagctatcagcccccagacatcgccctctaagttcccctaacaccagtcccaggaggcggcc

SEQ ID NO: 37951 - DNA, 2252 bp, Artificial sequence
  DNA replication origin
gaccccacggggaccccccagaggctcacggcagttgcggtcccacctcttcgagtgggcagtgagttcaggcaggggtcactcaccaggcgccctggcccctgtccagctgcacaggccctggagggaacccagagaaaacggagtcagcctctcaaccactcctccgcccagtgaggccgaggggctgggaggagcggctggtccccgccccatgagtcacccttgcatgggaaggaggggccggtgttaggctgggctgtcacgacctcgaccgtctttcctgggtcgaggagagaagggggagcatggcaggagcagagcttagggagctggggttggctccacccgataaggctgagagataaaattaatgatttcatttcctgaaatatatgtccttggaaaaccgagggcagagagcaatgaacagactgggaagggagaaaaaaaccaaggttggggatcaggaaccttggcctgagggtggagggcctgggggcctgggggcctgggtctgagggaggaggggctgggggtctcgacctctggtttgagggaggagaggttgggggcctggactcctgagtctgagggaggaggggctggggtctggactcctgggtctgagggaggaggggctgggggtctcgacctctggtttgagggaggagaggttgggggcctggactcctgagtctgagggaggaggggctgggggtctggattcctgggtctgagggaggaggggctgggggtctcgacctctggtttgagggaggagaggttgggggcctggactcctgagtctgagggaggaggggctggggtctggactcctgggtctgagggagtaggggctgggggtctggattcctgggtctgagggaggaggggctgggggtctggactcctgggtctgagggaggaggggctgggggtctcgacctctggtttgagggaggagaggttgggggcctggactcctgagtctgagggaggaggggctggggtctggactcctgggtctgagggaggagggcctgggggcctgggggcctgggtctgagggaggaggggctgggggtctcgacctctggtttgagggaggagaggttgggggcctggactcctgagtctgagggaggaggggctggggtctggactcctgggtctgagggaggaggggctgggggtctggattcctgggtctgagggaggaggggctgggggtctggactcctgggtctgagggaggaggggctgggggtctcgacctctggtttgagggaggagaggttgggggcctggactcctgagtctgagggaggaggggctggggtctggactcctgggtctgagggaggaggggctgggggtctggactcctgggcctgaaggaggagggactgggggtctggacccctgagtctgagggaagaggggctgggggtctggactcctgagtctgagggaggaggggttgggggcctggactcttggtttgagggaggaagggctgggggcctggactcccgggtctgagggaggaggggctggggtctggactcctgggtctgagggaggaggggctgggggcctggactcctgagtctgagggaggaggggctggggtctggactcctgggtctgagggaggaggggctgggggtctggactcctgggcctgaaggaggagggactgggggtctggacccctgagtctgagggaagaggggctgggggtctggactcctgagtctgagggaggaggggttgggggcctggactcttggtttgagggaggaagggctgggggcctggactcccgggtctgagggaggaggggctggggtctggactcctgggtctgagggaggaggggctgggggcctggactcctgggtctgagggaggaggggctggggtctggactcttggtttgagggaggaggggctgcttcctgtccgtgagcacagctgtgtgttgcctgaagccagtgtcccccgcagcagacacgacagtgtctaagggcccgggtgaagctggtgtcccccacaacagacacgacaatgtctaagggcccgggtgaagctggtgtcccccgcagcagacacgacagtatctaagagcccaggtgtaagactctcctacagtctctgccaagcctgaagccctcttccttctccaggggatcttcagcacctacttcctcaagatcgaggtgcaggcacccagctccttctccctc

SEQ ID NO: 37952 - DNA, 1350 bp, Artificial sequence
  DNA replication origin
ggtgggaagggaaggtggggagcctggaggacggggaccaggaaggaaagtgaggacaggaatccacagttggagtgaggagaagtggaagctgagggatttccttgaggaagggtcaggcatgaggaggatctgaaggattggactcaggttcgaaacctccacttcctcctcatctcctaccctctccactcagacctggcgaaaggtggggaaagaggaaattgcgcagtgaagtgtagcaggagggacgggggtctgggtgtgcagattccaggggcacgtggggcctgcagacatgaggggttcctggaggtgagggaggaggggctggaacctggactcctgggtctgagggaggaggggctggggccctggacttctgagtctgagggaggagggactggggcctggacccctgagtctgagggaggagctgggggcctggactcctgagtctgagggaggaggggctgggcctggactcctgagtctgagggaggaggggctgggcctggactcctgagtctgagggaggaggggctgggggtctggactcctgggtctgagggaggaggggctgggggtctggactcctgagtctgagggaggaggggctggggacctggacttctgggtctgggggaggaggggctgggggcctgggtctgagggaggaggggctgggggcctggactcctgcgtctgagggaggaggggctggggtctggactcctgagtctgagggaggagggcctgggggcccgaactcctgggtctgggagaggaggggctggactcctgagtctgtgggaggaggggctgggggcctggactcttgagtctgagggaggaggggctgggcccataatccctggtgtttggggaacattctggcttttggtccctgggctctgtggggtcggcagtccagagcgacgggacgctgctctcctgtcggcatccagcagccccagcgtcgtgtccctcctccctgattctggtcccccgacgacctttcatctgacttctcagaggtctgctttctcatgatctgattcgtgtttctctaaagcgggactctcggaggtgctgcgcacatccctctcaggctccttccagccctgccgggacccagacctggggcaaggggcaaaacgccggctccatcttccctcccaagccggggtggctggtggggatgaggcggggtgggactcagcagccttcatcccgatcctgcaggtcagaccaccgtgggtctgattccccatctgggccctccccaggccctcgggaccacgacagaggccacagcagcaggttagtgaccccatcagcctccatcct

SEQ ID NO: 37953 - DNA, 733 bp, Artificial sequence
  DNA replication origin
ccaaggcctggcaaggggctgtgggggataagagatctcagctgcagctcccagcaagctcggagctggccaggctgctctctctgcccagggccgcgggtgggcagggcaaagcggggctcacctgagggctccgtgactttgctgccttctgtggcttcctgaggtgctgaggggggtgtggggtcctgagacctggtaggcgagagaggcagcccaagggggcagctagggttagcactcgagcctatgagaggacggggaccccatggccacctcctggcctcgggataccagcaccatttagcccgttccatccggttctcacctgagctgcagggcgtcacgggcaggagggctggccaggctctgagtggggaggccctggggcacactgaggggcccctgtggggctggaggcccagtgtgcagctcttcctccccggagactcgggggctggtcggggcatctgtaggcactgggtcaaaggtggctgtccagctggggcctgggatagaggtgggggagcgggatggagggtgaactcagtagcaggcagacagccctgtgtacacctgaccacaccgcccattcattcacctggaggctgagggccagggctggggtaggacagaggggtggcccctccacgggctgcacagccaatgccctcctcgtcttcctcctcctcctcgtcctcctcttcttcgtcctcactgtctgtgctgcctc

SEQ ID NO: 37954 - DNA, 1186 bp, Artificial sequence
  DNA replication origin
catgtatgtgtgagcatgtgtgtgtccgttagtgcatgcatgtgtgtgtgtgtgtgtgtgtgtgtgtgtgtgtgtgtgtgtgtatgcaccacatattcttttgtagaaagaccagagagacttgggtggatgccagggtcccaagccccagcttgcatccctccttcccatccccgtctctggatgagcgggggcctggtgaagcatctgctgaggaagggacccctgctgcagtgcagagctccccacatgtgtgcagaccacccctccaggccatcctgtcccgctctcccgcagctgctgcagcagtgccgcctggtggagcggatcctgacgtcctgggaggagaacgaccgtgtacagtgagcacctgctgcccttcatgtctccaggggctggggctgcctggatggggggccgggctggggctgggcatccctgggtccagtcctggcttgcagccgcggccttcactcttgccaggtgtgcgggaggccctcggaaaggctacatgggtcacctgacaagagtggccggtgccctggtgcagaacacggagaaggggcccaatgcagagcagctgcggcagctgctgaagggtgagggtccccaggccggcctgagggctaggtggggggcttgaagccccgagatgcctcacgtcttcacccctctcacctaagcagagctgcccagcgagcagcaggagcagtgggaagccttcgtatcggggcccctggcggagaccaacaagaagaacatggtggacctggtgaggcccagcttctcttcctgcactcctcctgctgcttctctctcttgggccagtcttagcctcccaccgccaccgatagctgcctgcccaccctggtctgggggctccagcaggccctgacgccccctcctctccccaggtgaacacccaccacctacactcctccagtgacgatgaggacgaccggctcaaggagttcaacttccctgaggaggctgtgctgcagcaggtgggcgtggggctatgtggggctgtgctgggctatgctggagtggggtcctgcccaactccctccagccctaacctccgcacccccacaggccttcatggacttccagatgcagcgcatgacctctgccttcattgaccacttcggcttcaatgatgaggagtttggggagcaggaggaga

SEQ ID NO: 37955 - DNA, 1302 bp, Artificial sequence
  DNA replication origin
agtgtggatgggcagctggagctcctggcccagggggccctggaaagcactgtgtccagtgtgggcgccttgcacgccctacgcccgcggctcagctgcttccaccagctcctgctggagcctcccaaggtcaggggtgtgggttctggtcctcggggaggcgggggaagcaggaagggcagcccttgggaatcaggcctccctgtgtctgcagctggagccgctacagatgacatggggcatgctggctccgcctctgggcaacacgcggctgcacgtggtcaagctcctggccagtgccctgagcgccaatgatgcagccctgacgcacgagctcctggcactggacgtgcccaacaccatgctggtgcggggactggaccgggctgggggttcaggggctggggcggggactggactgggctgagggttcgggggctggggtgggggctcggctgggggctcaggggttgggggctcggctggggcggggcctctctggtaccaatcctgtgtcctcccataggacctcttcttccattatgtcttcaacaacttcttgcatgcccaagtagagggatgcgtgagcaccatgctgagcttggggccacctcctgacagcagccctgagacgcccatccaaaaccctgttgtgaaacatgtgagctgggactccctggtccccctccttctgggcccatcccctgtgggcgcaccctctccagaggcctacccctcactccttcctcccacaagtgtttgttgggtagtgttaggtgccagcgcccagatggggtgtgggaggcatggccagggagaaacgcggatgaaacatgcaggtgcagggagcagtgggctcctgacttgagctgaagagctaggggtgggcgggagcagacctgcgagcagctgagtgtgcatgagtgcgcacacgtgcgtgtgtgagcatgtgtcagtgcaagcgtgtgtgagagcatgtatgtgtgtgagtgcacacgagtatgtgaacatgtatgtgtgagcatgtgtgtgtccgttagtgcatgcatgtgtgtgtgtgtgtgtgtgtgtgtgtgtgtgtgtgtgtgtgtatgcaccacatattcttttgtagaaagaccagagagacttgggtggatgccagggtcccaagccccagcttgcatccctccttcccatccccgtctctggatgagcgggggcctggtgaagcatctgctgaggaagggacccctgctgcagtgcagagctccccacatgtgtgcagaccacccctccaggccatcctgtcccgctctcccg

SEQ ID NO: 37956 - DNA, 1384 bp, Artificial sequence
  DNA replication origin
cctcctgatcttcccctttctcttcttagcccccggcaaccaccagactattctgtctctgtggatttgtctttggacatttcatataattggaatcatgtactacgtgatctgtgtgtggtttctttctctagcatgatgtttttgtggctcattcatgtggttgcatgtatcagtttcactccttttcctggctgattagcactctcctgtgtggatagaccagcttgggcatattcactcatcagtcagagccttctgggtcattgtgggcggtgctgccagccctgtatgcggtcatgagggccttgtgtggatgcctcctgtcctggggagccttccgggcttcctgttctctccaccatcttccctccagcagttggtgcctctgtgccctcctccttcgtaacacgtgtccctgtgtctgggtgaccatttttccctggatggtcagctcatgggaggggctcccagcaccaggctgcagagggcccggtggcccgaccaggatcctcacctgtctctccccgttccagcaacattccaacgcatcccagtccctgtgtgacatcatccgcctgagccgggagcagatgatccaagtccaggacagcccagagcctgaccaactgctggccaccctggagaagtgggtgtgcgggcaaggctaaggctggggggagctgacttggggaagccctgggcccctggcccctcaccctgacccctgcccctgcccccgcaggcaggagacgattgagcagctcttaagcaacatgttcgagggggagcagagccagtctgtcatcgtcagtgggatccaggtgctgctgaccctgctggagcccaggaggccgaggtgagggatacgggccacagaccatgcatgctgcccatccccaggggctctccggcccctcagaggcgggtctcggtgtccaccaagagaaatccccgcccgtggcaccttgctctgtggctgcctgtgctccctgcacagtggacagtacggggccgagggaggaatcttcttgtctgctttgacaagtgagggcactgaggctgaggccactgctgcagcttgtgttgggagggaccccaggcccccgtgcccctgccttaccacacaggccgctagcctgttgggtttgccttcccgcctccacccctcacccgtgctctcacagtggactgccaatgctgccgcctggcgggctccccaccccagccaggtgttgtctgaagggcctcagaagagagcggcgctgggggcatgtggctcctcgttttcctccagaccctgcagacgtggtccttgtgcctactcctgtgtgggcgcacaggccatctaggctcactccgccttcgaccctgccctgctgca

SEQ ID NO: 37957 - DNA, 876 bp, Artificial sequence
  DNA replication origin
cctcctgggctccagcagggtcagcagcacctggatcccactgacgatgacagactggctctgctccccctcgaacatgttgcttaagagctgctcaatcgtctcctgcctgcgggggcaggggcaggggtcagggtgaggggccaggggcccagggcttccccaagtcagctccccccagccttagccttgcccgcacacccacttctccagggtggccagcagttggtcaggctctgggctgtcctggacttggatcatctgctcccggctcaggcggatgatgtcacacagggactgggatgcgttggaatgttgctggaacggggagagacaggtgaggatcctggtcgggccaccgggccctctgcagcctggtgctgggagcccctcccatgagctgaccatccagggaaaaatggtcacccagacacagggacacgtgttacgaaggaggagggcacagaggcaccaactgctggagggaagatggtggagagaacaggaagcccggaaggctccccaggacaggaggcatccacacaaggccctcatgaccgcatacagggctggcagcaccgcccacaatgacccagaaggctctgactgatgagtgaatatgcccaagctggtctatccacacaggagagtgctaatcagccaggaaaaggagtgaaactgatacatgcaaccacatgaatgagccacaaaaacatcatgctagagaaagaaaccacacacagatcacgtagtacatgattccaattatatgaaatgtccaaagacaaatccacagagacagaatagtctggtggttgccgggggctaagaagagaaaggggaagatcaggaggagctgctaatgaacacagggca

SEQ ID NO: 37958 - DNA, 857 bp, Artificial sequence
  DNA replication origin
gtccaccacgcccagccccccacccccagaggagccggccctgctcacattgacaacatcctgcctcagctgaggccgctccacacaggtgagcaggcgcagcaggaggtccatgatggccgaggtgccaatgtgctgcagcagcaggtccacgaagtcatccttcttccgaagaaaggacacgagctgggggcacacgggctgcgtcatgcacagggcctggcccagccaccacccctcaacccacggtggcgccagggtgggggccagggcacctggtctgtcttgcggttgatgaggatgcccatgaccttgctgaagaagctggccagcagtgggttgaggctgccggtgctctgcaggaagccgtagagccggttcagaagggactcatcagcacccagggcatcattgatctggggcacatctgaggtcagaatctcgcaggccacactggggtacctgggaggcaagcacaggcgggtgggggctcgggtcggaggccgggggcagggggcggcaaggctccaccctcttctctgcaccgggcactgggtttctgggaactgcagagacccctgtccaggaaggggaaagggcagaggacagggtgacgcagaaacaagggcccacaccaggcctcctccaccctgctaacacccaaccatcccatcctaggctccttaccacccccaagacaagctggtcctgaagctcctgcgcttcccaatcccccagcagctaacactcatcccttttgcctctcagcggcttcacttgcaaccccgtatgctgccccagctccggctgactcctggaaccttgctcaacttccaacctcacctcctgcctccctc

SEQ ID NO: 37959 - DNA, 1389 bp, Artificial sequence
  DNA replication origin
ccctagtcctcctgctgccgccatgactgtcgttggtcacggaactcttccctctgctccaccctcaactgtcattggccaggtgtagggacccatatagtgttatatcaagattgttgccaatctagagttaccgaggcagacgggcagactgggagcaaggtctggactgcaaccttctgtgctgagcccagccttagggtggtcagggtggatgagcaaggagatcctggccccaggctggcctggcttcaagctagccaggaaggagaggaaaggaggcccaagaggcgttcgacctgcctgaggccatgtgtgggactctgtcctgcgttttgtcagcccaggctgctctcctaagctccgatgaagtctcttccctgggcctggtgctccacgtctccctgtctcttccctggggcctggggctgagtcaggcctgggggctggtgggcactgaggtgacaggtcagcagggctcgaggagatggtggaggcctgtgcagagggaatgactgaactggaagaagctgcagaagggcattggaggagagggactagcatctgtgcctgggagtgatggtggtgagggcctgcgggagaggcacccttggcctcttgtgccggctctgctctgttctcagcatcctctgtagtgacttgggggtagcagtggcctctgccttagctggtgatgcggttgtcaggaggcaggtaatgagcgtgagctctggtcagtgtcttaactggtgagagctccgtgaaggctgtctgctgggaccagatggccttcgagattccaggatgccgcctgacttaccgggctttggttgccccttgtcctgtgtggcggagtgatgacagctttcttgggggctgctggtgagcttggacatcatgtgcacagcacacatgcagagccaggaccattgtcatcaagtgcccagagcacaggtcacaggtcaggtctgtagtggaaggtctgtgtggaggctttctagggctctgcggagcagtgatgtagtacagggcaggggctcagaatggagttgcctggcatcttgttaatactctgtgtgtgtttccttattgccagtgagttcccatgcacgagcgtttaggggctggaaccaggctgaggaaccaggcactgtcctccagagggcgggagccagctccagatggggacagggtcagggccgggtgttgccagctttgttcttcccccacagaatctgtctatcccaccctgggttccttcaggtcctggtcagtgactattctgggagcccctcccttccaacttttcctcttccttgttccagcccaggtgctgggtgagaggatggttggggtgtgtttgtgtgtgagtggtgtccaggcaacggc

SEQ ID NO: 37960 - DNA, 971 bp, Artificial sequence
  DNA replication origin
ttattgccagggccaggttccatgctaggtgctgccctcaggtgcccatggtaacctagggggaaggttctagaggaagcattgtagggccacgagtgtgtacctccagtgcttcattgctgtgtcacagagatgcttccaggcggcaggtcagaacgcacagctcagggagacagggagacagtggtggacaaaggcggggctgggggctgcttgagccaggcaggccagggaaggcccttctgtgaggtgaatgcttagtaagagatctgaggatgagaaagtgagttattaggacaaagtcgctggggtagacccaagcttagtgtgttctgaaaacagaaggccagcttggccagggcaagtagggagtgggaggtcattgagggtcccaggcgctgacccgatgagagggcggttctgattttcccttcagcaagctctgcatggctgtggggagagggaacgagcaggggtcgcctgcggtcgagtgtggggggcctgccgtcaagtggtggtcatgcaggcagaaggggtgggatggttatgtttggggaggtcagcggtgcctgggtcggggtgggaggcctgataagtccctagatttctggtggtgctgggttggaggagaactcaggcctctggccgaactgtgctgtcacagctgggctgggagggtcctgaggaccacagccctccatcctgaatccagggatgtctgttgagtaagcactagcagctggggacaaggtggacagggagtttaccatccagacaggtcccttcagggtgggcctggaaatggcaggctcctccctgaggtgagagtcggggtcactgtggccagggctagtccctcaggcagagcaagtgctggagccggctcagcgggaactcgctcattcatcccttaagtgtccactacacaggccctgtgctgggacaagggctctgcaccctgaaaatacaac

SEQ ID NO: 37961 - DNA, 1035 bp, Artificial sequence
  DNA replication origin
cacctcagctccgccgccaccctagtctcagtctcttgctctcggccttttcccactcgctctctgcagctgcgctccccagtccctgagcctcagctccgctctcttgcctctctggccggttccccggccccccaggagtctttctccctggttaccctggactttgcctgcttacacccttccctctcgccccgatctctgccccgccacctcttccgtggcgcagcctccttagatccccggagctcaggactggaggagcggggcttgttttcaccttgaccgaccctctcccgcctccggcttcttgtgcgagggacctgggagcggggcttctctggagcagccaccactcgggcctgcttcagtgagatgaagcctgctgagggcaggcagggagcctggcgctgggcaccgaggagggggcatcagccctaggccctgccctggaggtggggccggtccctggagggggtacaaaggcagagccggacagtcacaattcctgcgtgtcgtgatcgaggtgacttagggagctgcagggggccacagagcgggaggcactggtgagactgactggacggacggctttttctgtctaggaaggatgagtaggaggtgacagatggagagtgggaagaagggccttccggggggggaaggagcagcacgtgcagatatgtcaaggaaggaaggtcggagtcctgagtgcagatgtattgggagggtgaggggcagagtagttccgcccggcgtgcttatccaggcctcgaatgggacctctggttggggtctttcttgctcgctcgtagtacacacagacatgaccatagacacccgcctgaaaggcaagatgtttcaggaaaggaagctgcgtagactgtcaggtgcggtactgggttcacagttgtagagaaactgcagtgggatttcatccagcccaagggcgagggtctaactgttagcgtgcgctgcaaatgcagcaaggactcgagattgcctggataacacaggatgaggacttggtttaca

SEQ ID NO: 37962 - DNA, 910 bp, Artificial sequence
  DNA replication origin
cggaactactctgcccctcaccctcccaatacatctgcactcaggactccgaccttccttccttgacatatctgcacgtgctgctccttccccccccggaaggcccttcttcccactctccatctgtcacctcctactcatccttcctagacagaaaaagccgtccgtccagtcagtctcaccagtgcctcccgctctgtggccccctgcagctccctaagtcacctcgatcacgacacgcaggaattgtgactgtccggctctgcctttgtaccccctccagggaccggccccacctccagggcagggcctagggctgatgccccctcctcggtgcccagcgccaggctccctgcctgccctcagcaggcttcatctcactgaagcaggcccgagtggtggctgctccagagaagccccgctcccaggtccctcgcacaagaagccggaggcgggagagggtcggtcaaggtgaaaacaagccccgctcctccagtcctgagctccggggatctaaggaggctgcgccacggaagaggtggcggggcagagatcggggcgagagggaagggtgtaagcaggcaaagtccagggtaaccagggagaaagactcctggggggccggggaaccggccagagaggcaagagagcggagctgaggctcagggactggggagcgcagctgcagagagcgagtgggaaaaggccgagagcaagagactgagactagggtggcggcggagctgaggtgaagagattaagagactggggagggtcgagggggaagaaacggggtgccgtggagaggaaacccgaaggaaggagggaaaggatccgaagcagaaaagacccgcgggggtcccgagagggaaaagcctgaggggacgcggagaggggaagacgtgggcgc

SEQ ID NO: 37963 - DNA, 1240 bp, Artificial sequence
  DNA replication origin
agcagctggtggccctggtgcggacagagcacagccccttccacgagcacgtgcttggagccctgtgcaggtactttggctccttgagaggacggggcctggggtgggggccccgtcctctcaaggtgggggtggctcaggaatcagcccgtagggactcaggagttgggaccttcccgtagagaggaagggtgtggggccagaaaggagcaggagtcagggagcctcagtttcctcaccagtagggctggcacagaggccttgcaggagggagagaggcttctgtacacgcccccaccagtggattagtgtctaatcagatgatgctggagctctcaacagcacaccagagttgacacgcaccaggccctgtgctgagcccctcagcacccaccctgggccaggggcagcgtgaggtccattccgcagatggggaaatggaggcccattgtggggcagcgacttgccaggctcctgagtgagccaggggacggggcgggcgatagggttgggtcagtgaggcctctagagggaggtcctaagggccgctgtcatgtccctcacagcctggtgacagactttccgcagggtgtgcgcgagtgtcgggagccggaactgggcctggaggagctcctccgccaccgctgtcagctgctgcagcagcatgaggagtaccaggtacatggggaggggacggggtgcaaggaggaccaggtgcaagggggaggggacaagggctccaggaggactaggtgtgtggggaggggatggggttcgaggaggatcaggtgccagggggaggggacaggggctccaggaggaccaggtacacggggaggtgacggggtgcaaggaggactaggtgtgaggggcaggggatggggttcgaggaggatcgtgtgccgggggaggggacagcggctccagaaggaccaggtgagttggggaagggacagggtgtgaggaggaccaggtgtgagggggaggggcctggggggtgaggaattccccaggttagaccaagtgtggtagtggggaccctagtaggggcagagccagccagtccttgcccttgggggctcctgggtccgctggttcaggctttcattcgtgttctcgtgcatttcacttatcttccattcagcagatgtttatttcatgcctagcattcgtcccgtgctgtgtcagagtaggagagacagcaaggagacaggagcttggagattcttaaagtgttgcc

SEQ ID NO: 37964 - DNA, 1141 bp, Artificial sequence
  DNA replication origin
actttaggtcaggagcttgagaccaacctggccaacatggtgaaaccctgtctctactatatatacaaaaattagccgggtgtggtggcaggttactataatcccagctacttggggggctgaggctgaagaatagtttgaacctgcgagcggaggttacagtgagccaagattgctccactgcacactccagcctgggcaacagaacgagagtccatctcaaaatgaaataaataagtaaataaataaaataaaaaaattaaaaaagatgatgcttccatcaatggaggaatggataaaatatggtatatccatacaatggaatgttattcagccatgaaaaagaatgaagtgctgataccacttacgacatgaatgaacctggaaaacatcatgctgagtgaaagcagtcagacacaaaaggtcacgtattttatggacacatttatattaaatgtctgggacaggtaaatccataaaggaagaaagtatatctgtggttgcaggggccagagggaagggaaattgggaatgactgctcataggtttcctttggggggtgatgaaaatttcctagagttagtggtgatggttatacaaccctgtgaatatctttaaaaggctgaactgtgtggattgtgaattatatctcaaaagcatacttcaaaaaaagataatgcttgcatatgcaggcccatggcaagggatgatagtggttggtggtgatgatggtgacgatgattgacgataattatattgttaatggtagtgatgatgatggcggtgatggtgatgtggtggtgatggtgatagtgatggtgatagtgatggtgatgttggtgatgtcatggtgatgatggtggtggtgatggtggtggtggtgatggtgatagtgatggtggtggtggtgaggatggtggtgatggtgatggtggtgaggatgagaatggtgatgatgatgattgtgatggtggtgaagatagtggtgatggtggtgatgatgatgttggtgatggtggttgtgatgatgttggtgatggtgcttgtgatgacagtggtggtggtggtgactgcaagctcaggacctttccccctctcccaggtctggtccgagagcaggaggctgggctgctgcagttcc

SEQ ID NO: 37965 - DNA, 1140 bp, Artificial sequence
  DNA replication origin
gaggctgggtgatgagagggatccacgccgcagctccacttgacagatggagaaactgaggccgagagaggggttgcggggggcataaggctcacaggccagccattacggttgcgaccccagggctcctgtagatggggttggtggccccggtggaggcgaaagtcagattagttggggcgaggtcccaaaccttctaaggatgactgacagcaatgagtgggaggggcctgtaaaggggccggggcccaactgggagagtctgaaaggcctagagcaggggcgggaatcgtagggtgggcggggtcagacctgggggcggggcacacgttagaagaggggtggagcttgcaaaagtatcgggggcgggactcgctgaggtgcgaaaactgggccaggggcagggctttgaccagctacttgagcgtgaaggggcggcgcccgcacgaaggggcgtcccagcttggaggcggggcccggatgggaggggcggggccgagtgcagtatcccgccaggtgagaaggggataagagtcgggcaagcagcttcagccgcaaccacggcacgaagttgggtgggtacgcctggcacttccgggtgaaaccgtgcgtatttccggttaagatggcggcgcccagcagagtcaggtgcggacgactttgtctgtaggagcagcggcggcttgaggacccggggaggtgagatccgccttattccggcgcccctcttcggagaggagggagaagacttgttgctaaggagaccaaagggcgggcttgttgctacggaggcggagcagtgaggttgctaagagacgggacgcacgcagtggagatggggaaggggggttgttgccagggagagtgggtggggcctgttgctagggagaaaggagaggcttatgactttggggaagggtcctgtgggtatgaaggaaggaaaaggggctgtggttaagtgggctgggggcagagtggtttggggtcatggggggtcgccgagctcccctgaaacgccgccttctcagcagaccctcaagaatcgacccatcaggacgccagagctgcttcagcggtgaccaccttctccctctaacacattcttcccttcttcacaaacggcccatgtcagacgaaggc

SEQ ID NO: 37966 - DNA, 868 bp, Artificial sequence
  DNA replication origin
agaaacaccacacacacacacacacacacacacacacacacatacacacacaacctatctgtttggtcttcctgtttctgcccaaaatatccccctgcacaaccacgcccagcaggtgattgatacgtttgtgactgtgtgcccgttttgcgttgagcacaaccttttcctggaggaaaacgcctcctatccaggatcaacacgggagtttctttaagcccagcccagggccaacacctctgcagatcggcccgcaccagcacgtgcccaggcctaaaccccacttctggagcacagaggcctcgggcctccccaccaagctggctcctctggcgctctgaatcttgctgggctctggggcactttgctttccggctctaggcctcaagaatcctctcctctccacctggcaggacatggggaagagtccatgagggagaggctgggtgatgagagggatccacgccgcagctccacttgacagatggagaaactgaggccgagagaggggttgcggggggcataaggctcacaggccagccattacggttgcgaccccagggctcctgtagatggggttggtggccccggtggaggcgaaagtcagattagttggggcgaggtcccaaaccttctaaggatgactgacagcaatgagtgggaggggcctgtaaaggggccggggcccaactgggagagtctgaaaggcctagagcaggggcgggaatcgtagggtgggcggggtcagacctgggggcggggcacacgttagaagaggggtggagcttgcaaaagtatcgggggcgggactcgctgaggtgcgaaaactgggccaggggcagggctttgaccagctacttgagcgtga

SEQ ID NO: 37967 - DNA, 1458 bp, Artificial sequence
  DNA replication origin
gcccgaccggtcccccggccgccccccctgcggccgtcgccccgtctctccggtgggggccggcgaccgctccgtcccggcccccccggctgccccccacctctccgggggtccccagggggctgggctggccccccccagtcggcgggccgcggagctgggggagggggggctggcccgggggggtcaggccccgggagtcagcatggcccaggggggctgcggggccccccctccccagcccgtttctggccggccccccgcttcctgcgcctccccccgccgggggggtctgaggtgcgggccggcggatgctgcaggccgaggtcccccccgcccccccacgcgccctctctcctccgcctcctcctcctctccgcctccccccgccacctcgtcctttctctccggcacgctgacatcaccatccggggactccgggcccttccccaaagttaaccctttcggaggggggagggggagcgagggggggcagggggcgggcctccagctggagggatggagaggaggtgggaggatgcaggagagaggatggagggaaggatggagagagagagagaggacccaacagatggggcagagatggagatacacaaagagagatgctggctgacacagagacgggagacaggcagagacgccagagggatggagaccaccagagacaggctgaggcagagagggaggaagggcagagatggacagggacagaagagaaggaaggaatggcaagccgggaaaacagacagggagagggagagaaagctgctggaagccgacagagggatggagagagtcagagattcagagagacagagagaggaagaccaaccagagaggtgggggagagggggcgcagatggagctgtagagagggccgggggtacacacaggtggagggacacgtgctggggagaggtggggacatatggagggagacagagacagagaggggaaagaattcttggagttgctgacccaaaattcatgtctgtttccccagccccctaaggccacccattcagggtaagggtaagtctgtgtccccaccaatgtcaaggccccatatctacccacagcccagagtgattttggattctctttacagagaagcttccagaaccccctcagtttccctgtgttatgtttttagacccccatatattctctgtgctcgtcatagggtcctttatatcttcatgtggaccccagtacagcccatacatccccactgtagcaggtccacaagcatgtgctctgcctgtgagtaacccgcctgcccccattagctttccgcataaaccatagatccctctatgtcatgtacccgcaagtgttagacacccatttaattctcaagtcccctgtaaagcacacccagggctgggcaaggtggctcatgcctgtaatcccaatactttgggagacagaggtggg

SEQ ID NO: 37968 - DNA, 1388 bp, Artificial sequence
  DNA replication origin
ccagccccctggggacccccggagaggtggggggcagccgggggggccgggacggagcggtcgccggcccccaccggagagacggggcgacggccgcagggggggcggccgggggaccggtcgggccgggaccaagggcaccatgtcgtccggggccaaggagggaggtgggggctctcccgcctaccacctcccccacccccacccccacccaccccagcacgcccaatatgtgggcccctatcggctggagaagacgctgggcaaaggacagacaggtgagcctagcagaaggggacacctggggcggggggcagggtggaggtggcggcagaggcgggactcagggtattcaaatggcaggggctggctgcccagacccctgggcccctcatagagaagggacttgggattcagactcctgggtccctggatggagggggtggggggcgcagactcaggtcctggaggagaggggctgggggcctggactcctgggtctgagggaggaggggctgggcactggactcctaggtctgagggaggagggcctgggggcctggactcctgggtttcagggaggagggcctgggggtctggactcctgggtttcagggaggaggggctgtgcttggactccggagtctgagggaggagaggctggtggcctgcactcctgggtctgaaggagaagggcttgggggcctggactccagggtctgagggaggaggggctgggggtctggacttctgggtctgagggaggaggggactggggtcctggacttttgggtttgagggaggagggactgcggtcctggactttcaggtctgagggaggagggcctgggggcctggactcctgagtatgaaggaagagggtctggggtctggactcctgggtctgagggaggaggggcaggggtgctgaactcctgggtctgaaggaggaggggctgggggcctggactcctgagtctgagggaggagggcggtcggaaccttgagtgttgggacagggagtttggggccccagtgctccagtccccataggggcagaggctggaggggctccagggccagggaggggatggaggcggcctgcagagtggggccgggctgggacctgaggttcttgctgcagtacagctgcagaccggggtgcagtgcatccatcctgggaaacctcttccctccccactgtcctctggcctccagttctccaggcagcaggttggggtgacaggggccgtggggcctaagacattctccccttctctggcatgctggctcagagtgggaaacaggatggagggtgggaaggtgggctgcagcaggcgcgtctcctggagcggctgtggaaagggcgttcatcctctgctgttgct

SEQ ID NO: 37969 - DNA, 2244 bp, Artificial sequence
  DNA replication origin
aggaggggctgggggcctggactcctgagtctgagggaggagggcggtcggaaccttgagtgttgggacagggagtttggggccccagtgctccagtccccataggggcagaggctggaggggctccagggccagggaggggatggaggcggcctgcagagtggggccgggctgggacctgaggttcttgctgcagtacagctgcagaccggggtgcagtgcatccatcctgggaaacctcttccctccccactgtcctctggcctccagttctccaggcagcaggttggggtgacaggggccgtggggcctaagacattctccccttctctggcatgctggctcagagtgggaaacaggatggagggtgggaaggtgggctgcagcaggcgcgtctcctggagcggctgtggaaagggcgttcatcctctgctgttgctgaacgctggccaccggccgcggcctccttcctgccggatggatggtgggtggaggtgacatgggagctgaacgcccagagtctctatgaagctcagggccagagctggcaggagtggggaccgactgggccgtaactgggagctgagaccctagggaaaaggagagggtcaaagtcccagatcctgagtggtaagagtgtgaaggtgttgctgacctgaattcctgagttacaggagaagaaggggtcagacctggactgggtctgagggaggaggggctgggcctggagtgctgggtctgagggaggaggaactgggggtctggagtgctgagtctaagggaggaggggctgggggtctggagtgctgggtctgagggaggaggggctgggggcctggagtgctgggtctgagggaggaggggctgggggcctggagtgctgggtctgagggaggaaggggctgggggggctggattcctgggtctgagggaggaggggctggggtctggactcctgggtctgagggaggatggaatgggggcctggactcctgggtctgagggaggaggggctgggggtctggacgcctgggcctgcagctttaggggctagtcagggctaggtctgtggctttgggggctcaggtcctggagtcgagggtcctgaggagaggtgtgggctaggagaccggacatacccttggtgtctgtgtgctgtctgttagggctgccatgaagagaagacccaggaaggcagttgaggctgggggttcaggagaaggtggagggtgatctggggaggggcaaatgtgagattatattcactgggaggggattcaggaggaggtggagggtggtctggggagggggcaaatgtgagactatattcgttgggagtcatagggtctccaaaagattgaaaagcagagaatacaaggaattgatggagagagacagagaaagtgggggggcgggggcttggaggagacagactcggggagacacggtgaggaaagaatgcgtggcaggcgggctccccaggacggagagggtgagggccagggggtggctggcagaggagaggggcacctggctggatggacagtcaggaggaacggactggcaggagggaggggaagggtggttttgtgggagtgtgggctctcagccccaggagttcaggtctgatgtgttcaggccattgttaaacagccagcccaggaggaaggagcaaacagggtggccaaggggggacataggcgctggggacgaaggggacccggcggaacaccccacattttcaccctgctcctgcagggctggttaaactcggggtccactgcatcacgggtcagaaggtcgccatcaagatcgtgaaccgggagaagctgtcggagtcggtgctgatgaaggtgtgtgcgcctgctgcagtgtgcctgcgggtgggggggcctccggggctgagggcaggggcggggccgtgctgacctcttttcccgtgtccccacccctcttgaccctcaggtggagcgggagatcgccatcctgaagctcatcgaacacccacatgtcctcaagctccacgacgtctacgagaacaagaaatatttgtaggtatttatagacacccagccctaccccatcctccctctccaggttaccagggtgggacttctccagaaacagggcctagggggacctgggggacctgcagctctccaggctggaccgctgaaggcccagttccttgcctgttgcacagggaagcccctgacacacagggaaccccactgttgtcacgct

SEQ ID NO: 37970 - DNA, 1400 bp, Artificial sequence
  DNA replication origin
gtgagggtgaaatgtgctaatgaggggtcctggttatctcttgcccagggggctctgccctttgatgacgacaacctccgccagctgctggagaaggtgaaacggggcgtcttccacatgccccacttcattcctccagattgccagagcctcctgaggggaatgatcgaagtggagcccgaaaaaaggctcagtgtgagttgagggggggaccggcggaggggggaacagtggccgatgaagacagaaccccctagaaaagtcatggggatgggtttccagaacctgctcgtcagtccccagggtgactgggatcgccagctgagccgcagcccaaggtccagcacagctgccgctccaaactggggagggggctacgcaagattggggcggggagctccaggcagcgggagggcgcaggagtaaggaggcgaacaggatgccactgcgcatgcggcaaagtaatgcggccggtccggggtacacggagaccgcgcgtgcgcggggcgatgcactcagtcgccactagagggcgatgtaatatgtcatcctgcccccggtggggtgggcggggagatgatcagggaccccaaaaccaccccagtctttcattgcgcgcctacatgtgcctacgacctcacttctgcttctctacgactcaccaccctcacagctggagcaaattcagaaacatccttggtacctgtgagtatggggtaactggactcttgggtccctggcggaaataggggaggggccaaagcagtagaagcggctgggaggggtgggatgccagggttcctgagaggcaacgggctagggactcggacttatgggtcctgggggaagaggacacagctagagaaggagtctaggggtcagaggcaggaggggctaagctaggagtccaggactcccaggtttgagggaaaaagggactgggggcctggactcctggatccgagggaggaggggctgggggcctggacttctgggtctgaagaaggaggggccgggggcctggacccctcggtcggagggaaaaggggctggaggtctggactcctgggtctgagatggggggcgaggtctggggcgtctggattcctgggtatgagagagaaggggccggggcctagactcggatttcggggtccgggatcattgagtctagaatgaagaatgctgaatctcagaagcccggttcccaataatgtttctccacttccccagaggcgggaaacacgagccagacccgtgcctggagccagcccctggccgccgggtagccatgcggagcctgccatccaacggagagctggaccccgacgtcctagagagcatggcatcactgggctgcttcagggaccgcgagaggctgcatcgcgagctgcgcagtg

SEQ ID NO: 37971 - DNA, 1485 bp, Artificial sequence
  DNA replication origin
gggtctgagatggggggcgaggtctggggcgtctggattcctgggtatgagagagaaggggccggggcctagactcggatttcggggtccgggatcattgagtctagaatgaagaatgctgaatctcagaagcccggttcccaataatgtttctccacttccccagaggcgggaaacacgagccagacccgtgcctggagccagcccctggccgccgggtagccatgcggagcctgccatccaacggagagctggaccccgacgtcctagagagcatggcatcactgggctgcttcagggaccgcgagaggctgcatcgcgagctgcgcagtgaggagtaagaccccaagacccctgcacccgtgtacccacgtggggcgagctgcagcagctccctgcgcacatgcagagtgctgggcgaggaaccctggcctctcatggggcatggtttgaagctcccgcctgggagtgatggaaccagcggagaaaacggcccagaaacacgctgagaaagtattaatagatgctgcgacatagtacttacatatacatagtacttacaaatagttcttgcctggatgttaggtgttacagtgttattataattgagtgaaacacagctgagatgtaccctaaaccagagaaactgaccatactgatacctagaaaaaatggaaccatgggcagaaatacagggagcggaggagacctcctctgagcattgatgttggacctcagccctctgctacctctttccacctttcccaccccctgccttagggagaaccaagaaaagatgatatattatctgcttttggatcggaaggagcggtatcccagctgtgaggaccaggacctgcctccccggaatgatgttggtgagaaggcagggctaggggaccagacacctgggtctcgagattggaagaggctggccacggggaccccagattcccaaggaaagaaggggctgcaggctctgagcttccagctttagactgcttgacttgctctttgacatttatcaaatcccctctccactctaggcctgtttccccatgtgtgcagtttctgaggcagttgtacacagctgggtgaaaccatctcttgattgggttgaaactgttgtccctcagaccccccccggaagcgtgtggattctcccatgctgagccgtcacgggaagcggcgaccagagcggaagtccatggaagtcctgagcatcaccgatgccgggggtggtggctcccctgtacccacccgacgggccttggagatggcccagcacagccagaggtgggagcccctgtccctccaggaggatccacaatccctgggtctaggagttcaagattctaaccccagctctacctcaaatgtgctgtgtccttgggacaattcacctcccctctctgggcctcatttcctcacctggaaggactgtagaagtgagggaacatctgtggtttttgaaaccctcccatc

SEQ ID NO: 37972 - DNA, 998 bp, Artificial sequence
  DNA replication origin
ctctctccccaacaggtgcacctctgcttcaaaccccctcttctctagaacgtgggaatccaggcccccagtcccttcctctctagacacgccagacggacatccctggaaccagatttttagccccaacctctccccacattaggactcggcagttcatgcccccataccctgcatcttgcgccggtgaaagcgaggggagcccaggaagctgttgcggatggagttgagacgactcctccaggcggctcccccgacgccaccgccggggctggggggtggtgttgtccccggggtcccggtgggactggcccggggcgtgtgcagaggcgagtgcaagggggtcccgccagaggagcgcggggagcctggggggccgggcaggggtgtggagcgggcactggggggcgggggctgctccccggcgcccccacccctggggccccgagaaggcagcgtctgcgttttggaagtcggggagcccccgcctcgagcctcatctccagcccccggctccggtgaaaaggaaaagaccggactctgcagaggacaggagactgagataagcgagtggactacaactcccaggaggctctaggagccccactcacacgcacactcacggacgctggcccggtgcatgctgcaacttgtagtccaagtatcctccttcccaggccccagagcaaggatagcaaagactttctatcatgctgtgggctgaaaacccagccggtgcagatactagtacacagcaggcactcaactaacttttgtaaaatctcttcaggcatgcaatcctaaggaggtagaaatggccaatggaccaaaatactttggaggccttgggtctttggccctccagggacaaagaagcaagtctcaagactgcacaggaattgtagtttctgctactcaatctttgctccatgtctccacccctttctccttcttaaatcccactggggacctggccttacccttgggctgcttagagg

SEQ ID NO: 37973 - DNA, 1124 bp, Artificial sequence
  DNA replication origin
acaagttgcagcatgcaccgggccagcgtccgtgagtgtgcgtgtgagtggggctcctagagcctcctgggagttgtagtccactcgcttatctcagtctcctgtcctctgcagagtccggtcttttccttttcaccggagccgggggctggagatgaggctcgaggcgggggctccccgacttccaaaacgcagacgctgccttctcggggccccaggggtgggggcgccggggagcagcccccgccccccagtgcccgctccacacccctgcccggccccccaggctccccgcgctcctctggcgggacccccttgcactcgcctctgcacacgccccgggccagtcccaccgggaccccggggacaacaccaccccccagccccggcggtggcgtcgggggagccgcctggaggagtcgtctcaactccatccgcaacagcttcctgggctcccctcgctttcaccggcgcaagatgcagggtatgggggcatgaactgccgagtcctaatgtggggagaggttggggctaaaaatctggttccagggatgtccgtctggcgtgtctagagaggaagggactgggggcctggattcccacgttctagagaagagggggtttgaagcagaggtgcacctgttggggagagaggtggggcctctagctctggaggaggaccccgattgaagggcacgcgcctttggggctctggattacctcccattggcccgtggtttgtgagccccgcccaggagggatggcttggccgaggctgcaacccaaggctctggaaccctgggagggggcgagtgcaggcctgtgtgctggcaactgggatgatgcacaggtgttgaccacgttctctgccttccccctaccagtccctaccgctgaggagatgtccagcttgacgccagagtcctccccggagtgagtctcacagggaaggaaagagtggggatgcaggggattcatgccctcggcgccttcctaaccctcctccaaccaccccctcccactcaggctggcaaaacgctcctggttcgggaacttcatctccttggacaaagaagaacaaatattcctcgtgctaaaggacaaacctctcagcagcatcaaag

SEQ ID NO: 37974 - DNA, 849 bp, Artificial sequence
  DNA replication origin
gtggcatgcacctgtagtcccagctactccagagtctgacgtgggaggatcacctgattccaggaggttgaggctgcagtgagccgtgatcgcgccactgcactccagcctgagtgacagaatgagaccttgtctcaaaagaaaaaagaaaaagaaaagactttctccgatttctttttctttttttttgttgttgttgttgtttggttttttttttttttgagacagagtcttgctctgtcgtccaggctggagtgcaatggcgtgatctgggctcactgcaacctctgcctcctgggttcgagagattctcttgtcttagcctcccgagtagctgggattacaggcatgcgtcaccatgcccagctaatttttgtatttttagtaaagacagggtttcgccatgttggccaggctggtctcgaactcctgagcaacctcaagtgatctgcccacatcggcattccagagtgttgggattacaggcatgagcccctgtacctggctccaacttatttttcttacatttctggtccttcatggcctccgctagaaactaacagcaagcaatagtatctatttgaatagaaaccaacacctgttatttgaagttgaaggtatgtgagtttgaccgtgatccttaaatagcagcacagacccatttgcaaaccgtggattgatgtggccccagcggagcaggggagacggagatgcagggggggtgttgtgtgcttggtggagggactgggttctgcaggctgggacggccttcccggtcctggacccccagtcagtgtttttctgcccgcctgtgcctctaggtcccagccgtcggttcaagcgagtggt

SEQ ID NO: 37975 - DNA, 1619 bp, Artificial sequence
  DNA replication origin
atttctggtccttcatggcctccgctagaaactaacagcaagcaatagtatctatttgaatagaaaccaacacctgttatttgaagttgaaggtatgtgagtttgaccgtgatccttaaatagcagcacagacccatttgcaaaccgtggattgatgtggccccagcggagcaggggagacggagatgcagggggggtgttgtgtgcttggtggagggactgggttctgcaggctgggacggccttcccggtcctggacccccagtcagtgtttttctgcccgcctgtgcctctaggtcccagccgtcggttcaagcgagtggtggagaccatccaggcacagctcctgagcactcatgaccagccctccgtgcaggccctggcaggtgggtggtggggccgtgggtggtggggggcgtgggtggcgggggccgtgggtggcggggggcgtgggtggcggggggcgtgggtggcggggggcgtgggtggcgggggcggtgggtggcgggcagaggtccagcatgagcaggtgctctggggtttggtttgcagaggacgcccagctggtgggctccttcaccattgtcgtagctgaggtcttatctgcagagttgtgagcaggttccccgagaggctggggcctgaggagggtctccttagcaacctgaggactggctcccaggagtccctaagaagatgacaggctctgtgttgggggtcagggaacatcctgccaacagaggttctggacctctgtccaggaggacggtgacccaccgtcctggtttgcttgggactgaagggtgtttctgggatgcagggctttgagtctaaacccaggacaaattggtcaccatctttgcaggtctcacaagtcacctcaccctggggctagggcctaatggtccctagcaaccagaattctaagctgagttcatgggaatgtgcaagatcttgctctggggaatccggccttcccgggctcccagtcctggtcatcaaagactcaaattctctagcaatcaggagagcagagggtttgttgcaaaggtgtcttagttcgttcaggctactataagaaaataccatacactgggcaacttacaaataacagaaatttattgctgacaattctggaggctgggaagtccaagatcaagctgccagcagcgttggtgcctggtgagagctgcttcctgggtcacagacagcacgttggtgctgtgtcttcacatggcagaaggggcaagggaactctctggggcctctttcctaaggacactaatcccattcatgaaggccccaccctcatgacctcatcacctcctaacataacctcctaataccatcaccttgggattgggtttcagcacatgaatttgggaggatgcagtgttcagtagagagcataaggggcactcgcccaagcaaccagaggtagccagaattctcaagggaagagagcgcctgccctggaaatcagccctcattcctgagacacggggtcacaggggacacagtgaaacagggtactgggccccattgcagggcacgtggacagccgtctgctctgaggggagtcaggcagcatcagcctcacaggacccatgccccttcct

SEQ ID NO: 37976 - DNA, 766 bp, Artificial sequence
  DNA replication origin
cagaaggtcgtggggggaggaccaggggaggaggggcccgggaagagggggttggggacgacacagggacagagggccctgtccggatctgctaagccaccccaaccagctcccgtccctcccccaccccaccccgcagagagattgatcaataaataaaataataaattaatcaataaataaaatagaaacagctcccccgccccctgttcccctagaaccacccccagttgggcacggcctgtggagccccatccctgcagggcaaggccggtttttgtgtccacccccctcccgacatgttccttgggccttatttacagattcacagttggggggcacggaaggggggtggaggggggtcccctccctccccggccccgtggggtcagggcagaggggtcccgttggtggccaggagcttcttgtccttgggggggcctcggcggggagagctgctcagctctgggtctgggcggccgggtgggggctgcaggcttcggggtggggcaccagcaggccgggtctgggccccgttcttctcgtctgcaagggaggaagaggtttttcgtgggttccgcagcccagggttggggttcccattaccaggggatgggggcagagtctcctcatcagtcggtctcagtaaccccgaggctctagctccaatccctgataaggcccagtccgtccagcacctggccttgaattggttactcggaggacacaccccaagtggcaaggcctgactcccctaggacggggg

SEQ ID NO: 37977 - DNA, 1101 bp, Artificial sequence
  DNA replication origin
aagtttacggtcaggcattgtggctcatgcccataatcccagcgctttgggagactaaggcgggcggatgacatgagatcaggagttcaagacctgtctggccaacacggtgaaactctatctctactaaaaatacaaaaattagccaggtgtggtggcacacgcctgtagtcccagctgctcaggaggctgaggcacaagaatcgcttgaacctgggaggcagaggttgcagtgagccgagatcacgccactgcattccagcctgggacacagagtgagactctgtttcaaaaaaaagaccaggtctcgctctgttgcccagactggtctcgaactcctagcctcaggcaatcctcccaccttggcctcccaaagtgctgggattgtaggcgtgagccaccacttctcagcccccttagaaatccctgaatgaatggaataagctgtctgggaggggtgaagtggtgagcagctccagtgagagaagttccagaaaacaaatgctgtctctactaggcctggagtctgcaggggctggcagagcagaaaaaggtcttaaggagctagcagggtgcgagaaccagaggagggacgggacagaccaggagagaaaggcacaagacatgaggagagggctggagagagatgggtaaggcagataggacaagacttggggtgaccagctggccaagaaggatgaagagagggccgggggagtgtctgctggggcacatgagtggatggtggagttgtcgtggaggaggggacactcagagaaacagattttacagggaagagattaggctctgggagtgagcaggaagggcctgtaggccatgggtagcggggtggatgttcaggagaaagttgcaaaacacagtccgaggctggcggcagggagggaggcgtatttaggaaaccatgcatgtttacaggcaggagcaatggcagctggatgtcctggacaagtagggaggcaaccaggcccttccctgggtcagggaagggagacagaaacatttcaggatattaggattgcaatagtaacgggggtgcacgcaaaggaaagcatgtgcaagcagcttgagatggagaccggc

SEQ ID NO: 37978 - DNA, 911 bp, Artificial sequence
  DNA replication origin
aggtgtgggccactgtgcccagcctacagtgattaattctgataggtagagtgtagagtgagagaaaggaggggctgaaaacccagccttggggggtctttctcatttgtggggaggcccagagtgtgcaggcattcagaagagagtacagagaaaccagctaaggccctgtgttggttgtattaagtgcatccgtttcttggaaattttctcagcaaaatggaaatggtgatcgtatttcctggagtgacaaagtgtatcttcacaaaatagttgagagggctggcccctcagcccggcctatagtgacttggggtatgagaccattaggtctcctttgcaggggccctgatggtgataagatccagcccagatcttctaaactagccctgatgatcagtttagccacaggggccttcattctgtgggactcagtagtctcttgggtggggtaggtgggggagggaaccataaagacagctagctgagtgtcgtaagggatggacgtctgtaaagacgggcctgagcctggccggattctgagcctggccttgcagaaggagctgctcgtgggctgggaggttgagggcacactgcaggtacacgcaccgagcagaaagaccagcccagggaggagtgaggctgctggcagggccagggctgaggattctctaaaattagggatcagaggcttgggtttctgcctgggggtgatagagagccataggaagtttacggtcaggcattgtggctcatgcccataatcccagcgctttgggagactaaggcgggcggatgacatgagatcaggagttcaagacctgtctggccaacacggtgaaactctatctctactaaaaatacaaaaattagccaggtgtggtggcacacgcctgtagtcccagctgctc

SEQ ID NO: 37979 - DNA, 1127 bp, Artificial sequence
  DNA replication origin
ggagtgccaggagagggacagaggggtcagggagaggttctagggcacagaaagacctagagggtccagaaggaggcctggagggtgagaggaggtcggggattggccctgggagtgcagggaggtcccgggggtgagagaagggtcagggagaggccctgagggtgcagggagagacctgggggtgcagggagaggcctggagggtgaggtcagggaaaggccctggggggtgcagggagaggcctggagagtgacaagaggtcagggagaggccctgaggatgcagggagggccgtggacgtaagaagggggtcagggcccgggtgaggaagcacaggaaggaggctgcagtgccgcggagcccgaggcccggcgaggggccgggagacgtgggcgcctggacacgaggaggggccgggcggggtggggggcagtcggggcagggggcgactggggagccaaggcggcgcggggctggggccgtgaaggggctcagagatcgggccccgcgccgcccctcacccgcttctcctcctcctcctcaggcgcccgcgccgccgccgccaacacctcccacagcctccttcggctctcgtcaaacactgtcgccgcacctcccatctgctctccgggccagccccgccaaggccactgaggctttctattggccacagccaccgccactcctccgttgctacgaagctcacggcgctcccattggccaagccccactctttccctccgcgcccggctctcgtcaatacacagataaaaccccgccacgcccccgccgccgtcaaacgccgcgaactgttgtcagtggttcacatcgctgtcctttagtcgctgccatggagacttgtcccgccttcgctcacactggggctcgaaatcgacgcactcattggccgaaagcgcagtctctccgggcgaaactcggtttgggtcgggttattcaggtccaagtggaaagagggcgggctctgccagctccagtagtcgtatatgattgcctggccttgggacagctcctctttccattgggtaaggcctccgtccatcaccatagagtcgcggcctccctcttctatttctccgaggaaagcttcggccacaggagggaga

SEQ ID NO: 37980 - DNA, 1542 bp, Artificial sequence
  DNA replication origin
tagctcttgctcttgctccgcagcgcagacacagatcccccctaaacacacaacccccacatgcacacccatgcacactcagactgacacacgcagatgcccctgcccatatgtacagagaccccctacacacacacatctctttgggcccagagaaggctgactgattggcagccgggatcaccctaaaggcttagcaccgtggggagccgcttcacctctagccctcaaggaggaaaagtcaaagcttcccgccagcccgaggtcccgccctccacccccacctcgacccagcctcggtctccgccccctgcctccccggcagccttcgggagtggtcaggaggctccgggtgaagccccaggcagcctggaggcgggtgacgggagggagggcaggggagggatcccagcacctgctccctctccaaggattccaggggaggggggctcagaggacaaaagcgggggtggggaggggagcaaaggaagactatggggaggcagcacaggtcaatatttacaaaaacatttttttaaagcggagccaggagagaacggagagatgaagaaaaccacccaaacccctaacccggacggagggccagcctcgtccccgcaccacggcgctcgaggctcatccgcgcccaggagaggaggagatggggcagggcaaggagcgggagctgcagagacggctgtggaggggtcggggacagactgcgaggctgcgggagagaaagagggggcgctgcaggaggacgccagggacagcggggaagctggagagggggctgggggcaaggagagaaacgcacagcggtgggcacggcagggggctgtgggagggagaaggctgcagccgggcctgggggcgctcagaggggtgtgaggaagggatgggggtgccagggaggacagagagcggggaatggcctagggactcagggaggagccagacgggagacctgggtcggggggcggtccagggatggcggagaagatcctgggtgtccagtgagtgaagggcctgagagggcggacaggggcccagggatccaaacgggcttggtggggtcctgggggatccaggaaagggagaccctagggaagggcctggggacccagggaggcgcctgggtaggcggtgagagcccagggcaagggacctggagggtcagaggccgacctcagggtccagggagtgccaggagagggacagaggggtcagggagaggttctagggcacagaaagacctagagggtccagaaggaggcctggagggtgagaggaggtcggggattggccctgggagtgcagggaggtcccgggggtgagagaagggtcagggagaggccctgagggtgcagggagagacctgggggtgcagggagaggcctggagggtgaggtcagggaaaggccctggggggtgcagggagaggcctggagagtgacaagaggtcagggagaggccctgaggatgcagggagggccgtggacgtaagaagggggtcagggcccgggtgaggaagcacaggaa

SEQ ID NO: 37981 - DNA, 1126 bp, Artificial sequence
  DNA replication origin
ctcctgcagcgccccctctttctctcccgcagcctcgcagtctgtccccgacccctccacagccgtctctgcagctcccgctccttgccctgccccatctcctcctctcctgggcgcggatgagcctcgagcgccgtggtgcggggacgaggctggccctccgtccgggttaggggtttgggtggttttcttcatctctccgttctctcctggctccgctttaaaaaaatgtttttgtaaatattgacctgtgctgcctccccatagtcttcctttgctcccctccccacccccgcttttgtcctctgagcccccctcccctggaatccttggagagggagcaggtgctgggatccctcccctgccctccctcccgtcacccgcctccaggctgcctggggcttcacccggagcctcctgaccactcccgaaggctgccggggaggcagggggcggagaccgaggctgggtcgaggtgggggtggagggcgggacctcgggctggcgggaagctttgacttttcctccttgagggctagaggtgaagcggctccccacggtgctaagcctttagggtgatcccggctgccaatcagtcagccttctctgggcccaaagagatgtgtgtgtgtagggggtctctgtacatatgggcaggggcatctgcgtgtgtcagtctgagtgtgcatgggtgtgcatgtgggggttgtgtgtttaggggggatctgtgtctgcgctgcggagcaagagcaagagctaaggcgatggctgacatggctctgggctttccctactctcagaagtacttgttgcattccatcttcgccagcggcctggtgaagtcagcactgcttttctccccattttgcagatgagatcgtggggctcaccagcgtcccccatggcttctgagtagcgtgggagtggagtcagcaccaagccaggctccccgcgcctgccttgccctcacctgctcctgctctctgccagaggcagcatggtccgcagggcaccatggggcccgacagagtgacagcacgagaactgtgcgagaacgacgacctggccaccagcctcgtcctggacccctacctcggtttccgcacccataagatgaacgtcaggt

SEQ ID NO: 37982 - DNA, 2097 bp, Artificial sequence
  DNA replication origin
cctggacccctacctcggtttccgcacccataagatgaacgtcaggtgaggtggcctgggggcgagggtgggcccgaggggtcaggacccctccccttgcaccgctgccgcccctcggccctctccttagcctggtcctcccctcagctccaagtgggggttggggccggggcccgggaaggccctgggacccaggcatgccctctcccccagccctgtgccccccctgcggcgacagcagcacctgcgctcagcgctggaaactttcctgaggcagcgggacctggaggctgcgtaccgggccctgacgctgggaggctggacggcccgctacttccagagccggggcccgcggcaggaggctgccctcaagacccacgtgagggcgccctcccctcccccgccctcaccgcgtgtcctccccgctcaccgggcctggtcccgcctggcagacgctctagagtccctcagcgcagcccctggggccccctgacttcctagcccttgggaccatctgaggcaaggctcagagaatcctaggagaggagagttgggggggccctctgagatgtagtccaacctcttcatttgacggatgaggaaactgaggccccgagagggaacatgaggcccccaagaccacacagtgagtcagtggcatggcaggcctagagtcctggagagagagggccaaagatgcccctgccccgcctcctcacccccaccctcaccctcaccaggtctatcgctacctccgtgccttcctgccggaaagtggctttaccatcctgccctgcacgcgctactccatggagaccaacggggccaagatcgtgtccactcgtgcttggtaagagggcaggactccctgcaggtatccttggaggagacagagctcagaggggacaagagagaccctctgttcatggactggccaaccggggaaaagcgaggggcctggtcctccgggcatcctaggaaggtggtggggctaatcccggaagacctttgtggctaccgtggtgccgctggagcaggagaccccggatgtgaccccagggttcctggggcttccaggaaagaactaggcttctggtcagggccgtgctgtccttacctccttgtgacctgagcccccaccacatgttaaacacccctgagtgcaatgaggagcccctgcccctgcccctgcggggttcacagtctggtgaggaggtggggggcagacaagtcaacatgcagtcactggtcccagctggtacatgctgcaggggagctgtgaggaatgagcaagtgctcccagggcgaggctcacactgacaggggaagcacccgcctgagggtctggtggggcgagtagggggtagtccaggcaggagggatttgggggcaggaggtgctatgagagcgaggggagagaatgggggctgtatctgctgtgtgcgtgctgccctgaaggctttcagtagaagggtcctgtggggctgtgggctggagcagggaagcccacccaggcaggaggggaagagggagatctggaagatggatcgccaatagccagcaccagcgcccaggagtccctccttcctgggtgcctctgtgccggaggcccgagtcccctgaacacctgcaggaggccaggcatcgcccacagccctgccccctggcctcttggcaggaaaaagaatgagaagctggagctgctggtgggctgcattgcagagctgcgggaggcagatgaggggctgctgagggccggtgagaatgacttcagcatcatgtactcaacccgcaagcggagtgctcagctgtggctgggcccagccgccttcatcaaccatggtgagggtcaggcaggtggatgggcaggacgggatagagccaggcagggctggaggggtgtagtgggagggttctgcgactgagctgccgagctcatctacctctcttctctctcctgccccaactggctccagactgcaaacccaactgcaaggtaaggccttgggactcgggaggagagggcacgcaggaagaaagggtgcctgtggcctggggaaagggtttttggtcagtaaagagccaaacaccggccgg

SEQ ID NO: 37983 - DNA, 1187 bp, Artificial sequence
  DNA replication origin
ccagactgcaaacccaactgcaaggtaaggccttgggactcgggaggagagggcacgcaggaagaaagggtgcctgtggcctggggaaagggtttttggtcagtaaagagccaaacaccggccgggcgcggtggctcatgcctgtaatcccagcactttgggaggccgaggtgggcagatcacgaggtcaggagatggagaccacggtgaaaccccatctctactaaaaacacaaaaaattagtcgggcgtggtggcgggcgcctgtagtctcagctacttgggaggctgaggcaggagaatggtgtgaacccgggaggcggagcttgcggtgagccgagatcgcgccactgcactccagcctgggccacagagcgagactctgtctcaaaaaaaaaaaaaaaaaagagccaaatgctgccccatgtctccatggcttcccacgggtcctggaaggggcagagtgggtatttgctcacaaggctaccagaaaggaggaaggggttccagtttggccagcgttgcccggctgtttgtgcagttgcactggaaccctggttgccagctgctggccatctttcttctctgaaaaccgagctgggagctgtgccaatttgggcagggagtgtggcagggaggcagggccctgtggtgggagcccccggccttgcagggaacaacgcaggcagctgtggtggcaggagcagggaggccagagagccccaggggccaggactcaggatgctgtccagacatgcccaggagaggccgctggttgtcctgtagcccggaagcagaaggaatcaggagggttggctccagggcggcattgagggtgcaccctctggagcacagacctcgatggggcaccccgggaggcatgacaaagggatccagatttttggctccagagtcagaactgagttggggtcctggcgatgccacccctggcctttggtttttcatctcagatggggttggtgaggatctctggaactctgcgggctggtcaagtgtgccggagggttttggacagcgaatgcgtggccctggtctgacaccacacacagacgctgggggggatggaaacaaaaggcggcattcggagaggctctgcagggccagtgtgctccagccaccttgagcacacgagagggcggccagctctccagcgatctagaaccatct

SEQ ID NO: 37984 - DNA, 2157 bp, Artificial sequence
  DNA replication origin
ctggagcacagacctcgatggggcaccccgggaggcatgacaaagggatccagatttttggctccagagtcagaactgagttggggtcctggcgatgccacccctggcctttggtttttcatctcagatggggttggtgaggatctctggaactctgcgggctggtcaagtgtgccggagggttttggacagcgaatgcgtggccctggtctgacaccacacacagacgctgggggggatggaaacaaaaggcggcattcggagaggctctgcagggccagtgtgctccagccaccttgagcacacgagagggcggccagctctccagcgatctagaaccatctggcttcacagaagccatgctgggcatcgacggaggagtagaatttccctaggtgttaaaggaaatcaggggcaaaggggggcgtctagcaggacacggcacaccagagggctgggggtgcccagcgacggctttgatccggcagcaaggccttggggtccgggccagggagccatggaagctccccccagggtgtataatgggaagcttggtttttaggtcaccctggaggcccatgtgcaggaggcttggcaggaaggggagaggctgtaggcagggtggccacaaagaggtgatgaggggctgactccagtaggggtctcggggaggcgaggaggatgaggatgcgggaggtggcacactcagaaggcagtggccggttggtctgggggccgtcaggcaggcaggtggcgagggctactcccaggcaaatgtcaggcttgagtggatgggtagatggacagttgggtggacagtggtcatgccccctcctagacggggaacagggaggaaggcgcagctgtgtggggcttaggaggagcctgtggggcagctcctgggtgaatgatcccaaaggcagggccagagcacacacagattgggctgtggagtgaggcaggcctcagagaagcgggggcggcccgcagcaggcagagctcggacctcagctgccaaggcacagtctggcggggggcaggcagctcaggaggggatgggcttgggtgtggcagaggaggtggggcttggcacggggccacagaggctggagggagtggtcaccactgctggcactgcacgctgccagaaggtcaggttagatcatcgtcctgcagggaggggtggaaaccagccagtgggtggattgtccaggggctacaggcaaaggacaggccctcggcaaggcagccgcctcggaatgccacttttaggggctcagctgttgccccattccaggagaggacgctccgggccagggtgcccggccaggtgtggggagtgggtgagccctcccctgtgccctgggccagggcgctgagtgggcttggccctcagtttgtgcctgcagatgggaacgcagcctgcgtgaaggtgctccgggacattgagcctggggacgaggtgacatgcttctacggcgagggcttcttcggcgagaagaatgagcactgtgaatgccacacctgtgagaggtgggaccgggcgagaggcggctgggttcgggtcgtctgggcttcttgagcccagaaacgcaccctcgggacccatccctgagtgtgtccaaccccagcctctcatctcccttccacccggcctcatctccccttcacccggtctcccaggaaaggtgaaggagctttccgaaccaggcctagggagcccgcgttgccaccacggcccctggacaagtaccagctgcgtgagaccaagcggcggctgcagcaaggcctggacagtggcagccgacagggcctgctgggccctcgggcctgcgtgcacccatccccgctgcgccgggacccattctgcggtgagcacccctccctgccatcccagcagcccctcccctgtctgctcctggtcatctgtctcctttcttctgagctctctgcctagcctggaaccctccctcccaccctcagtcgctggcaggcctcgctgttgagcagttcggccgcatcattcctctggggagcgcagggcagggctgcctccttgtccagaggaggaccggcccagcttgcactgacttcacctctcctttgttcctcctctccctgccacctgggccttcacagccgcctgccagcccctgc

SEQ ID NO: 37985 - DNA, 1471 bp, Artificial sequence
  DNA replication origin
caaggctggcagatgcggaggcgcacatggggggcctggagccagcaggtgacctgtagctgcccaagtgagacgggctcggtggcccagtgagaaaagtatctgggagaagctggaggtacctgggatcagggattgctcacagtcagccgctgttatttccttttgcaaaacgagacagcaggcagagctaagacgccctggcaaaatccagatcctggagcggacctgaagaaacaagattcatcttcctggtctcacacacggcaaagcccaagatgccacagctgaggaaggtcctgtcagcgccgcctcccccaggctcggctctggtgtcctgggcagcccccacaccctcactcagccaggcccccagcagtctctctccgtttggagtgagatgtgggaggggcatctcattgagaagcgcgagaagggagaagggccctcaagtccccacgtggccttggcaagtcactctgcttgctaaacgatgttgacctcgcctggaaaatgggaggacccactcctaggagagtatgggtctcaaggcatttttacaagcacagcctgagtggggatggggctccagcctcagtcccctagtccatcacgctcccaaatccctctcccgacagctctcagggctgaaggcctgtgttgcctcctccccctctcatcagcacagctgagggtctcaccctcctcacatcccttcaaaacataagccaaaacaaaaaaccgccaagggtgctgcttataacaaggttttaataaaataaaaagttcaagtgcttccaagcccccaacatacccctttctggtgtgggggaggggagggagctccccaccccaatagcaccaggatagcaccatgagaaagatgaggtcacacccggcctccctgagacccacggggggtggtgaggggaacatgcctccagacaccccccaaccttccccccaccgcagacagctgcagagctgagagcgaacccagtcccctcgtgagggcagtctctggggagtgccaccccctacatcagttccacctcctcctgaggcctgtacttctggggagatgccgtggggtggcccctgccccttatggctttgctccctggggaggaaggggctgaggggggcggatggctcctgcagtcctgaggctggggcaggggtggggagggcagcaaatggccggggctccctgtgggagtgggggtggctcaggggtcagcagtcacaaagggtcagggctcagatccctgggggtgtccaaaccaaccccattccagggtcagagctatgctggagtcaagggtcagctccctcccagaggtccaagggctccttctggaggtcctgggtagcagctaggagagagaccctctctccctgctgggcctccccgtccggcctgtcacagctcttcaccgccgacatccaggtcgatggagccgtggctgac

SEQ ID NO: 37986 - DNA, 795 bp, Artificial sequence
  DNA replication origin
gctctgccaccttcaggatgggaaagggggaaacccagagagaggaggcgaagctgcggcccctaggagccaggggacagtgagcaggggaggcagcgcaggtggccttcaggatccgtggtctggaggccgggaggacggagcaggttctgagggaagaaccgcagagggaggggaaagtggatgatggaaggattgaagagatggggctggaggaggagaaagaagaggaaaaggagtagagaaagaaggcgggaggaggatgttgagcgaacaaggatgcaggtgttctgggtgggggcaggaataagtagagtggccttggttttctctgacctgggaggttgctgagactgtgaggctggcattaggggtctcaggaggcggctactggacaccagggaaagccagccagagcacctggaggaggtgttcggagtttgcacaggtgatggtccaccaggctggaggccaggccgggcaggtctgcccctgcccctggctcaggcatcagtggggcagtggcggctgcagagggggtcgggagtgtgagaatgtgctgagatgaggtctggaggcagtgaagataggatgatgggaggaggaggaaggaggaaggctggccaacagggcaaaaatgggttctagacacggctctggggaggtcaggaggctgctgtggctgcacaggtgtggcaccctgtgcttgggatgttacctgggtgacctcaccaacttagctccattctgtgactcagagaggggtcctgcccccgtggttctgccagcgcctct

SEQ ID NO: 37987 - DNA, 1468 bp, Artificial sequence
  DNA replication origin
gcgtcatcctgggggatggctcatctagggtgtgtcctgggcagcatggagggcaggtgatggacaggtcatcatggggcagggagcaggatggagtcagccccctgagctcacccagccctacctcctctgataatggggccctgagccatcttggtttgccttggggaacctcgggctcacacaggtcaagaagcttgtctagggtcaccctgcaagttgtcatgattagttgtagtcacctttgaaccctggggttgaacagggcctcataggaccgcttcagtcagaggatggggcttccccctcctaggagcccctctggaaggctgatagctcagggagtacccgttgggaaaaccagcaccccaggctgactggtctcacggctccctcagcaggaccaggctggaaccctagggctttgtcaagcggcactccttggcctggggagaggcaagacttcaaagggcgtctggaaccggaatgcggttccgtgttactgccgggatggggaaggagtaaagaatgattccgagggagctctgagcgtcctctgggtgctggcagtctggcgggggtcacaggagaaattgcggcgatgtgtgcggtgggagagactgacagcggcctctgcggggtgggggtgcggggtgagcctgatgcattggagaactgagcaggctgctacgcctggctgtgggtgcgggtgccgaaagcgtggacaccaggggattctgttggaaataagctggctcacatgatggggatctcgatgttctgggaggggaaatgagccaggtgggagcggggtcgtgatggagagtggtggagagcccagagagtgggggaggaagggatggagtcagcgctgggtggtacaaagaagacccctcaggacccgagatgggatggatcaggggtgggatggggaaggagcctggggagatggtccaggcaggaggggagtagggaaaggactgaggtgagaggtaggtgtggtgattggaggcaggagcaccttggagccatctgggtgggacagtgttgagaactggggaccctgggctggctcgtagctgtcaacgcgaggcatctacctgctggaatggagagggagaagggggacgggaggcattcggcttcctgtcttagggccttgactgcctgctgctacctgatggagcagcagtcccccacctgccccttatcggaaaaagcagcgttagcccggacacaggcacacggaggatccccaccaccaccacgacgcatcgctggctgggcattaagaagaaacatcagcaacagcataccattattcgtggcttagacactgggaggtaggggtggataaccgagacccggggctccgcgagacaaaaagatgcaggatcactgcatcttcagaggaagccgcgctggggcagtcagattttgccggcgaaaatcccgttcttgatctgct

SEQ ID NO: 37988 - DNA, 827 bp, Artificial sequence
  DNA replication origin
cggggtgcgtttctcctgacccgggtgggaccgcaccccgcggactcagaagcgagcggcaccccgggaccatcccacagcagatccagtggccgccaacgtcaggctggtgagggcacgacgggtggggttcaggggcgggggtcaggatggggagacgggtcggagcgagggcgccccctcggccccacggagtccccgtcccgtcccgtctcgcaggagttgcctccttcgtggatgttggatgtggaagcccaggagccccccaaggggaaatggtcgacgccgcccttcgacccgcgcttccccagccagaaccagatccgtaactgctaccagaacttcctgggtgagacctgctcagccaggttatgggaggagcagggtgtgacaagggacggcagggaggggcactcccaccctaagtcccgcggagaccgttagggtgggaggccgggcggggccgggttggtgggggcggggcctggtcgagaaaaggcggggctgagcctggaggggcggggcgaggttggtaggggcgaggcctgatctggaaggtgcggggccgagtcgtgaaggtgcggggcgaggtaggtaggggcagggtctgggtaggaggagcagtgtgagggaggtaggggtcggggcctggctgggaggggcgggacggaggcctccaggggagagggaggcgggacgaagcagcgaagaactgggagggcccgagcagtggaggggcgggtcctgtcctggaatgggcgtggcttgccgcgtgacccccgcccgccacagactaccaccgctgcctcaagaccaggacccgccgc

SEQ ID NO: 37989 - DNA, 903 bp, Artificial sequence
  DNA replication origin
tgatcttggctcactgcaacctccgcctcctgggttcaagcaattctcctgcctcagcatcctgagtagctgggattacaggcgtgtgccaccacgcccagctaatttttgtatttttagtagagatggggtttcaccatgttggccaggctggtcttgaactcctgacctcaagtgatccacccgcctcggcctcccaaagtgctgggattacaggcgtgagccaccacgcctggccccctttcactctgatatatagtgagtgccgactctgtgccaggcattgttctaggcagtggggatacagtgtccgaccatggggctggtggtggtgggatgtgctcctggcttctagcaggtagagaccagggatgctgctgagcaacctacagtgcacaggacagcccccaccacagcccaggtgctctagggagccctcacggagctggggttgtttgtgtcaagacctggaggagaggacggaggaagccatgaggacatctggggggaaagcatcccagcggaaggaacagccactgcagtccctgaggcaggagtgtttgtaatgtgctggaccacggggatcccggggtgggaaatgcggtcagaggtgcagcaggggggcgcccatcatggaggactttgcagacaattttagggactttggctctgactctgagcgagctggagggtttggagcagaagaatgatggagacggatttatgtgtgaagaggctgcctctggctggggcatggaggatgtaggggggcaagagtgggcacctggaggacagaaaaggccacaaagaccccatttccatgaaatgtccataacaggctgacccgtagagacagaaagtgaatcgttggaggccaggggtctagtgtggaggaagcgggag

SEQ ID NO: 37990 - DNA, 999 bp, Artificial sequence
  DNA replication origin
tggttcctgccccaaagggctcagacggctcccccatccagagaagaccagcatcaccacctggaccatcttcagcatcatttccagcaccgccaaccagacacagtcctctccaaaggccagccttatacccggggcagggcccaggccccagagctgagggaggaggggctggaggcctggactcctgggtctgagggaggagaggctgggacctggactcctgggtctgagggaggaggggtggggggcctggactcctgggtctgagggaggaggaactgcggcctggacttctgtgtctgagggaggaggggtggggggcctggactcctagatctgagggaggaggggctgggggcctggactcctgagtctgagggaggaggagctggggcctggactcctgagtctgagggaggagagactggggcctggactcctcagtctgagggaggaggggctgggggtctggactcctgggtctgagggaggaggagctggggcctggactcctgagtctgagggaggaggagctggggcctggactcctgagtctgagggaggaggggctgggggcctggactcctgagtctgagggaggaggagctggggcctggactcctgagtctgagggaggaggggctgggggcctggactcctgggtctgagggaggaggggctgggggcctggactcctgagtctgagggaggaggggctggggcctggactcctgagtctgagggaggagggagcaggggtctgccctcccgggtctggggtctccatgcatcctgaccatgtatcctctcccctctgtccacctacaggcctgcacatctgcatctgatgaagccacaggccagggacatgtggttgagagcccttcacactgtgtctcagctgacagccctgatggcttctttctgggctcctgcagctccctggacccgtgcctgtggcatcaggacacggaagacctcatggactctgggggc

SEQ ID NO: 37991 - DNA, 1033 bp, Artificial sequence
  DNA replication origin
aaagtaattgcttaaataaataatatatgttcctgcccaggcctagatggggaagagccagggcagaagtctgtggacagacttcttggagacccaagaatccgggaccccagtcccctcctcctcggggacccaggagtccacctgcctcccacccctgctcctgaaataaataagtataaataaggcacagatgccccccaggcctcacggaaggactgtctctaactagggggagataatggcggggggatcacctggctgtttcgcccccagtactgaaataaataaataaataagatctggctttggaaggacggtggtggctttgggccccgggtcacagccgagtcttcagcagcagcagtcccctcacggcccagtcaagtgtcaggtgcagcccccccaggatggcgtgggcggccctgatgcccccccaggctgaggaggggggcgccagcgggggcgccggcgggtccgggggtggctggggcagggccaggcgggacatctgtggggagaggagagaggtgagtcacaggtagggggtgcagcgggggtgcagggcaggggtgctgtggagctgcagctgaatcggggctgcatattcacagggggactgtggcgcgtggggtgaagtgtttaggccgggagctcttcaggctgtggggttccgaaaatggaggctggagtcaggacgggcttccagagctgagtgtgggggttgggggtgaagtctgtggagtcagggctggcatctcggttctaggtgagggatcgggcctgggactgttagagtcgccggggctggaatctcagagctgggtttttgttgttgtggctgctgttagaacaattaagaagccaggcgcgggggctcacgcctgttatcccagcgctttgggaggccgaggcgggcggatggcctgagctcaggagtttgtgaccagcctgggcaacacggtgaaaccctgtgtctactaaaatacaaaaaaattatccgggtgtggcagtgtgcacctgaagtcccagc

SEQ ID NO: 37992 - DNA, 793 bp, Artificial sequence
  DNA replication origin
tgttatcccagcgctttgggaggccgaggcgggcggatggcctgagctcaggagtttgtgaccagcctgggcaacacggtgaaaccctgtgtctactaaaatacaaaaaaattatccgggtgtggcagtgtgcacctgaagtcccagctactcaggaggctgaggcaggagaatcgcttgagcccaggaggcggaggttccagcgagccgaaatggcaccattgcactctagcctgggcaacagagcgcgagactctgtctccaaaaaataataataataataataattaagaaacagagtcttgctatgctgcccaggctgtctcaaactcatggcctcaagaggtccttctgccttggcctcccctgccttgggattacaggagtgagccactgctccccaccagagctggggttttacagacagtatctgaggtctgtgggctcgagtctagggtcaggccctggatctcaaggctgaagtcttagagatggggtctctgggttcaagttcaggaactcatgggtgagggctggagtctcagagctagaagttggaatttgagatccagggtctttggagttaggcccaagaaccagggtttgaagtcttctggtctcagggctttgggcctggctttggaagtgagggtcttggagtcgtacaggcgcaggctcaggatctgaggtgtcagggttttcgatgttgggagtgagacatagggcctcagggctcggggtctaggtcctggaggtcttgggtttgtacagccagggtcccaaggctggcttt

SEQ ID NO: 37993 - DNA, 917 bp, Artificial sequence
  DNA replication origin
ggcagccacttggaggggttctgggctctcaggtggcagagtgagggaggggaagagttgggggcctggcgtgggggatggagggagccccgaggctgggcaggggccacctcacagcttttttccctgccagagggacaaattcccagctgacggggaccacaacctggattccctgcccaccctggccatgagtgcgggggcactgggagctctacaggtaagggcaagggagtgggctggggacaaggtgggaggcaggcagtgaagggggcggggaggatgaggggcactggtcgggtgttctctgatgtcccggctctatccccagctcccaggtgtgctgacaaggctgcgagcggacctactgtcctacctgcggcacgtgcagtggctgcgccgggcaggtggctcttccctgaagaccctggagcccgagctgggcaccctgcaggcccgactggaccggctgctgcgccggctgcagctcctggtatgtcctggccccaagacctgacaccccagacccccacccctggccccaaaatcctgtggcctgagtccttgaagcctgagaccccagacccgagtgcaacagccccgctctgagaccctgacaccctaacagcccgctctgagaccctgacaccgtaacagccccgctctgagaccctgaccctaacagtcctgctctgagaccctgaccctgcagtcccaagatcctgtggccctgagaccctgaggccctagacccccaaatcctgcccagaaacttcaaattctcacccaagaccctgagactccatcatccatgacctcaaagtccccagatcccagcccctaagacccaagaccccatcctgaagcccaaagccttgagaattcaaatcctcacctcaagacttggagaccctggc

SEQ ID NO: 37994 - DNA, 954 bp, Artificial sequence
  DNA replication origin
agagggaagcccgcctggccctgcgacctgcccgcgggcgttccaccctgggacttaagacctccagctccatcctccctaaggccgggagtccaggccccagaccctcctccccgagacccaggagtccagaccccaggccttcctccctcagacctaggagtccaggcccccagcctctcctccctcagacccaggaggagtccagaccccagttcctcctccctcagacccgggagtccaggcccaggccctcctctctcagacccggagtccagcctgagctctctgccttatcctgcccccaggtgtttgccgcctggtcctggtcgtgctgagcctgtggccagatacagctgtcgcccctgggccaccacctggcccccctcgagtttccccagaccctcgggccgagctggacagcaccgtgctcctgacccgctctctcctggcggacacgcggcagctggctgcacagctggtaggagagactgggctggggccagcacaggagtgagaggcagagaggaacggagaggagtctgcgggcagccacttggaggggttctgggctctcaggtggcagagtgagggaggggaagagttgggggcctggcgtgggggatggagggagccccgaggctgggcaggggccacctcacagcttttttccctgccagagggacaaattcccagctgacggggaccacaacctggattccctgcccaccctggccatgagtgcgggggcactgggagctctacaggtaagggcaagggagtgggctggggacaaggtgggaggcaggcagtgaagggggcggggaggatgaggggcactggtcgggtgttctctgatgtcccggctctatccccagctcccaggtgtgctgacaaggctgcgagcggacctactgtcctacctgcggcacgtgcagtggctgcgccgggcag

SEQ ID NO: 37995 - DNA, 944 bp, Artificial sequence
  DNA replication origin
ccacagtcgggccccagcgcttgagcctgagtgtctgctccggcccgtggaggtggagggaggggacgccaatgacctcaccagcccctctccgaccacccccccctttcccttttcaacttttccaacttttccttccgtgccctcctccgagcgcggcggcgtgagccctgcaaggcagccgctccgtctgaatggaaaaggcaggcagggagggtgagtcaggatgtgtcaggccgccctcccctgccgcctgccccccgcccgcccgccccagccccctatataaccccccaggcgtccacactccctcactgccgcggccctgctgctcagggcacatgcctcccctccccaggccgcggcccagctgaccctcggggctcccccggcagcggacagggaagggttaaaggcccccggctccctgccccctgccctggggaacccctggccctgtggggacatgaactgtaagttggttcatggggagggtggaggggacagggaggcagggaggagagggacccacggcgggggtgggagcagaccccgctgagtcgcacagagagggacccggagacaggcagccggggaggagagcagcttcggagacaggaggcggcggaggagatgggcagagagagacacagacaggagcggatggaggcagccaatcagaggcgccgcaggagggacgggccagacagggccccgagagggagcgagacgcggagaccgagcaggggcagggacgcagggactggtgccgggagggaggtgacccccatcgacccaggccccagggagcccgcggggaccgggagactccctgggattccggcagagaggctccggagggaaactgaggcagggtccgcggagagcggagcaagccagggagtagcgaccccagccggggggaggagagagactgggcgcgg

SEQ ID NO: 37996 - DNA, 1321 bp, Artificial sequence
  DNA replication origin
ccatctcctccgccgcctcctgtctccgaagctgctctcctccccggctgcctgtctccgggtccctctctgtgcgactcagcggggtctgctcccacccccgccgtgggtccctctcctccctgcctccctgtcccctccaccctccccatgaaccaacttacagttcatgtccccacagggccaggggttccccagggcagggggcagggagccgggggcctttaacccttccctgtccgctgccgggggagccccgagggtcagctgggccgcggcctggggaggggaggcatgtgccctgagcagcagggccgcggcagtgagggagtgtggacgcctggggggttatatagggggctggggcgggcgggcggggggcaggcggcaggggagggcggcctgacacatcctgactcaccctccctgcctgccttttccattcagacggagcggctgccttgcagggctcacgccgccgcgctcggaggagggcacggaaggaaaagttggaaaagttgaaaagggaaaggggggggtggtcggagaggggctggtgaggtcattggcgtcccctccctccacctccacgggccggagcagacactcaggctcaagcgctggggcccgactgtgggtgggggtccggctggaccaggactagcagagagagatggggaggcaggaggacggaaaggcagagaaaggccggacggagggacaagacaggggcctggagaggtggaggcaggaggaagagggagtggaagggaaggagagagagagagacacacacacacacagagtgaaggacagactgagacagagacagggagatggagatccacagagatggaggcagccagagagacacaccagagaagcaaagaggatcagaggggcagccctggagacagagggagaggttctgggagtcagagatcagagagcgggaggaagacagcaggagggacttggggagacccagggagaccccgaggggaaaggaacagagacaccaagactctgagacagaggatgccgcagctgaagaaaggcaccaggcaaacagagacacggggcagagtgacagggacggagaggccccagggacagaaaaggggagacagagatattagaaagacagagacgctgagatgttggggactcagcaatgggggcagagagtaaaagcctttctcattttttgtttgttttttgtttgtttgttttttggtactgagtctcactctgtcacccaggctggagtgcaatggcgcgatcaatggcacaatctcagctcactgcaacctccacctcc

SEQ ID NO: 37997 - DNA, 860 bp, Artificial sequence
  DNA replication origin
tcctgcagccacactgcggggacggagtctgagcccacaacccagggctggggacccagacgagacaggaaactggcagcggctgggaccccagatttgtcccagacccattaccttccccacacatgctccccaaagtgcagaagggccccaagatcctcctctacctttcttgaactagaatttagggcctggactcctgggtctgagggaggaaggcctgggagcctggactcctgggtctgagggaggaggggttgggggcctggactcctgggtgtgagggaggaggggctgggcctgaactcctgtgtctgaaggaggaggggctgggcctggactcccgggtctgagggaggaggggctgggcctggactcccaggtgtgagggaggaggggttggggacctggactcccgggtctgagggaggaggggctgggggcctggactcccgggtctgcaggaggaggggttgggggcctggactcctgggtctgagggaggaggggctgggcctagactcttgggtctgagggaggaggagctgggggtctagactcctgggtctgagggaggagggcctgggggcctggactcctggatctgagggaggaatggctggggcctggactcctgggtctgagggaggaggagctggagacctggactcctgggtctgaaggggaaggggttgggggcctggactcccgggtctgagggaggaggggctgggggattgggctctggtccctgtaggtggacggggctggcattaccagaacccttttcttgctccccagctggccccaggccagtcccccataccctcgggctagtccatcccccaagctggtggcct

SEQ ID NO: 37998 - DNA, 1002 bp, Artificial sequence
  DNA replication origin
cacacccctgactccctagcaacagaactcacaatcctggggcctggcgggcaggcgggcggggccggttgctggggtgatgtcctgtaaggcctcttcccacagtggccccaggggtctggggaggtgacatgttgggctgtgggatcccagcgctgggcctgctcctgctgctgcagggctcggcaggtgaggggctggtgaggcgggggagctgaggagggacgcccggctccacacagccctaacactgccctttctctcgcagacggaaatggaatccagggattcttctacccatggagtgagcagccgctgaaatactgggtcacccagggaggggagcccagatcagacccctgaatctgagggaggaggagctggggcctggactcctggatctgagggaggacgggggggtctggactcctgggtctgagggaggaggggctgggggcctggatccctggatctgagggaggaggggctggggtcctggattccttggtctgagggaggagggctggacctggactcctgggtgtgagggaggaggggctggggcctggactcctgggtctgagggaggaggggctgggcctggactcctgggtctgaaggagggggctggggcctggactcctgggtctgagggaggaggggctgggcctggactcctgggtctgaaggagggggctggggcctggactcctgggtctgagggaggagggggtggagtctggacccctggggccctgcacagagtaagcaccaggaaggcagcctgggagcatggccttggaatctcgtgtatgaggccttcggagcggagcgctgtgatgaagcaagccactggtggttggtccccaggctgtgagggtgacatatgggaccgggagagctgtgggggccaggcggccatcgatagccccaacctctgcctgcgtctccggtgctgctaccgcaatggggtctgctaccaccagcgtccagacggtgagg

SEQ ID NO: 37999 - DNA, 1105 bp, Artificial sequence
  DNA replication origin
ggagcgctgtgatgaagcaagccactggtggttggtccccaggctgtgagggtgacatatgggaccgggagagctgtgggggccaggcggccatcgatagccccaacctctgcctgcgtctccggtgctgctaccgcaatggggtctgctaccaccagcgtccagacggtgagggctcctggccccaggtccctggggcgtgggtctggcggtcgggagccccgggtcttaaccctgcctcccttgtccagaaaacgtgcggaggaagcacatgtgggcgctggtctggacgtgcagcggcctcctcctcctgagctgcagcatctgcttgttctggcgagtgggcctgggatagggcgggcgcctgcacccccagggggagggtccggcggagggcgggggctgagccgtccgctccctgcaggtgggccaagcgccgggacgtgctgcatatgcccggtttcctggcgggtccgtgtgacatgtccaagtccgtctcgctgctctccaagcaccgagggaccaagaagacgccgtccacgggcagcgtgccagtcgccctgtccaaagagtccagggatgtggagggaggcaccgagggggaagggacggaggagggtgaggagacagagggcgaggaagaggaggattaggggagtccccgggggactgctcaatacagatacggtggacggacgtgtgttctcttctctgaaagccgtggggagcagggggcatggtgcacacagaggctggggtaacaggtgggggctggagggggcttggggatggaggcttagggggcgccaggctgtggtcgtgggggtgtgagctgagggggagcctggaatgagagagatctgggaggtaagtggggaggatccgagctgagggggatctgcgctcatgggggtgtcctgggctgtgatcatggggaccctggactgaggggatagaggtgtacgagtgctggagtgcgggtctgaaatgagggagttgggggtatgtgggggtggtggggtctgaggggtgcctggactgggtggggagaggggcacgccacagctgtggaaacgtgcccctcagtctcctacatggagtgcca

SEQ ID NO: 38000 - DNA, 755 bp, Artificial sequence
  DNA replication origin
ggactgctcaatacagatacggtggacggacgtgtgttctcttctctgaaagccgtggggagcagggggcatggtgcacacagaggctggggtaacaggtgggggctggagggggcttggggatggaggcttagggggcgccaggctgtggtcgtgggggtgtgagctgagggggagcctggaatgagagagatctgggaggtaagtggggaggatccgagctgagggggatctgcgctcatgggggtgtcctgggctgtgatcatggggaccctggactgaggggatagaggtgtacgagtgctggagtgcgggtctgaaatgagggagttgggggtatgtgggggtggtggggtctgaggggtgcctggactgggtggggagaggggcacgccacagctgtggaaacgtgcccctcagtctcctacatggagtgccagtgactgacagtgccccccgcccccaccccagatgcacctagattaccatgggttgctctccaccaataactgagcatggcgaggcaaggggtgggggttccgggtacaggtgccttctcgaagggcaggggcctccctcatggacgatgacttcagctcccagctccccaggggccagtggcaattttcttggaggtgcggtacagtctaagactagtcctacccatccctccctccctctccctgcaccaagctaccctacaaaagtgtttccccaagacatatcttgcaagtccagtttgtctctgtgtctgc

SEQ ID NO: 38001 - DNA, 1383 bp, Artificial sequence
  DNA replication origin
taagactagtcctacccatccctccctccctctccctgcaccaagctaccctacaaaagtgtttccccaagacatatcttgcaagtccagtttgtctctgtgtctgcttctcagtgaacccaaactcacacagggatgttggggcttagagtggagggtctgggctaagatccttatcccccgccccctctctggccccctctgagaaggggccagcataaggctaggctcctatatccccagggctcctggtctccccagggcaggggcagcctcacctcaggtgtggccaggcccacctgggtgctagaaggaagcaagccacctcgtctccattcccaccccagcagggtccctctcccagacagacatgcagcactaaggcaaatctgctttttatccaagtgaggagggagggggtacagggagcgtccgtctggccacggatgtaggggcagctgcacatctcagtctggtcctgacagctggagccaaggggttgtctgcaggagggagggtggagtgagcgactgctcaggaacccctcccatccctgttccgggctctctgcctgcgggggcagaggcagggagccccatccgcctgcccttgccgctcacatggactcacacacttgctccttcatccctgcatgcccccatttgctgagtgtgtgcatgcgtgtgtacctttaacgccctgaaatccaagggtagaggccagggaatgcgagccagggagaggcagaaagggggagacgaagacatgcagaaggggaaaggcagaagcacagggacaaagaaagagacctgggagacagagacacagagacaaagagtgagagagagggagacaggcagacacagtgaagacagaaggaggccgggcatcgtggtcctcatctcagaccctcaccccagcattttggctgcaggcaggaggatcacttgagcccaggagtttgacaccagcctgggtaacataggaagaccccgtctctggtacctgtagtcccagttccttgggaggctgaggtgggaggattgcttgagcccaggaggtggaggctgcagtgagctgtgattgcaccactgctctccagcctgaacaacagagtgatgggggtggctctgcccggctactcatggtggtctcggaggttgtgggggtaccagagccagaacctgtgggtccctctgctaaaattcaggttctctgtctttcatgcgctggaagctgctcactctccccagtaaacaagagtcctgggtttgaacaggcccattttcctctaagtggggcctacgttcgagtcagtgtggtctgagtctttggtggaggctccaagagtggaggcctgtgcagctgtgttagacgtttaag

SEQ ID NO: 38002 - DNA, 762 bp, Artificial sequence
  DNA replication origin
ccctgttcctgctcttctctacaccaggagtgcccttggctgtctccactccacccagaaaacttctcacatgtttaagatttaacttaatttctctgggtcttctctgggtcttcatattgtctgagcgacccctcttgctgcttatatggccatgtgctgtgtctatgttgttactgtctctcccacctgacagggagtgccttgagggtaagacctaggtccctagcgtccttgttcctagcattgcccagcaaaaagtgtgaaatcaggaaaggttgatggttgggtagggaagtggaaggatggatggaagaacggatggctggatgggtggatgggtagatggatgggtggatggatggatgagttggttgatggatgcatgggtgaatggatgatagattgatagatgggtgggtgggtggatgggtagatcgatgggtgcgtggatggatgagttgtttgatggatggatgggtgaatgcatagatgggtgggtggttggataggtggatgggtagatggatgggtggatggacgggtgaatggacagatgggtgggtgggtggatgggtgaatacatgggttggttgatgcagggatgtggttggattgacggatggatgggttgtttaatgggtagatatgggtaggtggtgaattgggcaatgaaccatgaatggatatggttggagagggagccctgcctgataaaggggcaagagcttttcctgatacttctctgtgtcctcggcctca

SEQ ID NO: 38003 - DNA, 1614 bp, Artificial sequence
  DNA replication origin
atccacctatccaaccacccacccatctatgcattcacccatccatccatcaaacaactcatccatccacgcacccatcgatctacccatccacccacccacccatctatcaatctatcatccattcacccatgcatccatcaaccaactcatccatccatccacccatccatctacccatccacccatccagccatccgttcttccatccatccttccacttccctacccaaccatcaacctttcctgatttcacactttttgctgggcaatgctaggaacaaggacgctagggacctaggtcttaccctcaaggcactccctgtcaggtgggagagacagtaacaacatagacacagcacatggccatataagcagcaagaggggtcgctcagacaatatgaagacccagagaagacccagagaaattaagttaaatcttaaacatgtgagaagttttctgggtggagtggagacagccaagggcactcctggtgtagagaagagcaggaacagggaccaactggctatctgtggactaagagacaccattagtgcagagaggcaggagaaatggggccaaaatatggggggtccacaggccagtgagtgcttcagtttaaccaaaggtgaagagggagccacagcaggtctttgagcagaggcaggctagctggaaaggtgtgtttaggaaagagatagaaggtagaggggaaaggggagtgaatgtgtggtggcttcatttctcctgctgttggtccttcttactcctccttttctaggcctacaggtcaggaaaatcccagctcctcctttcctaggcctacaggtcaggagaatcccagctcctcttttcctaggcctacaggtcaggagaatcccagctcctccacctacgtgttgtgtggccttgggcaaatgtggcgcctttctgcgcttcagtttcctccactgcagaatggggatggtaatagtagtgaccttggagaccagttacatggagaggattaaatggggcctggtctgggctcagtggctcacgcctgtaatcccagcactttgggaggctgaggagagcaaatcgcatgagctcaggaggtggggaccaacctggcccacatggcaaaaccccgtctctactaaatatacaaaaattagcccggcaaggtggggcgcacatgtattctcagctacttgggaggctcaggtgggaggactgcttgagcctaggaggtcgaggctgctgtgagctgagatcacgccactgcactccagcctgggtgacagtgagagatcctgtctcaaaacaaccccaaacgacaacaaaacaaaacaaaacaaaaaatggggcctggtgtacctggaagctggggctctccccgtgcggggggcctaactgtgtgactcgacccccacacttcccatctccaggggcagggtctcacagcctcccccacgtatgcacctgtgcttgctgtgtctgcggttctccgccagagccttcccgtccctgtctccaccccgccctgggactctacctccccatggccgctctctgtctccatctgtccatcgctcccccgtctgtctccattcccgtccctccctcggtcc

SEQ ID NO: 38004 - DNA, 1787 bp, Artificial sequence
  DNA replication origin
tctcgatgttgccggtgtaccagaggatccagcccagcaggctcaggaacaccagcagcgcgcccgagtagatgagcaggtccccgaagtcgcggccgcgcacctgcagctgcgcgaacacgccggtcagcagcgccgccatgcccgccacatccagcgccacggccagcagcagcgccatccggcagcggcccaggccggccgcgggtgctggcgcggccgccggcgcggacggtgcacccggcgggctcccctgcgaggcgcacaccgctggcgccgccgccatggccctgcaccgccgccgctggcgcccagagagagcgttccggggtgcggcccggtccggggcggggtcaggggacggcgccaggtgtgccaagctcccgcctggtcacctgaaccgggctgggcgcgaaccggcgcggccggggttaccctggtcgtggtttccgtgcaggggctattgctcagaggcctgagctggtggtagccaggcgcacagccacgggtgcctagggcccgtgccacccagggaggtcacatatggccaaaaatcagggcattttagtggtggcagcatgggacactcggagccgggcgtggcgttgtttctgctcagtgtccgcctcccgaagcctgtgcagatcagacagtgcagatcagacaaggcctttagacaccaaggagctctgggacgcgagaaccagtagtcggggtgatctaagaggggaagctccgggttccgcggaagctgagtttccttcactcagcgcgtgtcttctggggtctcctgtgttcagcgaatgaagccacgggcacaaggacggacgagacccatcaggtccagagcgcacccgtggaggaagctgggcgaaccccgactgtcctatggaggatagtcctatggaccagacgaagcccctgccccaaggagtgcccgggtgtaaccgcaagttaaggagccctggggaggtgacacaggcaccctcattccttttgttcagtaggagtctctgaggcctccccagcaccatgccgcgtgggtgaggccgaggacacagagaaatatcaggcaaggctcctgcccccttagggtggccctgacaacggatcataacctcccagggagctgatggggtgtgacaggcacaccataggctggaggcacaggtggagggcagggaagaggaccggcaaatctatagaatcctaaagggagccaagagaagccacatgcaaatctccctccctccaaacaattctcccttagagggcatccgcgctcccctggggtggcagtcagcgagaagtttccgtgtaggttctccccaggcttaaacagtttaagagttttatttcaagaaaaccctggggagggcgaactgcaagagggctgccaggattagccgagggattccgaatgaagacggagtatttccgaacatacacacctctcccaagagcgtttccggagggttccgaaaatacccgagcgggcctcggcgccctcattggccatcaccgcgagggcttacgaagaccggaaatatccaaaggtgccggggctaggcttatatagttcacgcattcaccagttcattcataaaacaaatgtttgttgagcgcccatcatatgccaatcacagtgacaagtgctgggtgagcaatactggagagataacgctgaggtatgggtcccaggacctctcgaattggagccactcggaaatccagcggtagagtttcgaaaacttccgaacggttcccggaatacgctctcggccctc

SEQ ID NO: 38005 - DNA, 887 bp, Artificial sequence
  DNA replication origin
aaaaaaaaaaaaaacaaattggtgattggcagggcaggggctagaggggacatgagtgggagtggctgcttcatggatactgggtgtccattcaggatgatgaaatgttctggaataagataggggttgtggttgcaaagctttgtgaagactaaaaatcactgaattgtgcactctaaaagcgtggactttatgttacgtgaattatacctttttctttttttggagacagtcttcatctgagcctagggaccagctaggagcttcagggaggagagaggcctcagagattacagcctaaggaggctggggagactggacagggccagatcccgggccttgctggccctagagaaaggtttgggcttttattcctcatgggggtcgggggggggggggggtgcgtcggccaagggaggatgacaggtctcatttatcatttgtaaagatcaatttgctactgtgtagagaacagcctggagggacagcaggggagcgggcgggtgtgggaggccggtgggagctggggccgctggaggtgtgattcagacatgctagggatggctgggcctgggggagggccaggtgttcaagaggaacagaggagaggggtgctggggagcctctgggggattagccattgaggggtgtgtttaaatgagtggcttcatcaatgcagcgctgatggccatcgaaaggggcccgcagcctgtgtgtgctgatggagagacagcccagtgcattagggaaaaggagcaagggggaggttcctgttgccatgatccaatctgtgtaagacattaaaagatgaggctggggccggacgcggtggctcacgcctgtaatcccagcactttgggggaccgaggcggacggatcacgaggtc

SEQ ID NO: 38006 - DNA, 1248 bp, Artificial sequence
  DNA replication origin
ccagagccacatggcaccatgcagcggtcctggggcatctgtgagacacagaagctgcttttccaactttatttagaaaaacaaatccaggtcccagtgccccctgtaccctccccgaccccagccataatttaaataacttagagacagagttggagggaggggacaggagaggttggggtcacggtggaaggaggaagagagcccactacagccgccgcagcgcccgcttcttgtccgtctttttcttggccgccagcttcttatcgcgctcgccagcatgcttcttggccatgggaccctcagcccctcccgggccccctggggccccagggtcggtggaggaagcttcagtgccactggccagggcccgaccggcttcggccctgccgctgggcccgccggcgcccccgtggatctctgtgagcagacgggcccgagccgcatactcctcgtagttctccaagagcaggcggcccgcctcctcgttgagtgcagactcggggttagggtggatcagcaggcacttgatggtctgtgggaagaggctcagggtcacagtgggtcgggcaacctacagggacccccaggcctccacaagagggtggcctccgcactggctgttccttctgctcccaactcagctgcagatccaggccccacctatgctgcatcctccctcatctttgctcctgtctccctcagaggccaccttcatgtgacctgcctcacagcagatgttcccaaaaggacacgatgccataggcccaatggtttaaaatgtccctggtcctccgtggaacttgctgggtaacgggggaaacgccaaggccccctctcaggagtccattacttgcctgagccccagacttgagtcctattatggttttgaatttgcctccatgcagttcagcatgaccttagaggccctctggttcaacgagtgaggcctgcagcctggacagagagaagagacttccccagggcctcaggatttgaggaaatcacacctgcgtgttggactctaaagctccccatctttccagatacagcataaatcctgacctctgtcttttatcagacatccgaagttcacagcctaagactctagctgggttggaccacacacaagagggcaagacaccaggactgctggctgaggtgcacttcgagggtggtccagagattcctctcaacccccttcacagcccgtcctgaggggtaaattggagtgcagaggtgtgacct

SEQ ID NO: 38007 - DNA, 1723 bp, Artificial sequence
  DNA replication origin
gcggttataaagaggcagtggtgcgcgcgcggccggctcagtgctgccgggcaccggggcggcgggttggtctacgctgtgcgcggcggacgtcggaggcagcggggagcggagcggggccgccggggcctctccagggccgcagcggcagcagttgggccccccgccccggccggcggaccgaagaacgcaggaagggggccggggggacccgcccccggccggccgcagccatggtgagcacgggcgatgaggcccatgaaggtggtcgggggtgtccctgagggaggaggtggagtctcaggggcctccgacgggcggccttgaggggtttgagggccagcctgggggtccctgacccgggatgggcccgagggccttcccgcaggcggagcaggagctcgggcggcccgcagtctccctggcggcgagggctccgggcgctttgcggcccgcccatgggtgttaccaggagcaaggacgccccgccgccatctccagacctgagccggggtttcaaggatgctctaaccaaaaattagtggagaagggggagagagtagatctctggcctacgtggaaccactggggaccaagcagggttaggagcgggctttggggggggggttctggggtgggtggagttatctgcaagcccccccgtgaacccgcccccatttctgttggaaactctgcctgggctgatggcctgaagcatcctgggtgagggtctgggagttcaagggtgattgacagcctggggccactgagtcaagacttgggcagtctcagcatctttaggccctgcgggaagcccagctcttaacactcgctcaccctgctctcccatccgtgcccagaactccaacgtggagaacctacccccgcacatcatccgcctggtgtacaaggaggtgacgacactgaccgcagacccacccgatggcatcaaggtctttcccaacgaggaggacctcaccgacctccaggtcaccatcgagggccctggtgagtttggaaggaaaaagagaaggggctgctgcttagatcctccatcaccctgctctagatcaccctagcgggaagtacccattacaggctggcctcgtgtcaggtgttgggatgcattggtggacagggcaggacgccacaaatgacaattatgtactcttttcccacaagggttgagaaatatctggtcattgagttagtatatcatgggacggtactctagatttgaagcaaggctttcagacatggcttccctggacctgagggtgggtaggaattaagtaggaatgggaagagagctccaggtggtgggaatggtgtcagcaagggcctgggagggtgggccaggtgatctcaaactccatcctgctgtgagtgtcagggatgaggaaacaagccagatgcagatcgtggggagacgggtcatgaatgatttgcgggtcacatgatttgcggagtgatttagaatactgtttcatgcaggctacatttctgttatcaccagaattcctacaaagtcaggatttgagcagagcctgtgaaggaatggtctagtccacggtggtgatggtggtaggtggtcaggaaagacctggcagcggtgacagttgaggtccttcatgccttgctgcagagggcgcgggatcatgacaataggaaggctccagaaaggcccttgggcaggtggagctgggcgcttggtaaaaacaca

SEQ ID NO: 38008 - DNA, 1608 bp, Artificial sequence
  DNA replication origin
gaggcccctgagactccacctcctccctcagggacacccccgaccaccttcatgggcctcatcgcccgtgctcaccatggctgcggccggccgggggcgggtccccccggcccccttcctgcgttcttcggtccgccggccggggcggggggcccaactgctgccgctgcggccctggagaggccccggcggccccgctccgctccccgctgcctccgacgtccgccgcgcacagcgtagaccaacccgccgccccggtgcccggcagcactgagccggccgcgcgcgcaccactgcctctttataaccgcccgcaggccacgccctccgcggcccctcagctccgagcctcaaccgtgacgtcagcgcgcacgttccttggttttcgacgcgctcgctcccttccccgcaaactatggtcagaagcgagggaagtggcggagagggctgggtagcgggccggccaatgggggcccgcgggggtcgggagggttctcaaagaacggaggggctgaaaaggggaagaagagaggaagggggacggggaaggcgacgcggccgctgattggaccgtttgaatgagacgccgccacggcccggcatacgcgcgggcgcgccctgacgctgaggaagtcgcgcacgcgactaacggtcttcctgggggccggagcgtggcgaggggaggcgggactcggggttttaaacgcgtgatggaaggcgctcgggccaatagggatgcgctttagtgactggtgggtcacgagactcgcatgggccaatgactgatagagaccggtcagagggcgacccagtttcgtgcagatcaaaccgctgccagccaacgaaatccgttgatttttgtatatgcaaatgaagtgtgcgctgccgcccgcgccccctcctttgagccgtggtggaggtgggcgctggaactccgactacatttttctatgaggcgccattttgtgctggaaatgctcttggacccacgtcctgtattgctaaggctcaaagatcagtcagaatgaccttgaaggcttggacagccttgcactccgtgtgtgacccccactcctgccaggcttcatcgaagacgccagcctcagtttccttatgtgacaaatgggcactgggatccgttgtattgccagggaaagaagtcagagagtgccaagacggttattcacggcatggttatgcctatgactgacccatggcctccagccacacccgccttctctgggactcagtttccctctctaggaaatggacacatagctgcctggaaaagggaccatctccagccctcagtgtcagtaaaaacgtcaggcaattgcttgagaacggtggccagagctccctgagcaggccttttggaggggcttagagaggaggagggaatgctgaagttggccttcctttgctcatctgtgcagtgcggtcgcagtgccctctcggtgtctctgccagtctgtgcgtccacagctcttcttagtttcttggcctttttcagccatggatgagagcattaacatctgggcctaatttggccacaggtacctgaaaagacccctggctaccagcttcccctcatggggcctcagcttc

SEQ ID NO: 38009 - DNA, 927 bp, Artificial sequence
  DNA replication origin
tctccctgtgaagtgccccctcccatgctcccccaaccagacggggagatgcctgtgtgtgtgtgcttgtgtatgcatgggtttgtgtgcatttgcatttgttggggcatggggaagtctcagatgacgaggtcccagctcaagacatgtggaggggaattgtcagtacacacctgctcccacccctcaagacctctctcctctatggcttatttgagatcaaatcaaggccccagggtcaggcagcctgtgccaactgaatagggacagggctaggggtgggatccctggaatccaggctgggctagagctagtggaggggggataaaaaagctgaaaggcccagacccccaaatcccggcagctggagaaagctgagtgttccgcggaggtgttgagcagaggggagggggctgggagggggtgggtgctcaagctggctcctttctggggaagtcacagttggcctgagcagtgcggggctggggaggccctggaagggatgggaggagcccctcagagcagctagaagccgtggggttgaaaaactggcaccagggcccaggtggatttgggtaacccccatttcctcagtgtggtgggaaccaagggccagttgtctgccccaagctcctgacaagaaggagtgtgaggtgccagtgtttgcggggagacataagagggagggggacggcccaggggaggaagaagaggccccccccacctcgccctaggggctgggggaggggcgtgtagccctttaagagtgggggaatggccgcccccgcaacatggctatgtacaaagagaattgagggaagattgtgcattgggtgctggggacttcctgccacccccggaggctccccgggtgttaaggtgttagggagggaggtgaaggagcacccctggtcccgcagatgtgct

SEQ ID NO: 38010 - DNA, 920 bp, Artificial sequence
  DNA replication origin
tggatttgggtaacccccatttcctcagtgtggtgggaaccaagggccagttgtctgccccaagctcctgacaagaaggagtgtgaggtgccagtgtttgcggggagacataagagggagggggacggcccaggggaggaagaagaggccccccccacctcgccctaggggctgggggaggggcgtgtagccctttaagagtgggggaatggccgcccccgcaacatggctatgtacaaagagaattgagggaagattgtgcattgggtgctggggacttcctgccacccccggaggctccccgggtgttaaggtgttagggagggaggtgaaggagcacccctggtcccgcagatgtgctggcagggaccattgctctccagtgtccctgctgcaggatgaggccagcagaagacagcactgaaggccccagtcggtcaccagctttgacctatcccgcgggggtcagggatctctgaggagaatttggccggggccagtggagtgctgatcctggtaggggcccaagtgacagggattgggcagggggcagtggcgtcacctgagggttgaaatgcttcctctctggtgataatgagaggttgctgggttgaccctgtcaccaatcagatggctgggtgagggacagcgctgctgtcaggaggggcctgggtgcctcaccggggggtaaggtgaggttggctgaggccacatctgtggtgggattgatgcaggcatcatcctcggtcaggagtgaggcagtgacataaggagggccagagtaggggtgaagtcttcagagggggacagctggccccacccctgtccttttagtggaaacgggaatatggcctgttgtgctggttccccttaagtgaacaactgtaagtaccatgcggccccagaggacaactgaaata

SEQ ID NO: 38011 - DNA, 2182 bp, Artificial sequence
  DNA replication origin
cctgcgggccagtgtgcccccgcccccgccggcgtcggacatccaggccggctgcggcgagccgtgcagggcgtggtggtggtgggcgtgcaggctggacggtggcggcagcccgcgcagcggtgttgggggccccccgggccccagcagcaggttggagtgcgaggcggccaggctggcccgggcggtggggtcggggggcagcgcggggctgcgcgggggcgacagcaggtgctcgcgactctggcgcagggcctcgggcgaggacagcagcaggtgctcctgcgacaccaggcgcgcgcgcggcagcgtgaactcgtagcgcgaacggccaccatcgcccagcaggtgctcctgggacatgacccgccgggggttgggcgcgggcgccaggcccagctcctctgggccgccccaggcctccatgcgatagccgccccccgtgcccggccgccgcagcgcgtgcaggggcagcgtgccgcggggcaattccaggggccggcgcttcaggtaggcctcgtccagatccttctcggctgcggggagagggggaaaagccacagccgtgggtcccctgcgcatctagagccctccccctcccacctcgtcacatcccgctcctatgctccttgtgcccccacaaggatcctgggcatcaggctagctgtgaggccaaaatgcagattcccaggcccagcccacaatgctgggtcagtagatgtggaggacttcctcttcttcccccccgcgccgcctatcccttcttttgggagtagaacccaactcttgcttttggggaaccactgaccccctctcatcctgtagcaatgtgattcacacttggagttgtgacctgttaggttgtgaagttgattttgcgggtagtgagcagcattttgaaaaatgaaatcaaatagaacagaagagaaaactatcagaaagtgtttatgtaataagggaatcaggggtaagtgttggttcataaaattcttactgcagacgcgtgtgtgtgtgtgtggtgggtgtgtggtgtatatgtggtgtgtgtgtggtgtgtgtgtgtggtgtgtggtgtgtgtgcgtgtgtggtgtatatgtggtgtgtgtgtgtggtgtgtatgtgggtgtgtggtttgtgtgtggtgtgtgtggtgtgtgtgtatggtgtgtgtgtggtgtgtgtgtgtgggtgtgtggttgtgtggtgtgtgtgtatggtgtgtgtgtggtgtatatgtggtgtgtatgtggtgtgtgtgtggttgtgtggtgtgtgtgtggttgtgtgtgtatggtgtgtgtggtgtgtgtgtatggtgtgtgtgtggtgtgtgtgtggtgtgggtgtgtggtatggcgtgtgtgtgtggtgtgtgtggttgtgtgtatggtgtgtgtggtgtgtgtgtatggtgtgtggtgtgtgtgtatggtgcgtgtgtgtggtgtgggtgtgtggttgtgtggtgtgtgtggtgtatatgtggtgtgtgtggtgtgtgtggtgtgtggtgtgtgtatggtgtgtgtggtgtgtgtgtgcgtgtgtgcatggtgtgtatgtgtgtgtggtgtgtggtgtgtgtgtgcgtgtgtgtatatgtggtgtgtgtggtgtgtgtgtatatgtggtgtgtgtggtgtgtgtgtatatgtggtgtgtgtgtatatgtggtgtgtgtatggtgtgtggtgtgtgggtgtgtgtggtgtgtgtggatggtgtgtatggtgtgtgtgtggtgtatatgtggtgtgtgtgtgggtgtgtggctgtgtggtgtgtgtgtggtgtgtgtgtagtgtgtatggtgtgtgtggtgtgtgtggtgtgtgtgtatggtgtgtgtgtggtgtgtgtggtgtgtgtggtgtatgtgtatggtgtgtgtgtgtggtgtgtgtgtatggtgtgtgtggttgtgtggtgtgtatgtgtgtgtggtgtgtgtatggtgtgtgtgtatgtgtgtgtgcgtgtgtgcgtgtgtgtggtgtgtatgtgtgtgcgtgtgtgcgtgtgtgtatatgtggtgtgtgtgtatatgtggtgtgtgtgtgggtgtgtgtggtgtgtgtgtatggtgtgtatggtgtgtgtgtggtgtgtgtgtggtgtatatgtggtgtgtgtgtgtgggtgtgtgttgtgtgtgtgtgtgtgtgattgaaatattaaagg

SEQ ID NO: 38012 - DNA, 1003 bp, Artificial sequence
  DNA replication origin
gtttctccatccataaaataagaaacataacaatactcacttcatggggttatggtgaagagcaaatgaattggtgaggcaggtgattagaataatgtgtaacacagaaaaaaatactatgtaagtgtgggctgttgctattgttaaatatatataattatatatttaaaatatgatatatcatatttaatattgtatatcatttaaatatgatctatattattataatttatgatgaatgcatcagtggagaggtccaaggagctgtcaggggaactgagaagatgtggtctggtttgggggcagaagggcttctccgagggggaggtatttgagcaaaggcctggaggaggagaggcgttagaagggcttctccaagggagaggtatttgagcaaaggcctggaggaggagaggcattagaagggcttctccgagggagaggtatttgagcaaaggcctggaggaggagaggcgtcagaagggcttctccgagggagaggtatttgagcaaaggcctggaggaggagaggagttactggggctgggaagctccaggtggcagagcttgtgaggtgaccagacttgaggccagggagagggtggttggtgacctcagagagggccttgagcgccaggctgggctgaggaactccgcctccgtcctgagggtgatggagagctgcggaggagttccagcagaggagcaacacagccagcagtgggtggtagaaccggtcctctggaacccatgcaaagggcagagatgagaggaaagaggcccaggaggaggctgggatgatggtccaggcagcaagaggacaaggacggagctgggatcaggggtggagaggagaagagacatctgagctggatcttgaggcagatgggaagaagggcttcaaggcagtgagaacagcatggtggcatgtgcaaaggccctgtggcaggaccacgctgggctcactggagagagcagtgcggcttgagggaagggatgggag

SEQ ID NO: 38013 - DNA, 1590 bp, Artificial sequence
  DNA replication origin
cgccaacggcaccaggaccggccccgcgggcggggcgggcgcggcggcccgggcgccccctcccgccgagctctgccacggctactacgatgtcatgggccagtacgacgccaccttcaactgcagcaccggctcctaccgcttctgctgtggcacctgccactaccgcttctgctgtgagcaccgtcacatgcgcctggcgcaggcctcctgctccaactacgacacgccgcgctgggccaccacgccgccgccgctagctgggggcgccgggggcgctgggggtgcgggcggggggccagggcccggccaggccgggtggttggaagggggccggactgggggtgccgggggccgcgggggcgagggccccgggggcagcacagcctacgtcgtgtgcggggtcatcagcttcgccctggccgtgggcgtcggcgccaaagtggccttcagcaaggcgtcccgtgcgccccgggcgcaccgggatatcaacgtgcccaggtgcgtgtgctctcgggcgggaggactgcgagcctggggcggggcccagcaagggaggtggagccatccgaggaggaggggctgcagggatagggcgtggtggtcagagacccaggtggcggccgccggcgtagctgaaggtgggcaggggctgagaaagtcgcgccagagccggcccggctgttgcggagtgatgcagggagagggagaagcccagactctcattcattcgacacatatttcttgagcaccttctgtgggccaggagctggggatacaccagtgaacaaaacaaggtctctgccctggtggaaaagcctgacttccaaatccaagttcacagcctacaggctatgtgacagtggatgagttgcttaacgtctctgttcctcagtttcctgtccgcacaatgagactaatcatcgtccccacctattcggattgtaattaactgagttgattcgtgcagggtcctggcacacggtaagggctcattaactatcagtggcccagtccgtaagcatgtgcagtgtaattttagatgactgctgtgaagaaaatcagcggaaagtgttgagagagagggcgctggattagaggaagtgatccgaaaaggcctctgaacggagacccgaagggagggagcgaaccacgcagagatctgtgggcgagaggttttgggcaggggaaccgcgtgcaaaggccctcggtggcctgcagggcagggaagcgcccgtgcagctggcggcggtgggcagcaggaggtgaggagaagtaggcgggcccgggtttatcctaagtgtgatggggccactgcagggtcctgagctcgggcgtgatgccatctgtccattttttaaattatgcgggctgcgcgtgagactggagtgtacggggctagggtgggagtggggagacccgtgagggggctgttgcaatgatccaggtgagagattgcagaggtggtgagtagtggtctgatttgggatatgttttggaggttcgatccgtaggattgctgaaaggtatgaaggtgggggaaagaagagtcaaggtgatttaatgtttgaggtccgcatcactgggtaa

SEQ ID NO: 38014 - DNA, 1866 bp, Artificial sequence
  DNA replication origin
gcacccccagtccggcccccttccaaccacccggcctggccgggccctggccccccgcccgcacccccagcgcccccggcgcccccagctagcggcggcggcgtggtggcccagcgcggcgtgtcgtagttggagcaggaggcctgcgccaggcgcatgtgacggtgctcacagcagaagcggtagtggcaggtgccacagcagaagcggtaggagccggtgctgcagttgaaggtggcgtcgtactggcccatgacatcgtagtagccgtggcagagctcggcgggagggggcgcccgggccgccgcgcccgccccgcccgcggggccggtcctggtgccgttggcgcctgggctcgccgcgcccccgccgcccgtcagcgccccggtcaggcgccgcaggtgcgccagcagggcgggcagcgggcccgcgggctcggcgctcgtggcgttggacgggcgcgccctggcctggccggcgctagaggccaggagtacgaggagcaggagggccggcatggggcttgcagggggtcgcactgggccgccaggctgcggggagaacgagagcagaggttggagcgctgggcgggagagaaacggtcagagggtgagaaacgtagagatgggtgggcagagaggctggggagggcgggcggggggcggcagagtgtggggagcaacaggcgccaggaggcaggaagggcggagggagctgagctgcgtgggcccaagttggccgccccacgcgcggtgggcgacgatgggagagtaatggaaacgcgcccgggcacggctgggggagagaaatgagcatgggcggacagaaccgggatcaggcgagagatgaatgcgggagaagcgattgggagggtcgacagacaccagaggggtgtgcagacattaggacgaggagcgaggcgaggcgcgatgtaaggagaagaaacgggggcggcgaagaggagagggcaggggaggcagctggagggaggcgcgcgaaggggaggggagggtggcgaggggagtggggaccgcggagggagggaaggaagcgagacagatgaggggtgggtgggaaaggaggagtcagggagacggggaaggagggagaaaagaaggggaggaggaggagggggaggagagggagggaggaggagagagagaagttgagaatttgagtttatagaccaggcaagtgggaagaggcagtgcacggtttttcaacactgacattcggggaccgatgctgctttgtggtgagcgcctgtcctgagcgctgtaggatgtttagcagcgccctctccatgccagcagcaccacattcccccgagttgtgacaatgtaagatgtttccaggcattgccaaatgttcccctggtgggaggaggccacagctgcccccgtggagaaccactgacttacacccctatggtcctcagtgccccgaaatgccaatttctctcccttagttagatctgataatcaagggatcttaggtgccctccctccctccctctctctccctctctctctctctctccctggcatgcacacgcacacacacaccactgttacggcgtcgggtttgaagggtctctgtccacagctgaaccacaaccacagcagggtggttcccctgccgactggacctcctgccagctgcctgacactgacaggctcttatctaagctccctgtgccccaagtcccccatctgtaaaatggggataaggatggttatctctgagtggtcaggaggatgaactgagggaatatgtgtaaagagcttagaacagtgcctggcatattgcaggtgaaatatgaaagtgtttgctgctgctgctatttcagaagggagatacaggctg

SEQ ID NO: 38015 - DNA, 2277 bp, Artificial sequence
  DNA replication origin
ccatctctctgggtccctgtccccctgtctctctgagtctctgtcccctctctctgggtctctgtccccgtctctgggtctctgtccccctctctctgggtctctgtcccccatctctctgggtccctgtccctctatctgggtctctgtccccctctctctgggtctctgtacccccttctctctcaaacacacacaatctgccctgcctttggctctctgtcccctctcccaggacctctgtttccccttcagtatccctgtccctttctctgagcttctgggatcctggcccccagcccccagccaagagggttgggaggggacgcagcaggtggagtgtgcagcacagagctgggcagggggctggtggggggtgggggaggagctcccagaagcccagggaccctgcccaggctggctctctgacctgtgtccccacatctgtgtctgtcaggtcctgagctggggttcagcggggcatgcaagatgcagacgtgaagcctggggtcccgggccccttccccctcagctgtggaggaggagagcgccgttgtgtgcgtgagagccgaggtgggggcgggtgtggggcggaggtgtcacatggcgccttccacactctccattgctggtgagggtgtatttgcacacgtgtgtgcgcccctgaggttgcgtggctgtgagctgtgatgtgtgtggtcgcgggcccacgtggagccaggtggggcaggtccctggtcctgtcccagagctgtaagtggtcccagtgtgtaggggttgaaatgtgcagaagcccatgtttgtgttgtgtgtccacgtggagtggtgtgtatgtgcgtccgtgtgccgggaggaggccacaggagtgccaccaggtcctttcgtgttgtgtctgggactatctgggtgccctgtgctctgtgtcagcgtgttcggcagtgtctctgcgcagctttgtgtgaggtcagggaagaattcatccagtgtctggatggggccgctgtgtctgcaggtgcacgtcctctctccacccacctataggtgctgccctgaccaggaggggtagagaagctgtgtgtggtgtgtgtgcgtgtggtgtgtgtgtgtggtctgtgtggcgtgtgtgtggtgtggggggtcagtgtggtgtgtgtgtgtgtgtgtgtggtgtgtgtttgtgtggcctgtgtgtggtgtgtgtgtgtgtatgtgtggcctgtgtggcatgtgtgtggtgtgggggggtcagtgtgtggtgtgtgtgtgtgtgtgtgtggtctgtgtggcgtgtgtgtggtgtggagggtcagtgtgtggtgtgtgtgtgtggtgtgtggtgtgtgtgtgtgtgtggtgtgtgtatgtgtggcctgtgtgcgtgtgtcagtgtgtggtgtgtgtgtgtggtgtgtgtgtgtatgtgtggtgtgtgtgtggtgtgtgtgtgtatgtgtggtctgtgtggcgtgtgtgtggtgtggagggtcagtgtgtggtgtgtgtgtatgtgtggtgtgtgtgtggtgtgtgtgtgtggtgtgtgtgtatgtgttgtctgtgcggcgtgtgtggtgtggagggtcagtgtgtggtgtatgtgtatgtgtggtgtgtgtggtgtgtgtgtgtggtgtgtgtgtgtatgtgtggtctgtgtggcgtgtgtgtgttgtgggggggtcagtgtgtggtgtgtgtgtgtggcgtgtgtgtgtatgtgtggtctgtgtggcgtgtgtgtggtgtggagggtcagtgtgtggtgtgtgtgtgtggtgtgtgtgtgtatgtgtggtctctgcggcgtgtgtggtgtggagggtcagtgtgtggtgtatgtgtatgtgtggtgtgtgtggtgtgtgtgtgtgtggtgtgtgtatgtgtggtgtgtgtgtttgtgtggtctgtgggtggtgtgtgtgtgtatgtgtggcctgtgtggcgtgtgtgtggtgtgggggggtcagtgtgtggtgtgtgtgtgtggcgtgtgtgtgtaatgtgtggtctgtgtggcgtgtgtgtggtgtggagggtcagtgtgtggtgtgtgtgtgtatgtgtggtgtgtgtggtgtgtgtgtggtgtgtgtgtgtatgtgtggtctgtgcggcgtgtgtggtgtggagggtcagtgtgtggtgtatgtgtatgtgtggtgtgtgtggtgtgtgtgtgtgtgtatgtgtggtctgtgtgtggtgcgtctgcgtgtatcgctgagtttgaggggaggtgcgccactgctcctgctctccctccctgtccccctg

SEQ ID NO: 38016 - DNA, 1712 bp, Artificial sequence
  DNA replication origin
tacacactgggaccacttacagctctgggacaggaccagggacctgccccacctggctccacgtgggcccgcgaccacacacatcacagctcacagccacgcaacctcaggggcgcacacacgtgtgcaaatacaccctcaccagcaatggagagtgtggaaggcgccatgtgacacctccgccccacacccgcccccacctcggctctcacgcacacaacggcgctctcctcctccacagctgagggggaaggggcccgggaccccaggcttcacgtctgcatcttgcatgccccgctgaaccccagctcaggacctgacagacacagatgtggggacacaggtcagagagccagcctgggcagggtccctgggcttctgggagctcctcccccaccccccaccagccccctgcccagctctgtgctgcacactccacctgctgcgtcccctcccaaccctcttggctgggggctgggggccaggatcccagaagctcagagaaagggacagggatactgaaggggaaacagaggtcctgggagaggggacagagagccaaaggcagggcagattgtgtgtgtttgagagagaagggggtacagagacccagagagagggggacagagacccagatagagggacagggacccagagagatgggggacagagacccagagagagggggacagagacccagagacggggacagagacccagagagaggggacagagactcagagagacagggggacagggacccagagagatgggggacagagacccagagagagggggacagagacccagagacggggacagagacccagagagaggggacagagactcagagagacagggggacagggacccagagagatgggggacagagacccagagagagggggacagagacccagagacggggacagagacccagagagaggggacagagactcagagagacagggggacagggacccagagagatgggggacagagacccagagagagggggacagagacccagagacggggacagagacccagaaagacaggggacagagacccagagagagaggggacagagacccagagagagagggggacagagacccagagagagagggggacagagacccagagagagaaggggacagagacccagagacagggggacagagacccagaaagacagggggacagagactcagagagagagggaacagagacccagagagagagggtacagagacccagagagagagggggacagagacccagagagagagggggacagagacccagagacagggggacaaagacccagagagagagagggacacagacccagagacagggggacacagacccagagacagggggacagagacccagagagagaggggggacagagacccagagaggggacagagacccagagacaaggggacagagacccagagacagggggacagagacccagagagagaggggggacagagacccagagaggggacagagacccagagagagacgcaaaagagacgggcggggggcgggagacaaatgctcagaggggacgcagcgtcctagagaagtggggttcagagaccctgagaggagagagagccagagaggggaggacctgacctaccgaggggacagacgcccgagagagtcggcgcctctggggtctcgggagctgggct

SEQ ID NO: 38017 - DNA, 850 bp, Artificial sequence
  DNA replication origin
gggacagacgcccgagagagtcggcgcctctggggtctcgggagctgggctggagtggggtccgcagggggtgggtggggggctgaggggcgcagtgggtatggagagagaggccagggctgggccgggcgggcgccggtccgagtgcgaacggtggagctcctctggggttgacgggtcggtttggggtaggggtgtgcgttcaagaggaggcgggcccgggcgggtggggaaagcccagagggaaggggcgggctcttgctggagggcgcggggaccccagttccgggcgccaggggcggcggggcggggagaccctgggggctgcacgggggcgccgtgcctcgcgggccgcggggaaggcagggaccgagcgagggaggaggaccctcccccgacccgcagcccaggcggcggccggtcccggcgcccccgcccagatccctgcgccgcccggcccgcgtgcttgtctctgggtctctgcatcttcgcgtcccggggcgccccgtccacgcctcctcccggacccccgcctcccccgcccgtctctgtctctagcgggggtctcagccctcgtctgtcgctgcgggtctcctcgcatctcggcgtctctctccgcgtctctctccgtcccggcgcctgtgtcccgggctgtccccagctccgagcctcagttccctgcgcgcctccatttccctccttcccccgcccggtctccgtcacccctctgtctccacatcccgcttgtctctccttcctggctccacgtctctttctctgtcccaggtttgctgtcgtctgatctctgtctgagtgtctgtgtctccactcgcccccgacccggcccccc

SEQ ID NO: 38018 - DNA, 847 bp, Artificial sequence
  DNA replication origin
ggggggggcagggtgctgccttcccattggacagctgctcccggaaatgcaaatgagactcctggaaactgggtgggaattggctgagccaagatggaggcggggctcggccccgggccacttcacggggcgggaaggggaggggaagaagagtctcagactgtgggacacggactcgcagaataaacatatatgtggctgtggaccaaaccattcttgggttgggggggatcccgggggcgactgggggctgcaggagggagaaagcggggtccccagcaggtggggggggggaggtgcctcttctcggcgcgaggcaaaggcgagggctggcggctgacacatctgcacggacgcggcgcatctgctcggaggagaactgcggccggggtcgcccccagccggcgcgcgcacgcccagcccagctgccggcagacacgcgctccgccgccgcctccggccgccccccacgccgccacccccggctccccaagggtcccgcatccggaaagcgaggtgagcgagaccgcacccaggtgcggaagggaaactgaggcaaggggacatggagacgggaggaaggaagacacagccatgtggatgggtggatggatggatggaaggatggatggacggatggaaggaagggctgaaagcattgtagtcccggctcccccagacgcaggagttccgggacccacatgggggctcccagaattctgcagatctaggagttggaatctgcagacccccagggagagctcctccgttccagatttgcagcccttgcctcttccccaaccttggagacctgagaggccacccctgagtcctcagagacaccggc

SEQ ID NO: 38019 - DNA, 936 bp, Artificial sequence
  DNA replication origin
ccggggaagggggcatcaggcactcacagtgttcccaggggagggggactgagctttctttgaggagctgtagcaggccagggtgagcaccacgcgggaggagccagcagcctgtcttcacgcaggagtcagagcccagaggtttgagatttcagccacgggcagccatcagggtttgatgcaggggagctggccatatcagatcggcagtttacaaagttctttctggccctgtgtgaccagtggattagggagtgtggcatagaggggaggagggagacctgtcagtaaggaggttaatttgggcgcccaggcaagcggtgatgaggcaggggggatgcaggcttttttgttgttgttgttgtttatttatttatttatttattttattttctggagataaacttgctgggacttgctgatggatgaaatgcggttggttgctcatgtctatctaagaggcagttagatagatgagtcgagttcaggggcaaagtccaggctggatttgtgagctgagggcccagaagagggatgggagaaatgaggttacttaagaagaggaaggtgtagacaggaagccccagcacagagctgtccacccttagtggtccaagcccgcaaagcacaccaagatggcaggcagtgaggagctcaaccagtcacgtgtaatgaaagggaggccccaggaaaagtcttgagaagagggagtgttgtcttgggcagctgctagccagaaggtccgagagatgaagacggagaggtgtccctcagatttgtcatccatggagatcgggaccctagacgcttcctgacccatcgccccctgcccttacagatccagaaactcatcaaggagcccgccccagacagcggactgctgggcctcttccaaggccagaactccctcctccactgaactccaaccctgccttg

SEQ ID NO: 38020 - DNA, 879 bp, Artificial sequence
  DNA replication origin
tgaactgaaggagggagtgaccaggcggacactggggaagaacaggtcagcagagaccctctagatagaagccccttgacccgtccacacccatctccaactctccatctcctccgcctctgccccttccggcccgggtgcccctcctccagtttctcagactccactggccaccctgctaccggggtcagccaggtactgggcccccctgcttcaagccattggccctcaggatgctggagaggccccagaccttgacattcccaggccctcccaggtctgctccttaccttccttctagttcagctctgtgggacattcaccgagcacccactctgtgccagccactgtggtgagccctggagtctgcagcaatccatgttcagtgacacattgtgacccccagctggggcaggagttgcagagggatgagcaagagtggcagaggtggccctgaattctgagctgccggggaagggggcatcaggcactcacagtgttcccaggggagggggactgagctttctttgaggagctgtagcaggccagggtgagcaccacgcgggaggagccagcagcctgtcttcacgcaggagtcagagcccagaggtttgagatttcagccacgggcagccatcagggtttgatgcaggggagctggccatatcagatcggcagtttacaaagttctttctggccctgtgtgaccagtggattagggagtgtggcatagaggggaggagggagacctgtcagtaaggaggttaatttgggcgcccaggcaagcggtgatgaggcaggggggatgcaggcttttttgttgttgttgttgtttatttatttatttatttattttattttctggagataaacttgctg

SEQ ID NO: 38021 - DNA, 1542 bp, Artificial sequence
  DNA replication origin
ttacaggcacccgccactgcctggctaatttttgtatttttagtagagacagggtttcgccatgttagccaggctggtcttgaactgacctcagctgatccgcccacctcagcctcccaaagtgctgggattataggcgtgagccactgcgcccggccccatctgctttctgtctgtggatttgcctgttctgggcatttcaggaaaacgggatcgcacgctccgtggtctttgtgttgagatctatccaggttgtggcctgtgcagggtcccccttctttcctatggctgaagaatatggcctcagtttcctcttggagcagggtgaggatcagggtggacccttcattcaggaggccctggggagtgggctggcccaacacaggaggacgcccagcagagcctccgttttggggctgatggtaaccagggctgacagtaaccggggctgatgtaaccgggatctgatagtaaccggggctgatggtgaccagggcggatggtgactggggtggatggtaaccagggcagatggtaactgaggctgatggtaaccgggactgatagtaactggggtggatggtaaccggggcggatggtaaccgggatcatgaagcactccttgacgttgtgcacagtcctcagcaaggagaacacagggaccaggagagggacacccggagccacgtgtggatgtggcccagaaggcttcccaaggaagtcacctccctgccgaataggacagaaataagaaagaagcccattctaggcccggggaacagcagacacagagaccttgaggtgggaagaaggttggcaaggtgccccgggccctgccaggctctgagtgtgaggacctggacgccagctggagacactgagaggagccctcgggcctgacccaccgtccctctgcccacccccagaaaatggcggctgccaggcccagcctgggccgagtcctcccaggatcctctgtcctgttcctgtgtgacatgcaggagaagttccgccacaacatcgcctacttcccacagatcgtctcagtggctgcccgcatgctcaaggtatgacctcagccccccaccctcagacccaggatccaggctcagccctccaccctcagacccaggatccaggctcagccctccaccctcagacccaggatccaggctcagccctccaccctcagacccaggatccaggctcagccctccaccctcagatccaggatccaggctcagccctccaccctcagacccaggatccaggctcagccctccaccctcagacccaggcgtccaggcccaactcctcttccttcagacccagggatccaggcccacttcctcttccctcagacgcaggagtccaggcccagctcctcctccctcagactcaggagtccaggcatagcccctcctccctcacacccaggagtccagacccccagcccctcctccctcagacccaggagtccaggcccagcccctcctccctcagacccaggagtccaggcccagcccctcctccctcagaccc

SEQ ID NO: 38022 - DNA, 909 bp, Artificial sequence
  DNA replication origin
aaaaaaagaaaaaaattgctctatcacccaggctggagtaccatggtacgatcacagcttgctgcagcctcaacctcccgggctcaagcgatcctcccacctcagcctcctgagtagctgggaccacaggtatgcgccaccacacctgactaattttttaatttttttgtaaagatggaggtctcactctgttgcccaggctggttttgaactcctgggctcaagtgatccgcctgccttggcctcccagagtgctgcgattacaggtgtgagccgccgcacccggccttgtgttttattttcttttcagcactaactccaatctgaattggaaatgaatcttgctttttgaaaaatgcatggatatactcttttattgtctgttccccgccaaaacacacacatgcacacagaacagggagctccctgaggcaggggtcccgtctgcctcgttcacagctgaatcctcaagtcctagacctgggcctggcccatagtaggcgctcgatacatctttgggaataaatgacaggagagcagacattaggcagaggtgagcctgggtgagagtgaggggtggatgcccagatggggctaggcagaaggaagggggaaggcaggaaagcaagaagaggtggaggtggggcccctgggcccaggaggagacccctgaggcagtggtctgaagtgggggtctgggttggtttattttcccaggggctgccaggaagggagtggacaggttgggggctcctggagagggctgtagagccgtcgtggaggggcctctggcttgtcctgggttctgggctgggttgtgattggcctcatggggagctggtcccccaaccctcggggatcccctgagaatcccaggcacgaggcacctcccagcagtccacccaaccc

SEQ ID NO: 38023 - DNA, 1141 bp, Artificial sequence
  DNA replication origin
tgaggggtggatgcccagatggggctaggcagaaggaagggggaaggcaggaaagcaagaagaggtggaggtggggcccctgggcccaggaggagacccctgaggcagtggtctgaagtgggggtctgggttggtttattttcccaggggctgccaggaagggagtggacaggttgggggctcctggagagggctgtagagccgtcgtggaggggcctctggcttgtcctgggttctgggctgggttgtgattggcctcatggggagctggtcccccaaccctcggggatcccctgagaatcccaggcacgaggcacctcccagcagtccacccaaccccagtcgggagccacgagatcagcctcttcccccagggcatgctggggaaggggcagggggccgcagaaatgtgggacctgcctcaggtccagctggcccaggtcgcgatgggacagacccggcgctggcaggggagcatcagaaccagaggaggggtcccatggcattgaggcacactctggggtgagcgcaatgttgtcaaagaggtcgagggtagaggtgtccagggcagcgagactcaggctggcgctggcatggggagcctcagtgggggccacagcacaggccactcccaggaagggggatggaggcggtgggggtggcttttggagcgagggtctctggggaggtgcctcctgggacaggatggagagggccaggcgctgggtggcagcctcaatcttggtgaactgcctgtaaagacagatgtgagcaggctggtctctaacgcctgaactcaagcgatcctcctgcctcggcctttcaaggtgctgggattgcaggcttgagccaccacccccggccagcatatttgcaagggtcacctatgtggtcgcatcacaccgtgctagttatttattttggtgattcctgaccgtccgccacccccatgaaaacacaacctccacgacagcaaggaactttatctgctttgctaactggcctggcacacagtaggcactcaataaatgcacgttgactgttgctggcatccagccctgggggctgctcctctctgtctgtacctggtctcccccagccaagggtgctggttgctccttcccctcttccccgtcccgtg

SEQ ID NO: 38024 - DNA, 847 bp, Artificial sequence
  DNA replication origin
cctccacgacagcaaggaactttatctgctttgctaactggcctggcacacagtaggcactcaataaatgcacgttgactgttgctggcatccagccctgggggctgctcctctctgtctgtacctggtctcccccagccaagggtgctggttgctccttcccctcttccccgtcccgtgcccaccttccccaccagccccctcacctgcagatctggttgtgcagaaaccttctgtggttgggccgcctcttggggggccgggtgcgccggggctgcagggcccgcagcatgtgggcggccgccccgctcacaaaggcacacagctcccgggggccgggctcggagaccccagggccttcggggaccccggggtgcatggccagggtggtctggagtaactccccacaatattgctgaccaaagcaccccccaaatctgtgagcagggaggggcaggggactctggaggcccaggcaccccgggctggggaggaggcagggctgggaattgggccaaggcctccccactgtgccctaaccctgtccccacctcccaggagcccgacctgaagtctgagggagcggcaggtgggggctaatataggaaggcagggaacagggaggggagggggctttctggggccctctaagtgcccaattagcgcatagttggacctgggatatggacctggcgtgcgtcggcggggggcagagaatggtgcctggagatggccaattaagggaacaaaggcctcgttcgggaggcgaggccgccagtaagtcaaatgcagcgattgagcgtggaggacccttaattggagccgtggggagggggctgggagggag

SEQ ID NO: 38025 - DNA, 1575 bp, Artificial sequence
  DNA replication origin
gggactctggaggcccaggcaccccgggctggggaggaggcagggctgggaattgggccaaggcctccccactgtgccctaaccctgtccccacctcccaggagcccgacctgaagtctgagggagcggcaggtgggggctaatataggaaggcagggaacagggaggggagggggctttctggggccctctaagtgcccaattagcgcatagttggacctgggatatggacctggcgtgcgtcggcggggggcagagaatggtgcctggagatggccaattaagggaacaaaggcctcgttcgggaggcgaggccgccagtaagtcaaatgcagcgattgagcgtggaggacccttaattggagccgtggggagggggctgggagggaggggagctgggctgcatctgcccacccaccctcagacacacctgtgcctccctccctctgctcagcccagcaccttaggaggggaaaccgaggctcccaaaggggctggtgcgggccgaggtctccagccagcaggaggggttggctcctggagggtcacccccgaaatcctggggctcatagaatcctgagcagcagagtgagggaggagagggggaagggtgtggcaggacgggaggggacgggagaacagggcgcagtctcccccagggtgttttattgaggcactgggacccctggtgtctgtgggaggcagaggttgggccgggtccccttgtttctggaagggtgttggccggagcggggaccctgggtctcaggttgggtaggggagcaccgggtgtgacagcctcagtctctgcttggacccccaccctcgggggtctgctctgggaagccaggatgtttcccgaaattgatgtaacaaatgaccacggctcagtacctagaaccgcacgcgctgattctcctgcctgaagcagggatttaaacctgacatcatgagtttgcttcccaggcccgctcactggccagcagcactatgggcaaggtcagcagttgaggtcctaccaggcctagggtgggggccagcaggcaggtgggggcatattgggagctggggctgagtgcagccagtgatgttgccagaggtccagtttcctgtcagcaggacatggtgagaccagctgcagtaggacagacagacacccagtgccctcaccagccatggcacgtacacgttgactgctacccctgccatgctcaacactaccactgtgctgaaccactgcacaggtggggctgctgggcctggtgtggctggtgtctgtgttggggacaccattggcctcccatgtttctctcgggtgtctccaagggtctccagcctcctagacagcctcttgtactctgccccttggtccctctgcctgccagctgtctgtgactcacactagccccattgctatctctccatctcgcccacccttgctcgttcctcttctgctcctcctggctttctgtccatccctgggttatccacaattctctcaactatcatctatctatcacctgcctatctatggatctatcatctatgtatgtgtgtatgtatgtatatatctat

SEQ ID NO: 38026 - DNA, 1173 bp, Artificial sequence
  DNA replication origin
ccaagacctgacaactggagtccgcgaccacaactgggagaactacaactcccaggatgccgcgcaccgcctgcgcccgagctcgacgaggcctcgcacagccaatgggagggtccgggggcgggaactcggagtacgtgcgttgtgacgcaccgacggcgacgtcggggtttgtgtgcgcgagaggccgccgataaaggttgggtgcctcgcgccgggggccgttgggagggagtgcgcccctgccccccctccccggtccccacagctgcaccgccgctgccggggccccaccttcccgtcgacccccgcgggaaggtcctggggctgccaccctcgttcccccgattggggccgcaggtgagagaccggagggggtgggggtggggggagggaccggagggcggagaagttgcagggggtggggcgggggggggggcgtgaaaccggaaggggtaccttaaaggggagtcactatttcacctccgacatttgccagctaggccgggtccgccctcttaaagggcaaggggccacattgagagggcgggtcaggctttgcatttttacagaagctttctgacttaaaacaatgtttttcccctaaaaggcggttatctcattaaaggccagtgaccgtttcccagacattgaagcaaaaactcctgagtcctggttgcttcaaagcgatccctggtttagctcaacaaaagtggagatggggctccagtggcagcatccccttaaaggggaggtccagcctgctgaacgggtgtggcgcggccttttaaaggggatgtcttcttgttaaatgggaccccgctctttcagggcacggatatctcttttaaggagatgctggggcttctcaaaggcacgtgcagcttcttagcatcagtaggtttgttttttttttttttttttttttctggagacggagtcttgctccgttgcccaggctggagtgcagtggcgcgatctaacctgcttacatattaaagggtacacttatcttttaaaaaggaagttcttggctaggcgcggtggctcacgcctgtaatcccagcactttgggaggccgaggcgggcggatcacttgaggccaggagttcaagaccagcccaggcaatatggtgaaaccccgtctctactaaaaatacaaaaattagccgg

SEQ ID NO: 38027 - DNA, 1931 bp, Artificial sequence
  DNA replication origin
catccccttaaaggggaggtccagcctgctgaacgggtgtggcgcggccttttaaaggggatgtcttcttgttaaatgggaccccgctctttcagggcacggatatctcttttaaggagatgctggggcttctcaaaggcacgtgcagcttcttagcatcagtaggtttgttttttttttttttttttttttctggagacggagtcttgctccgttgcccaggctggagtgcagtggcgcgatctaacctgcttacatattaaagggtacacttatcttttaaaaaggaagttcttggctaggcgcggtggctcacgcctgtaatcccagcactttgggaggccgaggcgggcggatcacttgaggccaggagttcaagaccagcccaggcaatatggtgaaaccccgtctctactaaaaatacaaaaattagccgggcgcggtggcgtgcacctgtaatcccagctactcgggaggctgaggcaggagaatcgcttgaagccgggaggcgaaggttgcagtgagccgagatcgcgccactgcactccagcctcggtgacagagtgagaccctgtctccaaaaaaaaacaaaaaaaacacacaagttcttgtagcttgtccgacggggatgcctagccttcattcatttaaaatttgtttactgcgcacacactctgccagacattattgtaggcactgggatggcatacaacagtgaaccagacagaagcccctattttcccggcgttgacattctagcatggggaggcagaataaaacagaaagcacactggttatatagtagcggttctcatctgggggcaacggtgctccccaggggcgacactgcggctaagactcggaggtgcaggagtgagctttgtggacagcgtagaggagggcttcataggccaatgtcaggcgtccagtgggtcgaggccgggggccagggctgctgctcgacaccctgcagtgcacaggacagccctcaacagagaatggtctggccccacatctcagcactgctgaggctgagaatcctggtacattagaaggtgataattgctgcgggggaaaaataaggcaggaaaagggaatggggagttggaagggattgtagatttaaatagggctgtcagggaagctcttgcagaggggatttcagcgaagactcggaggtgaaagagcgagtggcgggcacaggtggaaaggaagggggtggttctaggcaggtgccctgaggtgggagcaggcgtgcctggccatcctgggtgaccagagtgaccaggggcaggtggccagtgaggatagcagtaggacaagtcagggaggggacaggctgcaggaagtcggcaggctcgaagaccagaactgtggcagatttctgagtacaggaatgcaatgcccagccctccctgttgacgggttcgcttcagttgctgtattgggaacagacgggtgggcagggcacgggtggaaacacggcgatccgtggggaggctgttgcagctgcctgggagagagacagtggtgcctcagatcaaggtggaggcctgtgagaagtggccagatcttggatatgttccgcctggaaggggaatctgcggacaggggcaatcgagagagaggaggcgaggagcctttggcctgaggaagaagacggctgccattttcagagatggagaagctatgggtggagtagaagttgggggcgaggagcagaagaccatagttagattttgggcatgttaagttggaggtgtctaatgaggcatccaggtggaacagtctagcaggtggtgtggcattcagagggtaggtcttatagagctggaggcctggagtcattgttcatagacagtggagtcctgagagtgggtgggggctcccagggagagaggacagacagaggacaaagtggtgccggagcc

SEQ ID NO: 38028 - DNA, 1480 bp, Artificial sequence
  DNA replication origin
gcctgaggaagaagacggctgccattttcagagatggagaagctatgggtggagtagaagttgggggcgaggagcagaagaccatagttagattttgggcatgttaagttggaggtgtctaatgaggcatccaggtggaacagtctagcaggtggtgtggcattcagagggtaggtcttatagagctggaggcctggagtcattgttcatagacagtggagtcctgagagtgggtgggggctcccagggagagaggacagacagaggacaaagtggtgccggagccccgggcgctcccacatctagaggtcagggaggtgagaaggaaccaagctggggactgagatggggtgacaggtgacggagggcagtgagggagcgaggtatcccggaggccagggggaggcgggccacggacccagtgacaagtgggccattgcgggccacgcgccgcccaggccatggagtgggggcacccgcgtgggactgaaggggtttgcgctgggaaagagcgggctgacacttgagctgctctgctgtgaaggaatggagaaacgagtctgcagctggacagggaagtggagtgaagagctttttggtttttaaagatgggagacatagattgttggttctgcagatgggaacgtccaggagaggaggaaaagtggaggatgtgggtgggaaggcacagtccacgggcactgggtcaggcctgtggggaaggattgcgcagggtttctggacctcgcactgctgacattgtggatgggattgttctccgctgtggggccgtcctgtgaattgtaggatgttgggcagcatccctggcctccacccactagatgccaggagcacttgcctctctagttaacagataaccccaaatgcctccaggcattgcgggatgtcccctgggttgaaggcacagtttgtcccagttgagaaccactagtatcgtggtcagaatgtgagaaacttcgcgtctgattgcttttattttcacagaggcatgatcaaggacagggttgcctgccaagaacaggaggggagaggaggggctggaggtttcaggagaaagaagcatgtcaggtagtcacctggggagtgcatgggccagagacatgtagtgtgagccagggagggtgatggtgagggggccgcagattttgtgggcttgaagggaaagtgagactgaggccaggcaagggggtgcctgtcatggccacctgcagcgtttgtgcagggtcgggcaggagtgaggatgtgggttggctggaggtgaaagggcgcgctggatggtagatgggctggagtctaaggatttggggagttggagcaccaagctagagtgacctagaaggctttgtggtgttgggaagtaggttgttccaggctcaaccatgaggacactttttttttccttttttttttttttgagatggagtctctctctatggcccaggctggagtacagtggtgt

SEQ ID NO: 38029 - DNA, 1736 bp, Artificial sequence
  DNA replication origin
ccagctgcgggaaggagccgtcgcagctgccgcagcggaacgcttgcccgccggcagccccgtggctgtgctggtggcgggagagcccagccaccgtccggaaggacttgccgcagggcagacaggcaaagccaggcgcgggggcggcggcgggaggagggggctgcggcagaggggacggtggctggtcggccttgggcgcctcggcgggtgcctcctggggctggggcgccgcatcgggcccggggcacggctggtgctccaggagcagctcctcgctgctgaatccctgctcgcagccatcgcagcggtacaccagctccaccgtggtctccgccgccgccaaaaagagctcaggcaccacgggcgggggcgggggcggcggggcgggaggcgcgggcgggctgtggggctggaggtgccgctgcaggtaggcgtcgcacacgaagaccttgccgggctcccgggactgggggggcggggccgcggaggcggtacccggggcgggggcggcgccgtgcgtgcgctggtgcagcagcaggttggaggagtgggtgaaggtcttggggcagagcgggcagcggaagggccgctcgcccgtgtgcacgcgctggtgctgccgcaggttggtgctctgcgtgaagctcttcccgcagactccacaggtgtagggccgctcgccggtgtgcacgtggcggtggcgccgcaggctggacgagttcttgaaggccttggggcagtccgggcacgggtaggggcgctcgcctgtgtgctgccttaagtggtactggtagtgggacgaccacttgaaggccaggccgcactggccgcagatgaaggcccgcaggccggtgtgcacgctacggtggatctgcagcagagaggagcgcttgaaggccttgggacagtcggggcactggtagggccgctcgcccgtgtggcctcgctggtggtagagcagggccgaggagcctttgaaagccttggggcagtctgggcacttgtagggccgctcgcctgtgtgcgtgcgctggtggtgcaggagccgggacgaccaccggaatgacttgccacactccccacattcgtactgggccgccggggcaggggccgcagggcctggcttctccccggccccctccgcagtagaggccggcgccatgtccgcgtgggagccgaccatcacacctgggggagggattctgggtcagcggctcacccccgcactggatcatctcaaccccaaacccacacacgggctctttaagggacagggactacctccccaggtcacccactttgcaggggaccttccttaggatgagggtctccaatggtcccagtttgcttgggacttgagcaggtgccagcgatgctgcactttcagtgctgaaatggaaactccccagcaaactgtggccaccctccttaggaggctagccaggtctgagaaggctggggcccgccttcaagagagcaagcactgcctgtaggagtctgctccctccctctccagacaggcagggtccctgaagaccacacgcagagaggctctcctggctcctccttgctgctctccctctaagaccttatcctccatctcggcctcaacactcctcccactgccataccctaagccttttcattttaactaaagcctcctcatggggccaggcactgtggctcacgcctgtaatcccagcactttgagaggctgaggcaggcagatcacctgc

SEQ ID NO: 38030 - DNA, 1077 bp, Artificial sequence
  DNA replication origin
ctcagctgccccgctctgaacaaccagcaggttgggtgcctcagtagccacagctcccccactggaattggagagctggccggccacgggctggagctggaccgtggtcacctcctgtgctggctggagctggaccgtggttacttcctgtgctggctggagctggactgtggtcacctcctgcgctggctggagctggaccgtggttacttctggggctggtcggaggggctggagctgcaccccactcatttcctgtggccctgcctccccaccccccacattctgcagaacgatgaggctctgccctgtcccgctggccccagcgctggccgctccctgcacccctagacccccagggcctggcagccagaccactcccgccccctggcccgctttccccactgcccgcgggccctgccttgcacggccgcccccagccccagcactggaggagggcagcaggatgagcttgggaggtgcgggagggggcggaggtgtagggggctgcacgctgctggggatcagctggaggccctgggcagtttgcaccaggaggaacgtctgagagttgggcgctgctggccccaagctcggggcctgggccgtgccccccgccacctcgagggagagcgtggcctggaggtggggcaggacgtggacatcttgggtggctggcggggcccgcgcagcagccagtggagcagggggctgggggccggcggcaggggctgtggtgctgggaggcgtgttggccggggcgtgcgtcctcaggtgccgctgcagataggcggccataacgaagccgcgaccgcagatggggcaggtgaaggggcgctccgccgagtgcgtgcgctggtgcagcagcaggttggaggagtgggtgaaggtcttggggcagagcgggcagcggaagggccgctcgcccgtgtgcacgcgctggtgctgccgcaggttggaggtctgcgcgaagctcttgccgcagacaccgcaggcgtggggcctctcgccagtgtgcacgtggcggtggcgacgcaggcacgacgtgttgcggaaggccttgccacactccccgca

SEQ ID NO: 38031 - DNA, 1147 bp, Artificial sequence
  DNA replication origin
cagcgcacgcactcggcggagcgccccttcacctgccccatctgcggtcgcggcttcgttatggccgcctatctgcagcggcacctgaggacgcacgccccggccaacacgcctcccagcaccacagcccctgccgccggcccccagccccctgctccactggctgctgcgcgggccccgccagccacccaagatgtccacgtcctgccccacctccaggccacgctctccctcgaggtggcggggggcacggcccaggccccgagcttggggccagcagcgcccaactctcagacgttcctcctggtgcaaactgcccagggcctccagctgatccccagcagcgtgcagccccctacacctccgccccctcccgcacctcccaagctcatcctgctgccctcctccagtgctggggctgggggcggccgtgcaaggcagggcccgcgggcagtggggaaagcgggccagggggcgggagtggtctggctgccaggccctgggggtctaggggtgcagggagcggccagcgctggggccagcgggacagggcagagcctcatcgttctgcagaatgtggggggtggggaggcagggccacaggaaatgagtggggtgcagctccagcccctccgaccagccccagaagtaaccacggtccagctccagccagcgcaggaggtgaccacagtccagctccagccagcacaggaagtaaccacggtccagctccagccagcacaggaggtgaccacggtccagctccagcccgtggccggccagctctccaattccagtgggggagctgtggctactgaggcacccaacctgctggttgttcagagcggggcagctgaggagttgctcactggcccgggccccggggaggcgggggatggcgaggccagcactggtgtggtccaggatgtcctctttgagacactccagacggacgagggcttgcagagcgtgctggtgctgagcggggccgatggcgaacagactcgactctgcgtacaggaggtagaaacacttcctcctgggctgacggagccgcctgccaccggcccacccggacagaaactcctcatcatccgcagcgccccagccactgagctgctggacagcagcaacactggaggaggca

SEQ ID NO: 38032 - DNA, 1037 bp, Artificial sequence
  DNA replication origin
acaaggaccagcaagcacctgcaccggtcgcctttggtccttcgacaaggtttcgggagcgggtctggaagggggtcgcgggcggaagtgacgtcagaccgcgcgcggtggggcggggcggcgcccgctccgggccgtagcaaccgttgctaagctccccggagggcgggctgggaggaaccgagctgtgaccctgcggagggccgggaagcgacctctcctatccctagagaaggagcaacggggaaaggggacctggggaagaacgggagcggaagccggcaggagacgggcggcgggctggggaccagcgcgagctcccgccccacgttccctcgttgctgagcaacctgagcgccgggcggcgacgccagcgcgtggattctcatccgtgccggggccttcgcgggaggagccggccacgctcagcatcctggcgcccgactcccccatccccagggaccccactccacccacggggcgcccggggtcgcagaacccttccgcataaggatccccctacttctcacacgaggggggcagcggggcgacctacagtgaacaagtagcactccctggagtctgatgtcaccacctccccactataatgacccctgcggccttttttggtttcaggacaggggaactgagccctacgtagtggctggccccaggatgcagaacaagccatctgcgacccaggacgcaagacttaagactccacgctcccaggcgggggctaggaccatgactttgcccccttccctccccccaggaaaacaaaacacaggcggggagactcgggtctttattagcaagcccagcctgcggcaccctgccccgccccggctggcagtgagtcggggtctctgtgcggggcgggaggggaatcactgcctctcctcaaaacgtgtgcaccagctggactgcgggtagagtctggacaatctggatggagggcaggccctgaggggtcataacaccaggcccagctcctgcggggaccacttgcaccatctgggaggctggagccccgg

SEQ ID NO: 38033 - DNA, 1581 bp, Artificial sequence
  DNA replication origin
ccagcatccctcccaccccccaggcggccacagccacggggaccacgagccgggcccggggctcccccatgcccccagcccaggcccgagcccgggcctccgcgaaggccagcagcctcctgcccacgccccggcggcggtgccagcgagagacagacaggcgggtgacccgggccccgtcccctgcatttgtgccaggggccagagccaggaccccacacacgtcaccggagccccgcacggccacccaggggccccccaggccacccggcggaggcagcgagccccatcgggcccgcaggcccagcttcacggcggccacagccaggaacaccggcaggaggagggccagggcgaaggaagccaggacaaagcgcaggccgctgctggccgccgccaggaggagcagggccggcggccgtgtcaaggcatggagggccacgcggttttccgtgtccttcacgccggcctgtgggcaggaggggtggctcagccatccgaaacgctagggcctcctggacaaagagaggaggtagaccctgcccggggcggggtgagagctcccaaatgggaagggaaggcagcacagtccgatgttcagtgtggcacactgggtatggagtgaatgaatgaacgagagcgaatgatggatggatgagtgaattaggagctgtgggggcactcaattcagtagcaatgccgcagtgaggccccagggaagtaaggacagggaggttgcctcaggctggagtggaggctggagggaggctgctgggctaggttggggtgctgggctgtgctttgaagagttggggtccgaggcacagagctggctgttgtgctggcgtgcacagccgactggagatgggagaccagggagggcgttggtgctggggtcccagtagggctgggggggtgagcccccacctgccacacctgctgtggttttcagcagcagggcggctgaggctcaggaggaaaagatcccgctccaggggtccaggctggctcaggtgggtgggagggggtggctgaatccacttgcaattcccccactgcagccactcccaggccccctggggcccctgcctctcaccttcagcatctccagcaccaggggcttctcatcttccctcatctcccgcactgacaggtggctgggggccatggcaacccccaggccccggccccccagaagggagctggcgtcgtgcacctggtgagaacataagtaggtcagcgtcaggggggcacctctgtccccaaagctcccccgaggggtagggagcagcaacggcacttcccagatcaggacactgagaaccctcggggcccccaagcgaggatctcggcaggacaggcgccccccacaatactcagcgaccttgctaaagtctcccgggatcccccctcccccgtattattcagcgatctacactcccaaacgcgctgcggacgccaacactgcagcacggggctccctcccaggcactggggtccacgaacaccctccccacatgccagagaacggaccacgctcgctccaccccggtccccagcgccccctcccccacagtcgtc

SEQ ID NO: 38034 - DNA, 1911 bp, Artificial sequence
  DNA replication origin
cagattgagcagggatcctcagaagggatgtcagggtatgcaggagcaccagcgaccagtcccggaagtttgagtccctaaactggacaagctaaggggtcagaggtgggggcctaggccccccgagtccccaaggagaatggatcactcaccaaggaggcaggccaagaccctcatggttgcagccagggcaggggatggggtgaaaggggaaggagagcggggagagaagaggaggaggcagctggggagagagggagggagggaagtgcctgctggaggcgcccaggcccgaggaggagcaggcagggctggacgctttgccaggaggaagaaagaggctgcagggaggcggcaggggacggtgggggggagggggggcgggagggggctggccgtctgctgaggcatgggggggaggggggtggcgggcgggagggagggtgtccaactgcagacacccacacgggagatggagacgacggccaggcaggctccagccagcaaagtgctgtgcccagagatgcttagggggtggccggctgcaggaaggcacaggacaggggttgggggacgtgtgcggggggggcgcagcatgagcgggaggggcgcccacctgctgtctcccctcttgtctggtcagggaaatccagtgagaccactgctagggttgggggctgggcagacctggggttcttggtgcagcagcaagaagatttgcagccagacaccaggagggacttcctgggttaggaaaagagactgaaagacccggccctccagtcctcccactcactggtggatctgagtgtgaagcccccagtccccagctgagagaggagaggttgaacttcactgtcccagagggagctggggtcgggggataagcagcacaagggtcaaggcttgggaaggggaggggctccacacactcttccacacactcacacacacacacacacaccccactgcctgcacaccaggcagctgtgaggcggaaaaaattcggtaatggggagcgtgactcagaagggctggcagggcctcgggctgcccctgagctcacagcctccccttctcccagtccagcaccgtcccccaacaattaatgttaactggggaaaggagaagccagacagaaatgggcgggggtgtccggagacagactgggaaagccatcagagaagagacaggcacacagcggtttcaggctttattaacaaacggtgtaaaaaaccagacggatctggaggaagggacagggctgcccgtctcagctctcaaccttcccagagaggggccaggcctggcagccctgtgcgtcgcgcctcctaagcagtcaaccttgtcccctccaaggacaggcatctgacccaatccaggtcccagggaggcggagtcgcaaaccctaactctggggtgtattctgctcggcctcctctccccctccccagatagctctcccagcctggggcacggacagcacagactttgcagacatcacccggggaggtttctcagtgcagacaggagctgaggtaggggttggagaggctgacctcgagaggcccccgagggccaggaaggaaaaggagtcattccactctgagaagctcaaacacaacagacttcacactgctgacgggtggacagaggccaggctcctcccctcggcaggcctctgtttctgggcccagggtggttgaggactcactgagggagagcaggtaaaagaacccgcagacagtaggcgatcatcaggtgctggcgcccctccctcctcccctgccctggctgtcagtctgtagcttcacaggtctttgctgaattccctcaccagcgtgtagcccaggcagccccagcccccctcggcctggtagccacagccctccagcatccctcccacccccc

SEQ ID NO: 38035 - DNA, 1321 bp, Artificial sequence
  DNA replication origin
gaggggatgggaggttgggtgtctctgaactgctgaacactcagacttgctggggctaaggacttggggttcctgggtcatctccaaaggagctccccctgaaggagcagccagggtgtcctcacctgcgcagacgacgcccgcgtcctcctcgtgggagcagatgtgggccttccagccccggtggtggcagaggcccagctgcccctcgttgccccggcaagccagctcgctgagccacacaggccctgccccctccccgaagaaggcgcctcccggggcggccagtgcccctccgcagcccagctgccggcaggccacggcggcatcgcgcaggtcccagccgtcatcacacacggtgccccagcgcccgccatgccagacctccaggcggccagcgcacccatgggggccatcggccaggcgcaggcgctctgagggttggaggaatggctgtgactggggaggggcatcctgggggccccaaggccagggcaactgtaggggcaggtggctgtcctgcaggtactgtctgtaggccagtggccctgctcactggcccctgggcccagactcctgggtgctcagagagatgcggccagacacctgggggattcccttgcggagctggggccaaggtcacagtggaattcggatgggccggggacccagtgggggtgaggccaggcctggatgggcagaagggggaggcctgggggggggggcgggcagatgggaggagtctgggcacttaccaacagcctggatccccaccagggccgctggaagggagggcggagggtggggcagtgtgaggggcaggccgggggtggccctttctccagcgcaggcccctcatcttgaataccccaacacacacacacacacacacacacacacacacacacacacacatgggcttggctaaaggtcagatgtctgggagatcccccgcagggtcagggctggggggcgggcagggggcaggtcccttgggcttctgggctggcagaaggctgggcagattgagcagggatcctcagaagggatgtcagggtatgcaggagcaccagcgaccagtcccggaagtttgagtccctaaactggacaagctaaggggtcagaggtgggggcctaggccccccgagtccccaaggagaatggatcactcaccaaggaggcaggccaagaccctcatggttgcagccagggcaggggatggggtgaaaggggaaggagagcggggagagaagaggaggaggcagctggggagagagggagggagggaagtgcctgctggaggcgcccaggcccgaggagg

SEQ ID NO: 38036 - DNA, 841 bp, Artificial sequence
  DNA replication origin
ggcggggggctcctgtcgtcagcagaggggcccgggtggacttggcctgcttgggccgggggctcttcttccgggaggcgttctgggggttcccagctgggcggggggctgggagtggagacagccaggggtcaggagctgagcccctcatccttcctcccacctgggggcccaggcctccgtctctgagggtctgaagtgatggaggactccctaggctatgaaggagacggggcggggcagggggcgggctgtgtgtcccctgggagttcatactgcagaggtccctctcccctcggtgggggcaggagggcacgctgggtgggggttggcagggcagtccctctcccctcggggggggcaggagggcacgctgggtgggggttggcagggcagtcccctgggctcaccatgtgtcaccaggggctcctccgtgctggggctcagctccagcaacagccctggccagggagccccatccaggggagatgttgagtcgtccctggagttagccacacgctgacctgcggcgggggggcagggacagaagctatgaggagaggaggggaatccaggccatttgggtccctggaagagggagttagccacctggctttggaggggatgggaggttgggtgtctctgaactgctgaacactcagacttgctggggctaaggacttggggttcctgggtcatctccaaaggagctccccctgaaggagcagccagggtgtcctcacctgcgcagacgacgcccgcgtcctcctcgtgggagcagatgtgggccttccagccccggtggtggcagaggcccagctgcccctcgttgccccggcaa

SEQ ID NO: 38037 - DNA, 3191 bp, Artificial sequence
  DNA replication origin
ctgcaggctcccccgaccccaaggctggttgctgtgaggcccagggcccagaaaaactgaggacctgcgggcgccctctccttagccggggccctggagggatcccagtgttccccgcgtccctcccccggggatttagacggccaggcctggtctcccctcttcttcctgccctgtcaggaggcccaggtgtcctggcccgctcaggtcgtggactcacctcttcacgggctgccggcggacagatctcaggccaccgctccctcaggcctgtttccccaggtggaaatcgaggaaggggtgtttgaatcatttctcactggccacaccgtcccctccctgctcaccccacagagcggctgcgcctggtctctggcccccacaggtgcgccggacgcctggaggtctggcacggcgggcgctggggcaccgtatgtgacgatggctgggacctgcgcgacgctgctgtagcctgccgggaactgggctgtgggggggcgctggctgcccccggcggtgccagattcgggcctggtgcagggcccgtgtggatggacgatgtggggtgtggaggaggagaacaggccctccgagactgcccccgaagcccctggggccggagcaactgtgaccacagcgaggatgcggggctggtctgcaccggtacgtcgggctggggcctggccccctcctgtcttcctcagaccccagctccctcttgcccctccaggaagctgcagcgggcctgctcccagctctgcctcctgcccgcctgctctctgcatgcccagcgcccactcaccacgctctccagcccctccttccacagctcctgccgttctccttgccaggaatgggaggagcaggcttgaggcttgggctagtgctcagccctgtcccggggcctaggccagtgaccgtttgtttaagcctcagttttcctgaaggagcgatggagctaagaatgcctgcctcaggcttgagccaagtcctggaacgcaagaagccctgcctgccctctgccaccgggctggccatggcaggggaccgtctcggagacctcttgtctctgtggccaacctctgctccttccccatcctcaagggagctggtgggaaggagggagggagggcggtgacttgggggcatggagggagactgaggcagggtggggacacccacgggtgagcctccatctcccctcattcacgccccctcagcgcggggtctcctcccctcatgtctcccagggggtccctcccctctcctgtaccccttggacctgggatagaacccagcaaacagcggttggggggtgttaggtgagagctcaggggctccctccctccttctctccttccttccttcctccctctttccctttctctttcctttctttccttccacaaatctttacacaccaccacggcaggccccaccctgctggactgcccgatccattgactgtaggaggccggcaggcagagggcacccacctggcatttcatcagcgttggggtggggacagtacacgggctgcaggcaaagctgggtgcctgcccaggatgggtaggaaatgctgacatcagtgggtatccaggggggagagaagagagaaagaggctgaccctagtctctgctgtatgctgggccctgcgctgtgcacgttacctggggccgctctgagcctcccgcagcccggacggggtggatcctcatccctctcttcacagatgtggggccgaggctcagagaggtgacgtaaatggcccaagacccaggtgcctagcaagctccagccccagccgctgacccctctgggtctgtatagacccacgctccatgcctgtcccactgcacagtcggccatagggacgtggtggggacacggaggtcagagtgggagtgagcagcagagaaggcttgtatggggtgggggtggtgccttcgtgtgcctagtgtacaagctgtgggggaagaagtgggaccttcggagcagagttcattggagggaagttgaggctctggagaggagagggtgaaggtgccaagaaaggaaacaaatgaactaaggcgcccggtgaagctgggagcttcgccagcatctgatttaattctcatggcaaccccgggagggagacgctcccctcccctgtctgcagatgaggaaaagcagacaggtgtgttagactcctccctagttctgtgctcttctctagaacagtgattgggggcaattctgcacctgcctcgttgggggacagagagagggactccagagtcctccaatgatgagtcaactcttaccccaacagaaatgtacccgaagagccaggcatggttacaggctaacacctgtagcccacgtgctttgggaggatttcttgaggccaggagttcaagaccagtctgggcaacatagtgagaccctttccctacaaaatataaaataaaaaaaaaatagcagggcatggtggcgcatgcctgtagtcccagctacttgggagaggctgaggcggggaggattccttgggtccaggaggtcgagactgcagtgagccaagattgcaccattgcactccagcctgggtgacatagtgagatcccctccccccaaaaataaaaaaatgaaatgtaccctatgtatcctaaggccagcgagaggttaatatctagactagtggctctcagctggcaagggagtgagggctttctcatccccttcctccccaaaggacatcaggcaatgtctggagacgtttttggttgtcgcagctagggggaggggttgccactggcatgtggtgggtagaggatgcagtgcaggacagttgccacgataaaggaggatgcccaatgccagtggtgctgagacttggaaatccggctctctaggatccgaggggccaggcatgggaggtggatccaggggaccagagccagagctcccagcgtccccagcccccaccgccccaaggcaagggatatgggggatgcgccagagttggactccgggccagtgacttcctgtcttggaaccttttcctcatttggatagtgaagatggaatatttgcttcccagagtcatcttggggttgcagcctgcctgagcatagcttagtccccgctcatccaccctcgtttcctggccctgtgctccctctcccactatccaggcccagcacctcgg

SEQ ID NO: 38038 - DNA, 1411 bp, Artificial sequence
  DNA replication origin
tcacatttgctaaagaaccagagactctggaaagtaaaggtaatgtttgagcagggctgttccttgaagctggcctgagtaccccatgatggatcctacagccacaccgtgcagcttgggaatagagcagactctcagcccagcatcctttctcttatccaggactggctacagaattttgggggcttggtaaatgacgaaagttaggaccccttgttcaagaattatcacacgctcccagacgcaacagcagagcattgaacccagctcagtgtcctgggcgaggcccctgtgctcctcttctccacctttctctttgcaagaggccccccatgagacagtctcagagctgagggaaggaaacagaaggaaggaccctgttttcttggggagcatggagggactcaccggcttccggtccaggctcccaaaggacagtaggggaggctggaggaggtgaaacgcctgccgtccctggagcctggctcgtcatggtggacgggggcctggaggcagcctccctgggcgtggagttgttgctgtccgtgggggccgtgggagggacgtagcccaggggcatgcctgtggagcagggggtaagtgattgccacccacacacaccctccatcccggagccggcacccccacctcctgcgtcatccttcctcagtcctctcagctgcacgcagagatctcttcctgccgaacctcctccctagacacagcccacgctttccacatccctgacctggggagaggggtgtgaatgcggagcacgggaacagagagagcagagggcatggtagcttaggggtggcagagaagcggggggtgaccttatgcagaggagaaggctggcttccgccgggggccaggaggcagggccagccagggctgccacggggctgaggctcatcctcgcctctgtttccatttggggctggactgttctcagctgtggaggcggcctgtgcactgcaggatcctaagcaacacccctggcctctaacccctgggtgccaggagcacccccacccccagctgtgaccatcaaaaatgtttccaaacactgtccaatgtccccttgggggcaaagccacccccagctgagaaccagtgacgcagggtgaggattcagaggggaataagatgggggagtggaaagtccggagagagggcaggaagggcgcgtagggacccccccgcccccgccgaacttgcccctccgctccaagcaccaccacgcccacctcccggtcctccaccacaaccccctcaccgtcacacacggccccggcgtcctcgcggtggtgacagtcatgctggccccagggccgagctgggcagaatcgtaaggccgtctcgtttccccgacaccgaaggtcgtccaggatgatgggtccagacccct

SEQ ID NO: 38039 - DNA, 1791 bp, Artificial sequence
  DNA replication origin
caaaaaatcaggccgggagcagtggctcacccctgtaatcccagcactttgggaggccgaggcaggcggatcacgaggtcaggaatttgagaccagcctggccaacatggtgaaacccgtctctactaaaaatacaaaaattagccgggagtggtggcacacgcctgtaatcccagctattcaggaggctgaggcaggagaatcacttgaacccgggaggtggaggttgcagtgagccgagaccacgccactgcactccagcctgggcaacacagcaagactctgtctcaaaaaaaaaaattagccaggcatggtggtgtgcatctgtaatcccagctattcaggaggctgaggtcggaggatcacctgagcctgggagttcaaggctgcagtgaactgagatcgcaccactgcacttcagcctgggcaacagagcaagatcctgtctcaaaaaagagagagagaaatttaccatgaaaaatggagtgagaaacagaggtggtgaaggtgagatctgaaagaaaagtgaaagactgagggggaaagacagataaattgaccaggaaaaactaggtgagaaacagagatgagagtgtgagactgataatgaaacaaaaagacagaaggacaagggagaaaaaaataaagagaaactgaccacgaaaactggagtgagaaatagatgtaatgagggtgagaaattgaaaaagaaagacagggaaaaagaaatgatgggaatatgaaactgacaacgaaagaaaaaaaatgagaaagatggtgagagagagcaaaagaaattaccatgaaaaaaatacggcataaagacgagtgtgagaaattgaaaatgaaaggcaaaaagagattggcacagagaagaaaagatagagaatttgatcatggaaaatgaagtgaggccaggcatggtggctcacacttataaacccagacataagcccagcactttgagagagtgagacaggaggatcgcctgagctcaggagtttgagaccagcctgggcaacatagtgagcccgtctctacaaaaattaaaaatgagccgggtgtggtggcgcacatctgtagtcccaccttttcaggaagctgaggcaggaggatcgcttgggcccgggcagtcaaggctgcagtgagctgagatcacaccactgcactccatcctgggcaatacagagatagagatgatgagggtgagaaatggataatgaaaaaaagagaccaacagcaagtgagaaacaggagcagagatggattcgcagggatcctgagagatggggatacaaggaagacaggcaaagaaaaaggcagaagaatgtggtgacagtgatgtgggggccaaagcggggcgtggtcccaggtgtggaaggagctgcagcagcaagacagaggccatagagcagagggggatggagctgtggccctggaggctgattctgctggccagagggaggggatggccagggtaaggagagaagctgcactccaggagtccccacctctgagccataccaggcccggaccagagcgtgagcttcaagaatgggtgaggtttcgcttgctctgggggagctggggtggggacgatgatgtgatgacagaatggcccttggttgtgggtttgactgagggccccaggcttgcatattgtgtggcttacaggagggccatgggctcaggattgctgagcttagcctgatctcttagatggtgtccttggctctgaagaagtgtcaccattgagcccaaggaggtaatgcgtttagggtctcaggagcc

SEQ ID NO: 38040 - DNA, 1029 bp, Artificial sequence
  DNA replication origin
ctcggagctcccgcttccggctctggaaacggaatgatagctctaactcacagctggagcccacccacccccaagtcacggcgcctctagggcctgcttcctccctccctttccccacctcaaggcccgcttcttggggcctggttgcccttcgcccagctattattactgcgggcgatgcgccggctggccaatcaggaggcgcagcgcgcctgtgacgtcacgaggtgcgaggcagatgaacgcctgccccatcccgtccctccattcccgggcccaccgcgcctgcgcatgcgtgctgagcgccagaaaaaaaaaaggcgggaaaggacgcttgcggcgagactctcctgcgggagcgggaggcttgggcctctcaggagggcacaggtacggggcgcggggcgacagaggcagaaacccaggcagccccagacggcgagcagggcgggagagtggaagggagggagaagacggagaaacagcgactgcgacgggcacagagggaggacagaaacgctgccccttaggtggggagtgaaacctcccgtgagggagcggcgagggcggcggggacggtgagaaacggacagaggagcccgcgggagacagaaacggagggaagggggctgaccatgagagaaacgagggggagagagaagagagcacgcgggagactgcagggaaggcgcgggagatggagactcagaaaacaaccgtaagagacaaaggaaaagataccacagcgctgggcctggggagagaacgcagtgagaaatggagacgatgagagtatgaggtgatatagcaaaaccgaccgtgaaaaatcgagtgagaagcaggtggcgaagctgagaactgaaagtgaaagacaagaggacggaagatacagaaacagtttgggcccagtggctcccgcctgcaattccagcactttgggaggccgcagcaagccgatgacttgagcccaagagtttgagaccagcctgggcaacatagtgagaacccatctcgacaaaaaatcaggcc

SEQ ID NO: 38041 - DNA, 1753 bp, Artificial sequence
  DNA replication origin
ttttaattagatactttgggggttttttttgtttttgttttttttggttgggggtgtcttaagcccctcaaatcctggagagggtcacacgtctcccctcaggggtctttcttcttcctctggggtagtggtggttggtgcaggcatgctggtggtccaggccatctctgccagtctcttcacagcctcacccagctgccccagaccccgggcagcttctaccagctgcgtcagccccagcagcagggcttggcgctcctgccgctcctgttccacgacctgggtcagtctctgcagctgaccacccacatccctcacagcagccaccagctccaccagggcaggtggctcacaagccatgacccttacaggtggtgttggggccacacatggaccatgggggcctgggctctgaccaggagttggccctagggtgagggggtcaaggggaggatgatccaaggggtgggctgtgggggaaaggagggggtcaggggacacagtaaggtcagaggctgagtgtggggtatgggtgggtggaggggttaggttggggctctggcttctgggtggcttgaagtcctcagtggacagtgggtccatgcttgtggctgtggaggacctggaggggctggactccaaggctggagagggctctaaggtgggtatctgggatgtggaggtgtgaggggcaggtgctgtgaaggtcaactgggggtgcagactgggcttgactgttggtgctagagtgggagaggagagttctgtccccaaggaggttggaagggacacagtagtgatgacaggggttgaggaagggtcaggagttgtggggtgaggggtcgtggtgggatcaggagtagtggtggggtaaggggtcgtggtggggtcaggagtcatggtggggtgaggggttgtggtggggtgaggggttgtggtggggtgaggagtcgtggtggggtgaggggtcgtggtgggatgaggcatcgtggtgggctgcatggtggtgaagggttgaggggttgtggtggggtcaggaatcatggtggagtgagtgatggtggtgggatgaggggtcgtggtggggtgaggggttgtggagtgaggggttgtggtgggctgcatggtggtgaagggttgaggggttgtggtggggtcaggaatcatggtggagtgagtgatggtggtgaagggttgaggggttgtggtggggtcaggaatcatggtggagtgagtgatggtggtggggtgaggggtcgtggtggggtgaggggtggtagggaagtgaggggtcacagtagggttaagggttgtgatggggtcaggggccatggtgggatcaggggtagtagtggggtgagggcttggggaggggtctggggatctagaatattctgagactgtactggagtatggagttgtgtccaaatctggggttgtgtcagattctgggacctgctctgaggtaggggaaaggctggtcacctccgacggtgtagaagggtcagaggtcagctctttgggcaaggtgggtaagggcgtgggtgagggctccggggtcaacgcgggaaccacactggagtcaggggtggacaaagcaaagtcagggcttgtcaagatgaggtcggggttcgtccgggaggccgggtctggggtgggtggtgaagtgtccggagcgtcagaggtcgcctcggacgtcaaggctgagtggggagtgagctctcgactggagtcagaggtcagcgctgggcct

SEQ ID NO: 38042 - DNA, 942 bp, Artificial sequence
  DNA replication origin
gaatgtgtcccaaaaagctggaggtggctgggatgcggcatgctgggtgggagtggagactgggcagggggcaggggggcacgaggtgttgattgctggcggcagctgaggattatctgaaaggtgataatgaccagcctgtcatgggtgaagcacaggggaggacataaacttcccaggaatggcctgaccccggcaggcaggcaggcagggacgacactaattaagtaatgcttagtgctggccggaggctgaaccccaaccagggatctcagaggccacgtctgctccccgacctgtccccaagatggtggcgggggtccctgggctctgcccatctcacgcacggggcagccaggttcccgccgtgcccacacaccgggccggggggcaaagcctggagtcgaacccagctgggctccagcacatggtccctgctgttaacctgcagggatgtcctgccgtgctcagcgggaggaggggcttgggggcacgggggtgtgggtgagtgggcgggtgggggtgagggtgtgtgtgcgggtgattgtgagtgtgcatgagggagtaagcttgtgagcgtgagcgagctgtatgtgtgggggtgaacataaacgtttgattgagtacaggtgtagatgtgagtgtaaggatgagtgtgagattatgagactatgtgtgagagatcaagacactgtatgagaaagcatgcacgtgtgtgaaagaatataaaagcatgggcgggcgcggtggctcatgccttgaatcccagcactttgggaggctgaggtgggacgatcacttgaggccaggagtttgagactagcctgggcaactagtttattgagagtttgtattatcttttttgcttctttctttctttcttgttttgttttgtttttgttttttgtttgtttgagacagagttttgttttcgtcaccccg

SEQ ID NO: 38043 - DNA, 772 bp, Artificial sequence
  DNA replication origin
ggtcacgcaggcgccgcgggcgggcgccgcctgggccttctctccttcgcaccttcctcctctctcccccgcccctgcttggcagctgccctgtttgcaaacactgtctcttcctctccgcgccctccttggcctcaggcccagagcaaggctacaactcggagctggatcgtgtgtcacgcactccctggcccctgcataccccgcagggcgcctgctgtggccaccgaggtgttgcctggagcggggctgacagcaggtgtgctcctgtggagtgaccccaaggagccttcgaatccaggttcaagccatagagttggggcctctgacctggacaatccgggtgagcttcctggagtagggatcattggggagaagaggggagtcaacaacgcggggggtggggggtgggggtggaatatatcaagacttcctgcccctttatctgtgaatctgaaatagcctgagctgttaggccaagaatgtgtcccaaaaagctggaggtggctgggatgcggcatgctgggtgggagtggagactgggcagggggcaggggggcacgaggtgttgattgctggcggcagctgaggattatctgaaaggtgataatgaccagcctgtcatgggtgaagcacaggggaggacataaacttcccaggaatggcctgaccccggcaggcaggcaggcagggacgacactaattaagtaatgcttagtgctggccggaggctgaaccccaaccagggatctcagaggccacgtctgctccc

SEQ ID NO: 38044 - DNA, 1288 bp, Artificial sequence
  DNA replication origin
ccagtgagtgtgcacgtgtctgagtgtgagtgtgcgtgcatgcgagtgtgcacattgtgcgagtgtgtgcgcgtgtgtgcaattgtgagtgtgtgcatgtgtgtgcaaatgtgtgcaagtcagtaatgtgtgagcatgagtatgtgtgccagtgtgcgtgtgtccatgagtgtgagtgtgcatgtgtccatgagtatgcgtatgtgtgccagtgtgcatgtgtgtccatgagtgtgagtgtgcatgtgtccatgagtatgcgtatgtgtgccagtgtgcatgtgtgtccatgagtgtgagtgtgcatgtgtgtccatgagtatgtgtgtgtgcgtgagtgtgcacatgtgtgtgaatgtgtgtgaatgtgtgtgtgcaagtgtgcacatatgtgcaagtgtgaatgtcctgtgtgcatgagtgtgtgtgcgattgagtgtatacatatgcatatgtgagtacaagtgtgcacatgtgtgcaagtgtgaatgtcatacgtgagcatgtgccagtgttcatctgtgtccacgagtatgtgtgtgcatgtgtgtgcaagtgtgaacgagtgtgcacatgtgtgcacatgtaaattcgtgggtgagcatgagtgtgtacgccagtgactgtgcgtgtgtgtccatgacttgcgtgtgtgtgcacatgtgtgcaagtatgaatgtgtgtgcgtgcgtgtgagtacaagtgtgcacatatgtgcaagtgtgactgtcctgtgcatgagtgtgtgtgagtgtgtgcgtgtgtgtgcgattgagtatgcatatgcataagtgagtacaagtgtgcacatgtgtgcaagtgtgtgtcatgtgtgagcatgagtatgtgtgccagtgagtattcatgtgtccacgagtatgtgtgtgtgcatgtgtgcaagtgtgaatgtgtgtgcatgtatgagtgtgcacatgtgtgcacatgtaaattcgtgggtgagcatgagtgtgtacgccagtgagtgtacatgtgtaagcataagtgtgtgtgcacgtgtgtgcaagtgtgaatgtcatgtgtgagcatgagtatgtgtacgccagtgtgagtgtgcatgtgtgagcatgtgtgtgcacgtgtgtgaatgcatatgcatggaaaggagggaggatggcgttgtgtgtctcactgcacgtggatgataatacagctttgtgcctgctgtgtctgcatgagcatctgagcttgtgtgtgctgacgtacttgtgtgtatggggagtgaatgtgacttgctatgtgtggacatcggatccgtgtgtgtgcgcgc

SEQ ID NO: 38045 - DNA, 973 bp, Artificial sequence
  DNA replication origin
ctggcctccgccctggagtacatccacgcccgcggcctggtgtaccgggacctgaagccggagaacgtcctggtgtgcgacccggcctgccggcgcttcaagctgaccgacttcggccacacgaggcctcgcgggacgctgctgcgcctggccgggccgcccatcccctacacggcccccgagctctgcgcgcccccgccgctccccgagggcctgcccattcagcccgccctggacgcctgggcgctgggcgtcctgctcttctgcctcctcacgggctacttcccctgggaccggcccctggccgaggccgaccccttctacgaggacttcctcatctggcaggcgtcgggccagccccgggaccgccctcagccctggttcggcctggccgccgcggccgacgcgcttctgcgggggctgctggaccctcacccccgaaggaggagcgctgtgatcgccatcagggagcacctggggcgcccctggaggcagcgggagggcgaggcggaggcagtgggagcggtggaagaggaggctgggcagtgaggaggccccgggggatgcagaaagggaagccgccccacccgaggcccccaaggccaacggcttttggtgtctcctcggtgtgttttcatccatggggcttgggattcccctcggcgtcctcctcctctctcctctctgcaggctgcattcctcccttggtccatgagggcctcagacctctgcatgtccctccatacctgccgccaccttccccagggtctcagacctccgcgtggctctcggtacctgccgccaccttccccagggcctctgcacttgctgtttgctcagggcactttaggctcatcccctcacccctcgcatttttattttttttgagacagggtctcgctctgtctcccaggctggagtgcagtggtgctatctctgctcactgcagtctcaaaatccacagctcaagcaa

SEQ ID NO: 38046 - DNA, 875 bp, Artificial sequence
  DNA replication origin
gcgtcccgcgaggcctcgtgtggccgaagtcggtcagcttgaagcgccggcaggccgggtcgcacaccaggacgttctccggcttcaggtcccggtacaccaggccgcgggcgtggatgtactccagggcggaggccagctgggcggcgcagcggtgcaccgcgggctgcgggaggcccacctgcggggagaggggtcagggcccagtgccccggggccacggaaggcaaccgagacccaggaagcaggcccaggacgccaaggaggccggtaaggaagacggtgaatagttggccctgtgaggcctagtgtgacctgtgaggcctgcgggtttagtgtggcctagggtgaccccgtgaggcctagtgtgacctgtgaggcctgtgggtttagtggggcctagtgtgacctgtgaggcctgtgggtttagtgtggcttagtgtgacccgtgaggcctgtgggtttagtgtggcctagtgtgacccgtgaggcctgtgggtttagtgtggcctagggtgaccccgtgaggcctagtgtgacctgtgaggcctgtgggtttagtggggcctagtgtgacctgtgaggcctgtgggtttagtgtggcttagtgtgacccgtgaggcctgtgggtttagtgtggcctagtgtgacctgtgaggcctgtgggtttagtggggtctggggtgaccctgtaggacctgtaggttaagcggggcctcgggtgaccctgtagggcctgtgacttgattggggtccagtgtgacctggggctgcctggtgagtctccatggtgtatcgtgtgagttctgtgatgtctatgaactccaaagaggcctaacaactccacgagtcctgtgggccccacgaggggcctc

SEQ ID NO: 38047 - DNA, 1400 bp, Artificial sequence
  DNA replication origin
tagtgtggcctagggtgaccccgtgaggcctagtgtgacctgtgaggcctgtgggtttagtggggcctagtgtgacctgtgaggcctgtgggtttagtgtggcttagtgtgacccgtgaggcctgtgggtttagtgtggcctagtgtgacctgtgaggcctgtgggtttagtggggtctggggtgaccctgtaggacctgtaggttaagcggggcctcgggtgaccctgtagggcctgtgacttgattggggtccagtgtgacctggggctgcctggtgagtctccatggtgtatcgtgtgagttctgtgatgtctatgaactccaaagaggcctaacaactccacgagtcctgtgggccccacgaggggcctccggggggtaggggaggcccagggaggcccaacgcagtggctgtggctcctgcggcccaggctgctcaggacgttcctgggaggccggtgaggcactcggaggcggcctggggtctgcctacgcaccttgggctggatgaaggccatgaggtccccgtgcaggacgggctccgtcaggaagctgtaggagtgtgccgactcgatgccaatgccgtaggccgtcacgatggctgagtgcgcgcccagcgagagccccacacagaactcgtacaggaagccacggagggacgtgcggggtttcgggagctgcttcagtgccaggggtgtgcctggggcagcagggacaggtatgggaggcgtgcagcagccaagggccacctgggccagctgctctgttcccctgtggtcccctcaatggcccctcagcttggactctttcccatagaccatctccacctcctccaactcccacctccctcctgagcccatcctaacagcatggccacccaagcatcaccagcggtaccaatagttatagcacgctggggaccagctgggggctcaggcctgcgatcccagcgctttcagagaccgaggtgggaggatccgttgaggccaggagtttgagaccagctcggacaacacagtgagaccctacctctaaaaaaagttttaaaaaggccgggcactgtggctcacgcctgtaatcccagtactttgggagaccgaggcgggtggattgcttgatgtcaggagttcaagaccagcctggtcaatatggtgaaacctcttctctactaaaaacataaaaatctagttgggtgtggtggcgcatgcgtgtaatcccagctacttggccggctgaggcaggagaattgcttgaacccaggaggcagaggttgcagtgagccgagattgcgccactgcactccagcctgggggacagagtgaaaaaaaaattaaaaaaataattagctgggcatggtggcatctgtaaaaaattaaataaaataataacagtacgtgg

SEQ ID NO: 38048 - DNA, 959 bp, Artificial sequence
  DNA replication origin
ctgggggactggattcctgggtctgagggagggaaagctgggggcctggattcctgggtctgagggaagaagagctgggggcctggactcctgggtctgagggaggaggggctggggcctggactcctgggtctgagggaggaggcactgggagactggattcctgggtctgagggaggaggcgctgggggcctggactcctgagtctgagggaggaggaggggctggggcctggactcctgggtctgaaggaggagggctcaactcttgggtcagggtattcacctgaccacagccagttccaggagtcatcacacgatgtcgctctgctcccagtgggggcagaaggggcgggcccaggggcggggccttacgacccccaaagtcggggcggggtcttgctcctaggcaggcctctgctggcatgagccctaagtgccgggcactgaccacagccggcggccggagggtcaggagggccttggaggaggtgaggtctggaggtctgagcccaggttgggaggtgggcaaggtgccctggcctgaggtgggcagcacctgagggtgactgtaccaggtggcccgagtcctcggtccctcaggggagcctgggctgcacctggaggctgtagagcggtggagggtgagggaaacagaatcagggggtccccagttgtgtgaattgtatgaggttccgggagagaggtgggctgggggcctggacccctgggcctggcggaggaggggctggggggctgggtcggagggaggtgggtgggctgtgaaagtgggaccccaggcctgtcaggagcttggggactgatcccaagtgctcggtcccatgcaggacccaggcgtcccaggccctctgcacagcccgccctcccagccctgagcccaagagcacctgtttgttctcaggagacagagtctactcatccacccccagggcccaagtc

SEQ ID NO: 38049 - DNA, 1285 bp, Artificial sequence
  DNA replication origin
tgaagggtgggtgcaaccgtcccagaaaaaaacaggggtctgaagtcccactgtggcccaaggcttggggacttcctagtggggcttaatctccctgtgcttacagcagggaggcactcactggcctgtattcctgttatgcgctttcaaactatttttattgttattcctctctttggaatcaggagccctcaggccctcctccctcagacccaggagtccaggtcctcaaccccctcctccctcaggcccaggagtccaggtcctcaaccccctccaccctcaggcccaggagtccgggtcctcaaccccctcctccctcagacctaggagtccaggtcctcaaccccctcctccatcaggcccaggagtccgggtcccgtgtagaaaatgaaatcatttctggaacccacccctgccttgaccccacccagctgccccatcaatgccccattgacaggtcagacacaagtgcttggagaggggtgtccaggggatcagatgctggggtctagtttggggaaagaatgagacaatgagattccagaacgatgcagtgtgggatgacctcagactcagaggggcgggaagcaggtgctggagcaactgggaagagaggccttgagggggtggggaggcctcagttctgccggaaaacttcagatgggtgggggaggctgaggcctggactcctgggtctgagggaggagggactggggcctggactcctgggtctgagggaggaggggctggggcctggactcctgggtctgagggaggaggggctgggggtctggactcctaggtctgagggaggaggggctggagacctgaattcctgggtctgagggaggaggggctggagacctagactcctgggtctgagggaggaggggctggggtctagactcctgggtctgagggaggaggcactgggggactggattcctgggtctgagggagggaaagctgggggcctggattcctgggtctgagggaagaagagctgggggcctggactcctgggtctgagggaggaggggctggggcctggactcctgggtctgagggaggaggcactgggagactggattcctgggtctgagggaggaggcgctgggggcctggactcctgagtctgagggaggaggaggggctggggcctggactcctgggtctgaaggaggagggctcaactcttgggtcagggtattcacctgaccacagccagttccaggagtcatcacacgatgtcgctctgctcccagtgggggcagaaggggcg

SEQ ID NO: 38050 - DNA, 1703 bp, Artificial sequence
  DNA replication origin
tgagtggacagatgggtgggtgaatagatgggtggaaggaaggactggtagatggatgggtgggtggatggatgggtgggtgggtgggtggatggatggatggatggatggatggatgaaaggattggtgggtgagtggatggatggatggatgagtgggtgggtggatggaaggatccatgggtggatggatgggtgggtggatggatggatggtggatggatggatgggtgggtgggtggatggatgggtgggtggatgggtggatgaaaggattggtgggtggatggatggatggatgaaaggtttggtaggtgagtggatggatggatgaaaggtttggtgggtgagtggatggatggatgagtggatgggtgggtgggtgggtggatgaaaggattggttgagtggacgggtgggtgggtggatggaaggatccgtgggtggatggatggatgggtggatggatggatggatgggtgggtggatggatgggtgggtgggtagatggaggggtggatggatggatgaaaggattggtgggtggatggatggatggaaggaaggattggtgggtggatggacggatggatggatggatggatggatcgatagaaggaaggattggtgggtggatggatgggtggatggatggatgaaaggttttgtgggtgagtgaatggatggatgagtggatgggtaggtgggtgggtggatgaaaggattggttgagtggataggtgggtgggtggatggaagaattggtggatggatgggtgggtggatggctgcatggacggatggatgaaaggattggtgggcggatggatggatggacggaaggaaggattggtggatggatggatggatggatgaaaggattggtgggcggatgggtggatggatggaaggaaggattggtgggtggatggatggatggatggatggatggatgaaaggtttggtgggtgagtgagtggtggatggatgagtggatgggtgggtgggtggatggaaggattggttgagtggatggatggatgggtgggtggacggaaggattggtggatggatgattaatggatggtgagtggatgggtgaaaggaagcaagggaggatgaatatatggatgttggatattaaataacagaataacttattggattgctgactggttggtggaatggatgttggatggacacactgttcaatactgttggaaggatggatggcttcatggatgaattgctgcctggccagctggctggctagacggatagataatcaattgatgaaataaactggggaattttagaaaagcctctgagttagagatggggtctagactcatacaagactaagattagggttaagaatgaaatttgagttctcactggagaagatctggatggtcagtttacaaaagatatataagaaatgttcacagtgggcctgagtgtttgagttaggagaatctttgaaagaagctaaaagaaggagctactggttataactggggttccagtggggaaaactgggagaccagctgggagttggtctacaggagtgcagatatggctgcaggttgaggttgaggatgatggagagaaagtctttgggagcatgtggtgggaacactggaggtagccactagtctggggttctagattctcaaaccccaagagtcaaacttttaggactt

SEQ ID NO: 38051 - DNA, 860 bp, Artificial sequence
  DNA replication origin
agggagggggagtcccaccccagagacccaagtgcgagacagagacagggagggtggagagagagagacggggagagaaggagacaaagacgcacaaagagagaggatagacggagcaagagagaggctgacagaaaggtgttcctgtagaaggaaggagagactggggttggctaaagagaggggaagagagggtgtggggagtaagggctatcacctgggaagcacagcagggaatacacccagagggtggcaggagggcacagagaggcagagacactcctccagctagacagagccggacagacaaggggcgactgaggctgaccttgcagacgagcttccatcccttggctctgcgcagcgagaacctgtggggtgcagggggctggttgctttctggggagccctgacgggggggtcccgcccaagggccaccccacatcaggaagccctgagatggagcgcagggcctccgagacccctgaggatggggacccagaggtgagagacgggagccaggggaggaagacagagagagaaaagaaggagagagaggcaggaggcaacacggggagagagaggaagagaaacagaaaacagggaaacgcaaagacctcagagacccagacccagggagagaggatgacagagatccaaggacacacagcgagaccaaggcccccagagaattggactcagaaacacacagcgggatgcacaggggaagaggacggtggagagagagaccagggtgggcagggggactgtgtgggctgaggatgcacccccactcggggctgggggctcctggcctgctcccacagacaggggcaggcggggcctctgtggcagtgacc

SEQ ID NO: 38052 - DNA, 1134 bp, Artificial sequence
  DNA replication origin
ctggaggcctggactcctgggtctgagggaggaagggctggggtcctggactcctgggtctgagggaggaggggctgggggcctagactcctggatctgagggaggaggagctggaggcctggactcttgggtctgagggaggtggggcttggggcctagactcctgggtctgaggatggaggaactggggacctggactcctgggtgtgagggaggaggagctggggccagcactcctggtgtgaaggaggagggctttgggaactgttccctggtccctggacaccagcgctcctggcctctggggcaagacagaggtgctcagctctgggccagtcatcccagctcaggtgtgtggaggggtctgtcccaccctttcctctgccctcaggcctgggccttgttgggggttcacaatatgttttgtcccgtctgtcctgggactggagcccagagtccaagctggtctaagtttggaagggagagggagggggcagcggtcagagggggtgagggaggggtgtggggggacaggatgtctctgtctctgagctgtcacacacacccctgtcccaggcccagagaaagggagggacaaaggctttgagagagagtcaggaacaaagaggaggagagagacgcagagacactggggagagcggacggagatgcccagaggggccgggagagacgggaaacagacagacagagagaggggagcaggcagggagcagagcgtggagacacccccagagttggtggagaaagagtggagacagtgtgcggacaggggagaggggccggcgacccacagagacgggacagggagggggagtcccaccccagagacccaagtgcgagacagagacagggagggtggagagagagagacggggagagaaggagacaaagacgcacaaagagagaggatagacggagcaagagagaggctgacagaaaggtgttcctgtagaaggaaggagagactggggttggctaaagagaggggaagagagggtgtggggagtaagggctatcacctgggaagcacagcagggaatacacccagagggtggcaggagggcacagagaggcagagacactcctccagctagacagagccggacagacaa

SEQ ID NO: 38053 - DNA, 1256 bp, Artificial sequence
  DNA replication origin
acttttctgtaggtttgcgactttccccaatctaacctccgaacagcaaaggaagttctacctctgcccctccttgggtcccttccagctccccagaggccagcgccacagcctgtttcctgcagatccttccagcgcctacgcgtcgctgccgttgctgtgtctttattaatagcagggctgtagtagtagtggaaacacgagtggggcaggcagcaggcctctgagtcacacaggcctggcccggggcccgctccccttctgaccttgtgtaacacgatcgtttctcggaacctcagtttcctgctccgtaaactggggataaatactgaccctttgggcagctgggaggatccagtgtaaagccccgcacagggctaggcgcggaacaggtgctgagaacatgagagcacctctgtccctggcgcttcccacagctacttcagctcctgagtcctgcaggaggaggggctgggcctggactcctgggtctgagggaggaggggctggggacctgggtctgaggaaggagaggctgggagtctgtactcctgggtctgagggagaaggggctgggagcctggactcctgggtctgagggaggaggggctggggcctggactcctgggtctgagggaggaggagctggagtctggactcctgggtctgagggtggagaaactggggacctggactcctgggtgtgagggaggaggtgctggagacctggactcctgggtctgagggaggaggggctggggcctggactcctgggtctgaggatggaggaactggggacctggactcctgggtgtgagggaggaggggctggaggcctggactcctgggtctgagggaggaagggctggggtcctggactcctgggtctgagggaggaggggctgggggcctagactcctggatctgagggaggaggagctggaggcctggactcttgggtctgagggaggtggggcttggggcctagactcctgggtctgaggatggaggaactggggacctggactcctgggtgtgagggaggaggagctggggccagcactcctggtgtgaaggaggagggctttgggaactgttccctggtccctggacaccagcgctcctggcctctggggcaagacagaggtgctcagctctgggccagtcatcccagctcaggtgtgtggaggggtctgtcccaccctttcctctgccctcaggcctgggccttgttgggggttcacaatatgttttgt

SEQ ID NO: 38054 - DNA, 1187 bp, Artificial sequence
  DNA replication origin
gctcagggagggagggggcagtcttggaagcagatgaggaaccagggagaggagagggacccacccaaagtcacacacagtgggagggagagagacagaggggcagacagggagagacagaggggcagagagggagagacagagggggcagacagagagagacagaggggcagagagagagagacagaagggcagagaggtcagagggggatcacgagagatcccgaggtcagggggatcgtgaggtcagagggcagatcacgagagacagaggggacagagagggagagacagaggggcagagagagagagacagaggggtcagagagggagagacagaggggcagagagggagagagagagggggcagagacggagagagaaagggggcagagagggggagagagagggggtagaggggggagagagaaggggcagagagggagagacagagggagcagtgagggggaggcagagggggcagagaaggggagacagagggggcagagaggaagagagagagggggcagtaaaggggggagagagggggcagagagggggagacagagggggcagagagggagagagagagaggaagagacacacagagagacagtgcgagagagggagagaaagggagggagagacagagagatgggaagagagacagaaagacagaggagatagagagggagagacagagacagagagagagggagagaaagccctgggcagacagacccggagcgcgggagtgaagcggttgggcagcctccagccttctgacagtgggataataaccctgctgctatttattacctcacccgctcaccagtgccagccactccacacacatcattcactcctttaatctccagcactctgtcggttcctagcacaggccacgcgctctcctctgcggcctctcacggacaactctctttgcctggaatgacctcccacccttggtttcaggcctccctttacatacacccccacgaccttccctacccctcccacaaccatctctctctctatcagtccctgctgtgggcacaattctaagagggtcctcaagacccctgttccccgggtgctcacatccccgctcccagcccttcagtcagacgctgctctaggtgcagatttaccccaggtagaattaatgttccaagttcaggcgggga

SEQ ID NO: 38055 - DNA, 892 bp, Artificial sequence
  DNA replication origin
cgggtccaattccatgtgacttgcttccttgaagcccatctgtttccacctcaggtgctattaacaaaacacagactggtgcccaaggggaagccggggacagccgggaggtgccaccgcagcgagagtgctcggggcttcttcgtgggagaaggcttcataccaaccaggctggagctgacctatgaagtgtgaaccactctccagaggggcccgaggctccacggggacccctgcctgcacgaccccagcgcccagccctccttcccgggcacctccccctgcccggctcccggcctccctggggcaagcgggttggaggccaagtccgggcgcctcccctggcccccttatctcgccacacccagccctgagcctggcacagacctggctccataaatatttgctgccgttcgccccactgctcccggcctccaacccaggctcctcccgccgctgggccttagtccaggctgggccctccccaggcatcggctctttgggctcagggagggagggggcagtcttggaagcagatgaggaaccagggagaggagagggacccacccaaagtcacacacagtgggagggagagagacagaggggcagacagggagagacagaggggcagagagggagagacagagggggcagacagagagagacagaggggcagagagagagagacagaagggcagagaggtcagagggggatcacgagagatcccgaggtcagggggatcgtgaggtcagagggcagatcacgagagacagaggggacagagagggagagacagaggggcagagagagagagacagaggggtcagagagggagagacagaggggcagagagggagagagagagggggcagagacggagagagaaagggg

SEQ ID NO: 38056 - DNA, 1697 bp, Artificial sequence
  DNA replication origin
gggcaagaaggacgacaaggcctcgggtgcacggaactcagccaaggggccggaggggggcgagggggcggagtgcgggggtgcctcggaagggggagaagggcagaacggaggcgacgccgccccggctcggccccccgccggggagccccgcttctggtgcccagagtgcggcaaaggtttcaggcgccgggcgcacctgcggcagcacggggtgacccactcgggagcgcgccccttccagtgcgtgcgctgccagcgggagttcaagcgcctggccgacctggcgcgccacgcacaggtgcacgcggggggcccagccccgcacccgtgcccccgctgcccgcgccgcttctcgcgcgcctacagcctcctgcgccaccagcgctgccaccgcgcagagctggagagggccgccgcgctgcaggcactgcaggcccaggccccgacgtcgccgccaccgcccccgccgcccctgaaggccgagcaggaggaagaagggctcccgctgcccctcgcaaacattaaggaagagccgccctctccggggaccccaccccagtccccgccggctccccctgtcttcctcagcgcctcctgtttcgacagccaagaccactcagccttcgagatggaggaggaagaggtagacagcaaggctcacctgcgcgggctggggggcctggcctcctgaccttcgccgccctgccctccgccgctccgcctgagctccccggtttgcagaatggaggagggaagttgaaggagccacctcctctgtctacccacccgtccccttcacgcccttgacactaaggagtggggggccctggactgccccttcctcccccatcgcccgcccccagaacccctgatgctggttaggaaccgctcaccccaacatgtgtcttaaggcaggacgacttggaaaaaaaggcggcggacagttggccagagggatggagactggtggggacgcccccgcctccctgtcccccgtttcacacactggacaccatcacctctttggaactgccagaccctgggggtccccagtgagcaaaggtctgtccttgtccctttgtctgtctgtgaataaatgtgagttcgtgaaatccaagagagcgaggtgttctgtggaggtggggcaggctgggggcgctggggcgagtcaggatttgtccagccaactctgaacttgggttcagagcaggaaggacacagatgcatcagaaaatatgtggccctcaaccaagcaagaagccggtgaaggctgggttgagaagaaacaggaatgtgagaagatagatcatcgtcaccgctgccctgtggaagctccgcgcgattatcctcaccactgccctgtggaagctccgcgccttactcagtcaatctctaccacacccttactctgtgtcagcggtggtactaggcactgaggaggagtccaataccttcctctgaaagagctggaattctagccctgcattgtccaacataactttttttttttctcagaaaagtttccataatctttcttccctcactctgttgcccaagctgcagtgccgtggtgcagtcatagctcactgcagtctcaaactcccagacccaagcaatcctcttagcctctcaaggagctaggactacaggtgcatgccaccacacccagctgattgtttcatttcttgcagaga

SEQ ID NO: 38057 - DNA, 2684 bp, Artificial sequence
  DNA replication origin
gtggaaggctcccccgcaggccacgtctcaggccacgctgcgaccgcctcctcctccgtggcccctgctgcagcggtggtgggcggctccgagccctcgtcctgcgggccccagctgggttcggccgtctccttggccaccctctcgatggccagctcgacctcgccgcccgcgtgctcctgagccaggtggcgcctgagctgggccggttctgggaaggtgcgggggcaggcggcgcagcgcagcgggggctggggcccgtggccgcgcaggtggcgggaaaggtgggccggccggcggaaggccttggggcacagcgggcaggcgtggggccggagccccgagtggctcagccggtgccgggagaggtagtaggggaaacggaagaggcggccgcaggtggggcagggcaggggcgccctaggggctccagcgccccccctgccacggccacggccccgaccacggcctcggccacggccccggcctcggccacggtgaggtgggctgccctgggcgggtggaggaggctgcggatccatgcctgtggggagagaggggagagatgggaagcggggcagagataaaaagaggtgcgtggggtgtggcagaaagagaagcagagacagtcagagatggagaggcagagagggtcaggtatttagccaggagagagatatgagacagagacaaagatgagagacaccgaggggaggccagagatggagagacaggaggagagagatcagagacagagcgacagagcagggaatagagacaggagaaggcagagatgggagacacagagaagtggggatggacagacagagaccaggagtcgcagaaagacaggatggtgaaaggcagagcagagaagagacagaggagagtgaggaacacccagcagagagacagagacacagagaagaggaaacaaagagacttggagaaccagaggcagagatagtgcaagagcagagatcagaagagcagtggcgggttgggggccggagagacagggagacagagacacagagggagtgaactgggcagaggcacggagggggacaaagtcagcgaaccgcttctgctccaggtcccccggccaggctgaacgttttgggaggggctgggacacagcccatggggcctgagtggagggggtgggatttgaagccggtaggccccggaaatagagtgtgttctcagatgccaggggctgggagaggtcggggagtaggagggttcagacttctggtctgagttgggagggggctaggggcccagactcttgggactgatggggatgggagctggggattgagactcctgggtccaggtcatgacggattggggaatctggactctggtatggaggaggtgtggattcctgggtcccggtggaggaggggctggggagggggctgggctcccaggacaagggggaggcgggggctggggacccagctgccgggaatccccagggaggaggcgactgagggccggacccctggactcgggagggaggctggtgggggtcgggggtcccaggtcctagaggggggccgatctcctccgggccaagcctgcagctccccgaaggcatgatcagcagaattggggccgggtcgaggccttgaggatttctcagccctgggcctggggcttggtcctggtcgctggggctgggttcttacctcgcctccttggctcctttcttccttccccacggccggccaaacgcggacggtggtggcggggagggaggggggcctgagcgtggtggggggtggaggaggaggctgggctcggtgtcactgcctaagccttccccccggaaacctggcctttcctcggagcctgaaagaggaaagactggctgggaagccggaagcgggaggacgggggacctggagaggggagggaaggcagcttgcactacagggtcctgtgaggggagggggctgggggcctgtcccccgggctcccagagggcggagggtgctgagggcctggaacactgggtccagctactcccggctccccaacatgcacacacacatattcattcattccttcaacaaatacacatttatcaggtcctgtctgtgccaggcactgtgtcaggccaggggagtggccgggggaggaagatgaatgaatcagtgacagaggcttcaggaagtactggcactctggatcagaacctggctccagccttcccttggctgtctgggtgaaggattctcccacttcgagcctcggtttccccctttgtgaaagcccctgcatatactcattcaaccctaagcgaccaatatttactgaatatctactacgggccagcctgcatatatttgtctacatatacgcatattcactgggaccttagcagccaatgtttactgagcacctactatgggctggtgctgtccttggtgctggagtcacagtggcaaaaaccggagctcactgtctgatggggaaggcagatagatacggatcaatcacgctggagtgcatgtgggggaacgtgtgctccgaggcagggaactgctatgggaatgcagagaacagaaggcactgagctgagctcacactgggaggaggtgattcctgaggtcttcctggaggcagcaatgtttcagctgaaattggcagaatgaaaccaacctggcgacatc

SEQ ID NO: 38058 - DNA, 914 bp, Artificial sequence
  DNA replication origin
gagtttttattctagtggcaggggagatagggaatccatgggacattcacacattgcctagtgtgtgttcgtgataagtaccatgttgaaaattaaaggccggcgccgtggctcacgtctgtaatcccagcacttagggaggccgagacgggaggatcacctgaggtcaggagttcgagaccagcctgaccaacatggcgaaaccccgtctctactaaaaatacaaaaaagaattagctgtgcgtggtagcaggcgcctgtaatcccagctactcgggaggctgaggcaggagaatcgcttgaacccaagaggcggaggttgcagtgagctgggattgcatcactgcacgccagcctgggcgacagagcgagaccctgactgaaaaaaaaaaagaaagaaaaaagaaaaaaagaaaagaaaaaagaaaattaaggcaaggtgaaggccagagggtgacgagaggctattttagcctgggtggacaagacaggtgtctccaggaagctgtaggagtgagggacgtaagcgaagctggatgcaaacctcgggagggctttccaggccggggcaaccgcaagtgcaaaggccctaactcgggacagagcggagagggcgatgtaacgcggagagggaggtaggaagggagggaggcaccggggtccaggcaagcagggccttgaggacgggggtgcacgtgggggtcattagggaagctctgggtgttattccgagggagatggggagccatggacgggagggtgttgggctcaggagtgaggtgatatgatttctgggtgctggaggctgcacgggagaggggggggctggaagcaggagagccaatgaggagggggagacggtgggactggcatcggggagtccagccctgagccagtcagcgacaagccccgcc

SEQ ID NO: 38059 - DNA, 2014 bp, Artificial sequence
  DNA replication origin
tattctgggggtctggtatagggtccaaggcagcatctaagaggcggggcctctgctcagacacgcctctaatgaggcagtttggtttccaaggggtgtgtcctataagattggtgacttctaaagggcgtgtctagtttctagggggcgtgtccgtctgttggaggtggatcatgtatttaagggacggaactcattttgattgatactgactctaattgtatttatttatgaaacagagtctcgctctgttgctcaggctggagtgcagtggtgcaatatcggctcactgcaacctccacctcccaggttcaagagatcctcctgcctcagcctcccgagtagctgggattacaggcatgtgccatcacacccggctaatttttgtatttttagtagaaacagggtttccccatgttggccaggcacggtcttgaactcctgacctcaggttatctgcctcggcctccccaagtgctgggattacaagcgtgagccaccaagcccagcctaaaccgactctaatttaaaagggcatgtactattcaaagctttgaaacttctcaggagaaaacgaggacccgtctctatttagggagtctgtcctaagagattccccatcccccccgcctggagccaaggatcagaaaatgaggcatcagcgactgacaggacaaggtttattgggggtcctggaaacactggggagagggacgagggggcaaggtcgaggctcacaggggcaccccctagccaaatgcccccttcccctagggattgggaggaagacagagacagacaaaccaacagagatggagagaaagaccaacggatgctacggagagagggaaggaaaccccagtgtccaccacctcccactcagatgagttcacaggataaagaattgcgtggaccggtccacacgctacaggaaaagagaggagtgtccgccctattcactctaaggaaggtggcaggccacagcctagaccagcccattccatgtgatgggggtgtgtgcacatagatcagtccattctactgggcaaggggatttcaggccagtctattctagtgtttggggcggggaagatcgttagggtcgatccattccacagtcggggaggggggattcgagggcagggggcatctaccctggtccctctttcagcacagggaatgaaaaaggggaaaggcagatttcggctatatccattttctggggtcaccagtgactctggtgggtggcatttggagggatctaggaaaattcagggacatgctccctccacattctccagatcaaggtcgttaggaatgatggctctcagggaatggggcagtcttcccttggtgggggtgggtgcccatcttttagtattagggctctcaagatgagaggtacttgtggagacccattgctcactgcaaagtccccatgtcttggggacttacggctacccacactcattccagggacctcaggctcaggagtctctccctagatttgggctcccctgccccagctaaggaccctgtttgtttgtggtcccccagctccggggcctttgtgggtttttggtggcccccacctctccagtcagggtcccctcatttcagggcctgcgtctggatttggatttggagggccggggcctcacgcgcagtcccgaggtcccctggtccaggccgagtccaggaggctgggtggagggcagggcgcacgcagcctggcagtcagtccatgccccggtgcagcttcaggtgcctggagaggttgctgagcgtgatgaagcccttgccgcagatgtggcaagggaagggccgctcggtgccgtgcagcagccggtggcgcttgaggtagcactcgtggcggaagaacttgccgcactccaggcacgggaacggcttctcgccagtgtgcaccagcacgtgccgctccaggtctcgcggtgagcggaacagcttctcgcactcggagcagccgaagatcttcttgccgcggccggagcca

SEQ ID NO: 38060 - DNA, 1356 bp, Artificial sequence
  DNA replication origin
aggtgcaggcgcctccccaccgccctcggggagcagccccccgagcttgggcacgccgccccccgcggggcccaggagcagcctgcggtccgaagccagaggagcgtcgcccgcctccgcagcggtgccttcgcccgccgtctcgggccctgcgcctggccccgcggcccaggcctgcgctgggggcgcgcccgggccctgcaggtcgtgcgtcagcttgtgccgctccagcagcgcgggcgcgttgaagtcgcgctcgcagcgcgggcacttgaagggcttcacgtcggtgtgcgccgcccagtgggccgccagctcgcggccgtggtcgaagcgccgcgcgcaggcgccgcacgcaaatgggggcaaggaggccgcggccgcagctgccgcctctgccagcccccagctgcccagacccgcgcctgccccctcggggccctctccgccgccggcccctgagcccccgcacaccgagcagggccccacattgcagcagacggagcagggcgcactcaaggcgggcaggccagggccgggctgcaggggagaggggagaaccccacggtgctggcgcttgaggtggcggcccaggctggagcgtgaggagaagcggagctcgcagaccaggcagcagtagggtttctcaccagtgtggacgacctaggggtgcgggaggaagggcacaacgtcagggctgagaacctagcccggacaacggattcctggactcccagagggttgtggcacaagctctctgtcacacctacagggccatgatctagggaaacgctcgtcctatcactctctgtttggggtcacggtagattctttcggtccttaaaaaggccatgtcctggctggccatggtggctcacgcctgtaatcccagcactctgggattgcataagcctaggtgtttgagaccagcccaggcaacacagggaaaccttgtctctacaaataattttaaaaactagctggacacggcacactcctgtggtcccagctacctgggaggctgagccaagaagtttgaggctgcagtaagccgtgaccatgccaccacattacagcctgcatgacagggtgagactgtgtctcaaaaaaaacaaaaaaacacgactgggtgcggtggctcacgtgtgtaatcccagcactttgggaggctgaagtgggtggatcatttgaggtcaagagttcgagaccaacctgatcaacatggtgaaaccctgcctttactaaaaatacaaaaattacccgggcctggtggcgggtagtcccagggacctgtagtcccagccactcaggaggctgaggtagaagaatcacttgaacccgggaggtggaggatgc

SEQ ID NO: 38061 - DNA, 1874 bp, Artificial sequence
  DNA replication origin
atggcgccgtgggtgtccctaagccccgccccttcccgctgccctcacccaagatggcgcgggcctggcttcttcaacctccagggctgggaaaggaaagggaaagagggagaagggcggggatgaggaaggggagccaagagggcgggagaaagggggagtacggcgggggaagggagctgaggcggaagtcgaggggccccccgggtggaagtgacgctgcccccgctgcccaaaatgtcggcgcccagagggaggtgtaagtaattaaagaggaaagccgacggacttccccggcctcccggggccgccccgggtctccaggaccaacgctccgtacgagcgaggtggactcgcctggccccggggcctgcccgacctgccccccaaccgggcgcccagggctgcaccttttaggggcagggggaggggcacaaaaggccggctctcggggcctggggcctggagcagactgggcaagtgggggggcccgctcctcaggctgcggggtggaggaggaggcggggcctagtggctgctggggcggagcaagggctgggaggagcctgagttgggcggagcttagagtggaagtgggaggggcgtggaggagggagagtctggatagaaaatgggagggtcttaggcaaagaggtggggtttgataaaggggcgtggctcagaaggaatggtgggtaggccctggattgaggggtggaaggaaactcattgaggctggttgggtaaagggagcccaggaagcaggagggaggagtttagagtagaagggatggagtttgtctggggtgtggcttagagaagtaggtaggcctagtgaggggggtggagtttaagggtgtaatttggaggggtttaatgcaactatcaggtctttataatgaatgtggaaaggacttgcaggggatgggaatagacttcgtagagaaggcctgagaaggtgacgggagtccagtggagagtcttagaaaggatgtggcttctttaaaggaaaaattgggtggagttttggaagtgggtcttagtggacccgagaggggcttagataagtcaaataacttagcaatcatggtaggacttaaggaggaatccaggaggaacttacgggataatagtcatccaaacagcttacttgttgcgtctttgctgtgcaccagcttaagtgggcacgtagcatttattgccacaattttacttaattctcgccaccactccatgaggtaggtactactattcccattttacagatgaagaatttttattatctgatgttacaggagtaattctggtctccctgcaaggatgactccagtgtgcttagccccaaatctttgccctcccattcgctaagtggtcatcctggaagaggagtgggaggagcttagaggggagtgggagggccttttggaaggaaaagggcttggcaaagaatacaagatccttagggaacattgtgggggactttgaagggagtaggtgggacttaaggaagagtgggagaggcttaaattacagtgggaggggcacagagagcagtggccgcgcattggcgaagagcgaggagaggcttaaaaacactccgtggagtgaggagactatgaagtgattaggaagattttgccacaggcgtggagccgcgagagaagggtttctaagagagtaggaggattttaaagaacaatgagagtggcttagagaggtgggcagtgggagggtctcccaggggacaggtggtgggtctgggaacctgggaggagagagctgatggggagccgaccccctcacctgctcctctgtctccccactactccagagagagcccccacataccactgtattccccgccaccatggatg

SEQ ID NO: 38062 - DNA, 860 bp, Artificial sequence
  DNA replication origin
gccccgcctcctcctccaccccgcagcctgaggagcgggcccccccacttgcccagtctgctccaggccccaggccccgagagccggccttttgtgcccctccccctgcccctaaaaggtgcagccctgggcgcccggttggggggcaggtcgggcaggccccggggccaggcgagtccacctcgctcgtacggagcgttggtcctggagacccggggcggccccgggaggccggggaagtccgtcggctttcctctttaattacttacacctccctctgggcgccgacattttgggcagcgggggcagcgtcacttccacccggggggcccctcgacttccgcctcagctcccttcccccgccgtactccccctttctcccgccctcttggctccccttcctcatccccgcccttctccctctttccctttcctttcccagccctggaggttgaagaagccaggcccgcgccatcttgggtgagggcagcgggaaggggcggggcttagggacacccacggcgccatacagactaagggcaaggagctgagagcgagggggcttctccgtggcgacactaggcgatgctaacgtaaatgagagcagatactatttctttttcacagcctcggactcctccgattaggatgtacagttggactagggaaaaaaaaagaaagcgaagtgcgccaactgcaatacagagctggaaaagaccggcaccatcttatccacttagcactccatgggcttcgaagcctgtccggtgccatgttaattacgggcactgggcagccattttcccgctcctcatcattcggtatctgtctttgggtcacccgactgtgggctttgtgag

SEQ ID NO: 38063 - DNA, 1835 bp, Artificial sequence
  DNA replication origin
aaagcgcagccggcagatggggcactggtacgggcgctcccccgagtgcacgcggtggtggtgcgccagctcgcccgcctcgcggaagcggcgggggcacagcgggcagcggaagggccgcaggccggcatggatgttgcagtgccgccgcaggtggctggagcgcttgaaggtcttgccgcaaaccttgcactggtgcggcttcagctctgagtgcgagatgctgtggcgctccaggtcggagaggtaggggaaggcccgcaggcacaccgggcagaagtgtggggccttcctggggccagagccctcaggcccagccgctgaaccttcagagaccgtatagggcacaccctgatcatcgatcaggaggaggtcgctcccgccactgctgcctactggggctgtcaccccctgcacctgcaccagtgggggctcctgccctgacttgggggggcggccccgcttgcgagggagggaggccttgagtgtccgatttgaggaggtggctcccccaggacgacggcctcggcggccccggggaacaggaggagataaggccagaggtttctcttcctccccgggcaaaggcgaaggcaacgggtctgggctgggggtgtccattgagcagtggggggcttgggtctgggcactggagccagctaagaggagagaggggcagagtcagtgctcacagggtctagagcacccctgtgtcccccaacacctcgcccatccctctctccaagtctcttgacaaaggtgtgtttgacattcatccagatacacaattttagctatgctggtgggtaaaacagtgagatgatcttgtatcagctgataaacaggcacttccctgagctccaccagacatccctatgcctccctaactctccttctggatctagaagttcaagatcaacatgagcaacacccctccccacctccccacaaaaaaaaaccttccagagaggatagagtccaactgagagtgcagaccagtattgtgatccttgaaacggagagcccatcaaactccagagccatagaggcctcacgaatgctctcatccctccctgctgactggcagaagtggggaaggggttccagagtggaaaaaagggactggtcccaggtgatatttgaccctgattcctggatgaggaaacatatctgcgatgttaagagcctgggccctggagtcaagacatcattcgttcaaatctttactctctgcgtggccttgggcaaggtgttcgcttctctaagccttaatcaagacttttgcaaaatgggacacatagttctacgtacttgcccagacatgccatgagcataatacccacaaagtgttcatacacagaagctttcaggacacattagccattgttatcaggagcagctaagcctcacatcaaccctctgaatagggcatatctgtcccattttgcagatggggaaactgaggcacaggaaagccaagtcagttgcctaagttcctctgccagtaaatggcagggccaaaactggaaacaggtcttgtgacccgaatgtcccagagaatggagaacaaataaacccaaggaggaaaggggacattacgagggctcagtcctgggtttgaattcagctctgcctataactagcaattgactttgccagtttcctcctctgaaaagtgaataaaccagggttgtcaggagaatcgaataagacagtgggctttaaaatgcccctcgaacactgcctggtgcacagtaagcactcaataaacttcaccaacgccaccaccatcttcccggcgcccactcagatactgggagcatgggattggggtg

SEQ ID NO: 38064 - DNA, 897 bp, Artificial sequence
  DNA replication origin
gccccaggaaggccccacacttctgcccggtgtgcctgcgggccttcccctacctctccgacctggagcgccacagcatctcgcactcagagctgaagccgcaccagtgcaaggtttgcggcaagaccttcaagcgctccagccacctgcggcggcactgcaacatccatgccggcctgcggcccttccgctgcccgctgtgcccccgccgcttccgcgaggcgggcgagctggcgcaccaccaccgcgtgcactcgggggagcgcccgtaccagtgccccatctgccggctgcgctttacagaggccaacacgctccggcgccatgcgaagcgcaagcacccggaggccatgggggtacccctgtgtgcaccagatccagggtctgaaccgccgtgggacgaggagggcatcccggccacagcaggggccgaggaggaggaggagacagaggggaaaggggagccggcctgacccacacccccggccatcgctccctgggccaggtttagagcagggagtttggctggtgctgggcctgagccagggggccgggacacccttgtttccggtggtcttcccgttgtgggagcaggtggagggtggagacctaaactttggggtccagctgccttcagcccccctcccccagactaacagacccttggaggcaggggctgtggaaataaatctctgcctgctggctgcctgtgtgtgttccgtgccgggatgccatcctctcctgccttcaaatgttcttcctcggctacaccgtcctgtcgggagtgcggggaattggagaggaccccacttcctgtgcctcatgagcgtggtgctcgccaaagaatggttttggggggaaccttggccccttccccatctccatcagaccccaaag

SEQ ID NO: 38065 - DNA, 1313 bp, Artificial sequence
  DNA replication origin
acccttgtttccggtggtcttcccgttgtgggagcaggtggagggtggagacctaaactttggggtccagctgccttcagcccccctcccccagactaacagacccttggaggcaggggctgtggaaataaatctctgcctgctggctgcctgtgtgtgttccgtgccgggatgccatcctctcctgccttcaaatgttcttcctcggctacaccgtcctgtcgggagtgcggggaattggagaggaccccacttcctgtgcctcatgagcgtggtgctcgccaaagaatggttttggggggaaccttggccccttccccatctccatcagaccccaaagtccatgggtccctcggagtccgcggggaattggttccacgaacctcgcagataccaagatctgggcatacacaagtccagcagtgggccctgcggaacccgcggatgtaggaaaatccgcccttcgtatactgtatgttccaccggtgtttgggtgaaaaaacgtccgcctctcaatggacctgcagttcaaacccctgttgttcaagggtcagctgtattcccagtacacatccaatctaactaaaaacattgaaccttccatgcagacctgactgtaggtccgaccgcctctctcctagccaattcccagaaattctgcagccactttgccccacctccttgtcctgaggacctactgtttggaaggaaaaattaagacaaaggtatgagcaggacggtctgggtaaggtttagagataaggggtgtggattggggcggggctaaggagcgaggggtggggctgagattgcggggcagttaggctgggacctggggcgggggcttagaagagggttagagttgggtggggcttaaagaggtttaggggttggtccgcagaaagtgagagcggtttaaagaggatggatagagttgatctaatagagagtaggggcttggagctggggaagaacaggaggaactgcgtgagagtggggcaaggaggacggataattttttttttgagacagggtctcgctctgtcatccaggctggagtgcagtggccctatcaccgctcactgcagcctcgacctgccaggctcaagcgaccctcctgcttcagcctccggagtagctgagactacagacgggcgccagcatatttagctaattttttttttttgagacggagtcttgctgtcgtccaggctggagtgcagtggggcaatctggctcactgcaacctctgcctcccgggttcaagcagttctctccctcagcctcccgagtagctggaattacaggcgccc

SEQ ID NO: 38066 - DNA, 1369 bp, Artificial sequence
  DNA replication origin
cagacgggcgccagcatatttagctaattttttttttttgagacggagtcttgctgtcgtccaggctggagtgcagtggggcaatctggctcactgcaacctctgcctcccgggttcaagcagttctctccctcagcctcccgagtagctggaattacaggcgcccgccaccacgcctggctaatttttgtaattttagtagagacggggtttcaccatcttggccaggctggtcttgacctcctgacctcgtgatccacccgcctcggcctcccaaagtgctgggattacaggcgtgagccaccgcgtccagcctaatttttgtattttttttttttgtagagacggggttttgccatattgcccaggctggtcttgaactcctgtgctcaagcaatccgcctgccttggcctcccaaagtgctgggattacaggcgtgagccaccacgccaggccaagagaacggattttaaggtgaggggcggagcttataataattcagctctgaggtgggcgtggttcagggccgagggccgggggccggggcttaaaggagaaactctgagggaacagggtattggaggtgggacttagaaggtgctgatgggggcgcacgactgctatggaggcgatggggagagaaggaagtacttaatctaagggaagttcctgggagagtggaagcttagcaggaggggctgaatgggtctgggtttggctgtttgggatggggctgagttgggagccgggattatagcgattatatgagcgggcagtgtcaagtgtggtaaatccatggctcttgaccagcatgcagcagaatcagagtatttcaaaacacggatccctagacccccaaccccagggcttctattccgcatggtctgagcaggcagccggatgctgctggcctcccaactatccttgacaaccaccgatttaaaagaatgctttagaggtgggaggcactcaaaagtcacgaggtgcaacttaaatgctatggggtgaaggggcggggcttggatggagggggcggggcctagggaggggtgaagttccagagagtgggagcttggagagggggaagaacaggagaaactgcatgagggcgaggggacgaagacagactttgaggcagtagggggcttataatcacgctgtgagatgggcgtggttcagggccagggggcggggcttcagtgtgagacccgagccggaggtgtggcttaaccggacgcccagagcgtgtcgcggggttcccgtagaagaggcgggcattcaaagcgcaggcgcacctggctcagttcgcccaccggaatcggcccgggctttcactgctcgcgtccccgagtcagtgcgcaagcgcat

SEQ ID NO: 38067 - DNA, 1261 bp, Artificial sequence
  DNA replication origin
caaagcttccttcctcttgttcttgccttcaaatcttccactccaccctcaccggcctcccctgctgctcctccactcaccgtgctcaccgccacttcagggcctttgcacttgttgttcttgctgcctgctcacccagatctttgcatggctaagctgccacttgtaattcagctttcacctctaaagtagttcatcaggctctcagagaacccacaaaaccccgtgtatctttgtcgactcgtgtctgatcaactagactgtgagaccccgcacagtgagaacactgtgtgtatcgacccccttcgtggctgtatattatacccttcagctagaatagtgaatatgcgttcaacgcagaaggaatgcctacgagaaaagaagtcacaccctagtgaagtccagggtcttccctagggagtccaggacgatagcctgagagctgggtgagaagctgcaggtcagggcaacagttgttcacgccataggaagaggatgaggcacattctgggaaggaaggcttcaccgcctcactgcgggacactgttctgtggcagaagtaatgaagacgggctgaccgcgatgagggtggggtgagaggaggtacgggagtatgtcatgggagcctggagctaagcaggcggatatttctacctgaggcgggagaggatgtgagtgtgaaggaactctagagggagctgtgccgctgcgatgggggggtggctttgaaaggggcattcttaaggggaatcactggaggacctgcagaagggaaaaaggcattcttggtgctgaccagaatagaaagtattttcacacccacgaaggggcgttctgctggggagggaggtggtcagggccattgggggctgttgctgtatggacagagataacgggggacagttctgctgcaaggcactaaggaaacactctggggagaattatatagaggatactaataagagggttcacgagcagctgccctacatggggaggggcaatgctgatggcatctggaggctgacctggaggaagcaatgacggggagcgctatgtggaggggatcctacgaggaggtatcatttgggggccctggcagccgtttaggggatcgccacgaatgaaagcgctttggcagccatcctagctgggggcgttcatgggggagctatctgcagtgatcctaccggggagcagtgattgggggtcccttggcaagggcccggcgggagctgcactgacttgctaggggttgggggac

SEQ ID NO: 38068 - DNA, 1825 bp, Artificial sequence
  DNA replication origin
cgtggctggagggcccgaggacaccgtggagggggcggcggcggtggcggcgctggcagcgggtgctgggaggcccagcggcgggaggtgggggccgggctggggcgggccccccgcggccggtggcacgtccttgtggcagcggcggtggcggatgaggctggacacgtggttgtaggtgcggccgcagacgccgcattcgtagggcctctcccccgagtgcaccagcatgtgctggaccaggtgcgaggactgcttgaaggacttctggcacacgccgcaggggaagcgccgctccatcaggtacttcagtctccggaagtagcccttgtcgtccttggtggggtcgcaggccgccgccgcggggggtcctggcggggtctgcgagggggcaggaagcggccctggggcccccgcgggagcgcccagcccaggcgtcacccccggcccggacgcgggccctcctcgcttcaggttcccaaacaagtgctggtgccccgagaggtccacgatgccccactgcggagtggggaaagcagcgtcaaagaggggaggagggggcgccccgaaggcgggcggcaggggcggatcgggcttcttggcttgggaagaggaagaggacgaagatgacgacgaggaggacgaagaggaggaggaggaggacgaggacgaggacgaggagggcacctccgccttgggcttgaaggtggactggggcgggtagtcatactgcgggggagggggctgcggcgggggctgcggcggggggccgggggcgcagggcagggccgccaccgccttggcgtgttccccatacagttccatgggctcgaagcgctggtggttgaggaattccaggaagtcgaaggggtagctctggaagtgcaccccgtcctcgcccccgatgccgctgctcccgccacccccggcgccgctgcccgctgggttcgcctccatctccggcgggtgggagacgggagaccctgtgaagaggaggacggggctgaggacacggccgcggcgctgggtctccccgcaggtgaatggagctgtgcgcccactcatccatccttgtgcggatcaccccctagccttccagatttaggcttccagtccctctgcctgtccaccccaaagggcagcccttcctcttggctccctggccccaggactctcctactcaccttcaccttccctctctgtgttctcaactcccacccactccccacctcttttccttctctaattccttccatctctccccatcttttctggggtcctgacacagctttgtagaggggaccctctcctccacaccacctgcaggccctctattatttgtagaaacggggttttgctttgttgcccaggctggtctgaaactcctggactcacgccatcctccagcctccacctcccaaagtgctgggtgattacagatgtgagccagcgcgctggcctgggccgtctctactttctctccttttcagactccaattgtccaagcatcctgggggcctctggactcagttttctttccaaaccctctcagaccctctgctgtctctccatactcctgcaccctaccccacccacagccctccgtcctcatcccttcaggttttatcctaaaatgagcataatgataaggggaatcacagtttctatcagcgtaattaggagggaggactctggggccagaatcaaatgtaagccctgccacttctagctgtgtggccacgggcaagtgactgaacctctctgtgcctccatttcctcatctacacctggggaccacaaagcacatgcctacctcacaggactg

SEQ ID NO: 38069 - DNA, 699 bp, Artificial sequence
  DNA replication origin
cgaggccccccggcgcccgcccccgcgtgggccgcctggtgcttgaggaggtaggaggcgtcgcggaaggccttcccgcagatgccgcagggcaggcgcaggaggtcggccgagtgcgtcttcacgtggcgcttcagactctccctgcggttgaagcttttgctgcacacggagcaggagaagggcttctcgcccgtgtggatgatctggtgctggtggaggtgactgggcttcttgaaaaccttccagcagagtgggcaggcgaacgggccatcgccacccccggtggcaggagggggcaccccaacaccagcaggggcggcgctcccgtctgcggagggggcaggcgccacgggcgtggctggagggcccgaggacaccgtggagggggcggcggcggtggcggcgctggcagcgggtgctgggaggcccagcggcgggaggtgggggccgggctggggcgggccccccgcggccggtggcacgtccttgtggcagcggcggtggcggatgaggctggacacgtggttgtaggtgcggccgcagacgccgcattcgtagggcctctcccccgagtgcaccagcatgtgctggaccaggtgcgaggactgcttgaaggacttctggcacacgccgcaggggaagcgccgctccatcaggtacttcagtctccggaagtagcccttgtcgtccttggtg

SEQ ID NO: 38070 - DNA, 681 bp, Artificial sequence
  DNA replication origin
ctcgcccgtgtggatgcgctcatggcgcttcagggtctcgcggcgcccgaagccgcgcccgcagatgccgcagcagaacgtctttcctgggacgctggcgcccgagcctcccgccccgctggtccccgcgccgccgagcagcagcgggtgggcgcccaggagcgggacgggcacagcgccgtacaccaccgccgccgcggccgccgccgccttctcgctgtctgtggtgggagggtcggggggcaggaggtacgggcccggggggaaggtgggcgggggctgcggggccgaggccgccccgtccttgggcgcctccgcagcggcagcgggcggggcgtgggcggccttgtggcggagcaggctctgcggagccgagtaggacttgccgcacaggtcgcaggggtacacgggccgaggccccccggcgcccgcccccgcgtgggccgcctggtgcttgaggaggtaggaggcgtcgcggaaggccttcccgcagatgccgcagggcaggcgcaggaggtcggccgagtgcgtcttcacgtggcgcttcagactctccctgcggttgaagcttttgctgcacacggagcaggagaagggcttctcgcccgtgtggatgatctggtgctggtggaggtgactgggcttcttgaaaaccttccagcagagtgggcaggcgaacgg

SEQ ID NO: 38071 - DNA, 928 bp, Artificial sequence
  DNA replication origin
gttctcttttgtgttacttgaggccaaggggcacgtccaattcatctgtttccccagtgcccagctcagggcctggcaggcaggaggtctccggaagtggtggtggagtgaacaaaggctgaaagcatccggaaggggaagagtcggggcatgttaagtcagttcctgagagcagacacttacctgtcttgtccatctccatttgcccagctcagactaacgctgggaatacagcaaatcctcagtaagtccctgttgaatgagagtgagtgagagacagaggcgcccggcatcaaaactgcagaggaaacaagttttaactttgtgctttgccaccatgtgatccccactctccctgggtgggatgcaaggatggactccagcggccctcatggtaagatttattattctccgctctgtacaagccgcgtctgccaccccgccccccacccccccaccccaaaaagcacccagcactcccttgtgccctcccaactctgctcatactccactgtccagccagattccaaaggagggggaggggcggttcagacccatctccgccaaaacttactgggggcagagtgctgctggggcgggggctgatgcgggtcacaaacgagggttggacggaggatagggttcagtgtctgatgggatgaggggagggcagagaggtcgaggatgggagtgattcagtcttgagcctgtcgggcgtgcgccctgaaggtcgccagtccgtgtgaagttctgaaggatggggcaacagcgaggaggggggaagagtctgatcagtcctgggaggtgggagtccagaagggggcttttgatgggagtgggatgggaacccctcggtcaggcatccttcccggccaaggtgcccgcccctgctccaggccccccgaggttctcggccttgtgcgccagg

SEQ ID NO: 38072 - DNA, 1958 bp, Artificial sequence
  DNA replication origin
aggccttggcgcccctgctccggcaccagcaccggcacggggtggagccgggcacctctcggaggcctccggacacagcggccgttgcagaacagaggcccggggtggccccggagagggcggaggtggtgatggcggcggcggcggcgggcgcagcggtggggaagccttttgcctgcaggttctgcgccaagcccttccgccgctcctcagacatgcgagaccacgagcgcgtgcacactggcgagcggccataccattgcggcatctgcggcaagggcttcacccagtcctcggtgcttagcggccacgcccgcatccacactggcgagcgcccgttccgctgcacgctctgcgaccgcaccttcaacaactcctccaacttccgcaagcaccagcgcacccacttccacgggccggggccggggctgggagactctggaggccagctgggctcgtcggcggctgaggggtcggggagcgggtgtggggtaggggaccctgcggaggaggggcggggggagaccgcgaaggtgaaggtggaggccgaccagtaggctgcagaccagggacatgggttagttaaggcggaggtacgaggccgacccggggagggggacggggtggggaaacggaggcaggggacagaagaggggagattgggggagagatgacagctgcagggatggttgtgagccgctagtgatggagagcagagggagagggccaggctccagactcccacacgcccacacagcacctctgccaggcctaggagaggacaggtgcagctcttgcagctctgcgggtgtgcggccaaaggcaaggcccacgggctggatgtcacttccccgactgtctcttggttggcttgtccttgtgcaagacccagcctgtcacgacagagcctgggcacttcagaggaggagccaggatcgaatggaaggggggaattggggtccaccatagtcttctgctctggtcctccacgggtggaccaggatggagtctcctgcctacctcactgcattgcactggacctgggatgcctatccaccctctggcagaagacactcaccaggttatctgtgaagagactctgggatcccatcacctcaaagccagagggtccccaagtcaccgctgagagcacttgagcctcaaggatgtaagcctgaccataggatcttgactccaacagcggcaacccccacccccattgtggtccgtccttaacccatccactcttcttcggaggcaactgagaacacataaagcaagcagctacctagcatccccctcctaaagctttagactcagagcccagggtcccccacaagcctcaaggtagcctcaggtttctctaatttcctccactcccagttcgaagcaaacagcttactgcctagtccccgccaatcccaagggcgggctggctgatggcagcatggtgggctggcctgggtgtggagtgaaagagtcactgtggtgggggcgagaggaggacttgggagctggaggtgtgacaccttcagttctgttcctattaaaggaccttctgaagggcttctctgtcggtcttgtattcggattgtccgctttggggagttgggggaggaggggcctcaccatggttttgccaccagcagtcagttgcatcatctcttcctccaagcttctgtttccccatcatcagaatggggggtgagtaggccccactgtggttacgtgttatgtggttcagctgtaggagaggggggtcagggaagtttggcaaaagcacactcaacatgctttgcatgcttgttgagtgagagcctctgatttgcacacctttctgttcacccagtgggccccatgagataactcacaggcaactcacaatgtgaacagaactcattccattttcctcaaagaaacctccatgcttctgatgtcattggcaccaccacccaagc

SEQ ID NO: 38073 - DNA, 792 bp, Artificial sequence
  DNA replication origin
gcgtgctggggcggtcctgaggcaggttccacaggctcctctttcttctcctcttgcccaggtcctggtgcctgatgactgccggcctggcacacccccgagtgacctcatcgagatccaggtggtgaaggtgacggacaccacgctggtccctgagcccccggagccaggttctttccactgtgccttgtgccctgctgccttccggctggtttccgagctgctgttccacgaacatggccacttggctggggccgagggaggcgggcagggtggggacccgagccggtgccacgtgtgcggccacagctgcccgggccccgccagcctgcgcgcgcactacagcttgcacacgggggagcggccctaccgctgcgcgctctgcccccgcgccttcaaggccttggcgcccctgctccggcaccagcaccggcacggggtggagccgggcacctctcggaggcctccggacacagcggccgttgcagaacagaggcccggggtggccccggagagggcggaggtggtgatggcggcggcggcggcgggcgcagcggtggggaagccttttgcctgcaggttctgcgccaagcccttccgccgctcctcagacatgcgagaccacgagcgcgtgcacactggcgagcggccataccattgcggcatctgcggcaagggcttcacccagtcctcggtgcttagcggccacgcccgcatccacactggcgagcgcccgttccgctgcacgctctgcgaccgcaccttcaacaactcctccaacttccgcaagca

SEQ ID NO: 38074 - DNA, 1192 bp, Artificial sequence
  DNA replication origin
aggagttgttgaaggtgcggtcgcagagcgtgcagcggaacgggcgctcgccagtgtggatgcgggcgtggccgctaagcaccgaggactgggtgaagcccttgccgcagatgccgcaatggtatggccgctcgccagtgtgcacgcgctcgtggtctcgcatgtctgaggagcggcggaagggcttggcgcagaacctgcaggcaaaaggcttccccaccgctgcgcccgccgccgccgccgccatcaccacctccgccctctccggggccaccccgggcctctgttctgcaacggccgctgtgtccggaggcctccgagaggtgcccggctccaccccgtgccggtgctggtgccggagcaggggcgccaaggccttgaaggcgcgggggcagagcgcgcagcggtagggccgctcccccgtgtgcaagctgtagtgcgcgcgcaggctggcggggcccgggcagctgtggccgcacacgtggcaccggctcgggtccccaccctgcccgcctccctcggccccagccaagtggccatgttcgtggaacagcagctcggaaaccagccggaaggcagcagggcacaaggcacagtggaaagaacctggctccgggggctcagggaccagcgtggtgtccgtcaccttcaccacctggatctcgatgaggtcactcgggggtgtgccaggccggcagtcatcaggcaccaggacctgggcaagaggagaagaaagaggagcctgtggaacctgcctcaggaccgccccagcacgccccaattattaaagcttgggctcctctgttattttcagacagggcctcactctgttgccctggcgcgatcgtggctcattgcaaccttgacctcctgggctcaagcgatcctcccacttcatctccctgagtagctgggattacaggcatgcaccaccacatccagctagttaaaaaaaaattatttctggctgggcacggtggctcaggcctgtaataccagcacattgggaggctgaggtaggcagatcacctgaggtcaggagttcgaaaccagcctggccaacatggcaaataccgtttctactaaaaatgcaaaaattagccaggtgttgtggctgctgcctgtaatcccagctactcgggagactaagacacgagaatcgcttgaacccaggaggtggaggttgcagtga

SEQ ID NO: 38075 - DNA, 2142 bp, Artificial sequence
  DNA replication origin
ttgtactgtctttcctactctagaaagtctttcctggccgggtacggtggcacacgcctgtaatcccagcactttgggaggccgaggtgggtggatcacttgaggtcaggagttcaagaccagcctggccaacatggtgaaatccccatctctactaaaagtacaaaaattagccgagggtggtggtgtgtacctgtaatcccagctactcgggaggctgaggcaggagaatagcttgaacccgggaggtggaggttgcagcgagccgagatcacacactgcactccagcctgggcaacagagcgtgactccgtctcaaaaaaaaaaaaaaaaaaaaaaaagaaagaaaagtccttttttttttttttttttgacaaaagccatctctgttgtattccctccctcagcatccggcacggcgccaaatagtgatttcattttaacttttgtgtagtgtgtgtgtggagtagcaaggtgcgcgacgcaggaacctttctcttgtgggtgcgtttctggcccgagtgctttcctgctgctctccgaatccggaagctgctggagaagtcggagcatcccggaagtcgtcactgcggccgcttccggacgtgaaagtttgctgcgtagggatagggagaccgggccggattgcggggagtgagcaggttcagcagtgacggcattcttaagagtcctgcccaagtgagggacttggggtgtgggacagagtggcccccagggcagtgggcgttggaaactgagaggccctgcgaaggaggcttggggaggggctacggtgaccaggggacgaggtataggaagaggagggcggaaagccttgagggtgggcttcttggatcccaattgccccagaggcacaggcctgggcatcactgtattatttcccgaggggagaaggggctatttcccatgggaagacaaagtgggatgaatagtggaccttgagaagagggggtggccaggaaaaggttcctgaaggaggcaggacccagactgcaggctggggagggtttgggcagccagagggaggtgagggtgctggagcgggggtcaatcggtcactccggccggagatctgagtggcctctgccccctctgcgctgtggagtgcatctgattgccagcctcgctggaccgttgagaggattcatcgagaccctggatatgaatatgcagtgtgaactgaagtttggggacatgagtaatcagtcacagtggcccaagatttgaggtgtaaatggagaagtcagaatgattcgctgcagctgtctggaacaggttgggtgagggcaagggtgggaaaggtggctgaggccaggttgtgagaggcctttcatggcaggctgagggggttatactatagggaggattttaaaaagaggagctggtggactggtgagcagggcatataggtgacacctagccaacttgagaggtcagaatacatgattccagaaggctaaggagaaggctgccagtagaggaaaggggaagaattcccagggcgaggaaaacacataagcctttgcgtgtggagctgtgtaaattcaaggtctggccagggggctgtgagatgccgtgtgtgcttggagcacaggaatgagaagtgaggtgaggaagtggctgggccacctcacaaagggcctcaaattctaggctgagaaactcggacttggtcctgagggtaaagggggccgggagaatgttatgcatggtgctgaagttgcattcaacacagctgtgagaagcatctgtcagggtcaggccagtgtgggaggggaactggaggccagggtaccagatatggtggtccaggtgagaaggaaggggccagaacttggcttggagaacggaggtcagtgccctcagggggtggaggtgatggaacttggtgcttgtctggctttggggagtgagggagtgggtggaaatggggacgtccaaagttctagatggtgtggcaagaattttgtctagatggtgtggcttcctcatgatcatgtcttggggttgagcaggggttctctttggtggggagctgggtagggaggtaatgcttcacttttggatggggcgatcaaattcattcatgtattcattcaaccaatatcgaattgattcctt

SEQ ID NO: 38076 - DNA, 877 bp, Artificial sequence
  DNA replication origin
cgtccctccgcccgatcctgccgctcccgacccccacccccatcccgggtggctccagcgcactcccccagcctgcctggccccggcgtcgtcccagggccaggctcctccctccatcccggcccccgtaccccgtgcggcggcctctcgggtccggaggaacgggccgaggtcccgggcggccccgggcttcccctggcgagcgccggcggcggaaccgagacttccgggcagctccgggccggcggcgccggggacgcggggactgggggcgcgggggtgcgaggggttggcggagtccctgggaaaaggcgccggccggaagcgcgcgagcccagtgcggaggttccgccgcctggagccggcgctcccacccctcgcctctgcggagcgccctgcggggaggggaccggaggcgtggggtccactgaagacgcccgcccccggcggccccgctcccctcccacctcccgaacggaacgattccgccgcttgacaagagatcggccaataaaccgagactaagcaaagttacgtcttcgccctaaggcccacaagggtttgtcctctttccactgggccgtcgctgcctgctcggccgtggccacccaccgaggtagagggcgggagaagggatgttcctgccggctgagcaaatgtggagaccgaggtccagagaccagccattggctccgatgtggccgggccgtgattctccacccagcaaatggggaggccgaggcccggagaaggccagacgctgccagatagttggggaaggtatgttctttccacggggcacatgcgggaaccgaggcccacagagggccagacggctgcatgcgcaggtggggaggtgtgatatttccagaaggca

SEQ ID NO: 38077 - DNA, 1712 bp, Artificial sequence
  DNA replication origin
cgatctcttgtcaagcggcggaatcgttccgttcgggaggtgggaggggagcggggccgccgggggcgggcgtcttcagtggaccccacgcctccggtcccctccccgcagggcgctccgcagaggcgaggggtgggagcgccggctccaggcggcggaacctccgcactgggctcgcgcgcttccggccggcgccttttcccagggactccgccaacccctcgcacccccgcgcccccagtccccgcgtccccggcgccgccggcccggagctgcccggaagtctcggttccgccgccggcgctcgccaggggaagcccggggccgcccgggacctcggcccgttcctccggacccgagaggccgccgcacggggtacgggggccgggatggagggaggagcctggccctgggacgacgccggggccaggcaggctgggggagtgcgctggagccacccgggatgggggtgggggtcgggagcggcaggatcgggcggagggacgggaggggaagtcgaggcgccagggctccttggggaagtgaaggcaataggaggggccccagggccaggggacaggcggtgtgtagcgggatgggggcgaaaacgcccgggcgctggggttcccataaacaaggggagcagagcaaaagaacgggcgggggaccacgctgtgtgtaacagggagagggatggggctcctggaagaggtgaacacgaggagaaagagagatgccagacgtacacagaaaggaggggaaagtgggcttgggagaggtgctgtgggaagcggagtcccggagcctggtgtgcataacggggtttgggagaaggcccctgatgggtacagaaagaagtaacgatgtcaccgccatatatggggggcgagagaaaagggggcctttggggagaatgtagcaggtagccaggttgggggggcggggtatacagaaggaaggcatttgagccattttggggtgtatagatgtagtaagacgatgggttccgtagtggggagaggtgactagacttcgaggtgctaagtgtaggaacaggatggaaaagccctagtgaaatgtggggaattgggttagtggggctctggggaggtacctagagaggaagtgagggaggccacggaatatgaagatggggaggccctgcggcatgtagtggggacggagggccaggaggccgatacgggggccggtgggggggtagggggcggcaaagggaggggaagtaaactgaactggggctgggcaacaggaaaaaagaagaaaccacagattagagaaatctcggcggtcaggaggcccggggtctaagatgtaaagaggtaaacagatttagggattgattgtctgctggggtgggttgagaggagaaaagggaagaaaagtcgggggactacgtcctcagacctgacctgagtggtgagaggtggacccaggaggagtggcaggtggtggcggggttttgcagagctcagttggaggccctctccgaggcagcttgatggaacgtgggagagccgggctggagtcacagtttttattttgctagggaggtagtcagtggcgcacaaagggtaacaagcagtgatagtggggatgctttccattttaggaaacttttcctaaaaggaagtggcaattttaactaatctcccctccgccgctcccagctgccgctccagatgctgctgctg

SEQ ID NO: 38078 - DNA, 1041 bp, Artificial sequence
  DNA replication origin
cacaggggctccgacgttaggacccccaggttccggccctctctccagccacgtgtctgaacaactccgtgctcccacccgtccacccacctcaggttctctctagtcctcgcccggcctccaccaggctcgttctaggtcccagcgctctccggggttccacccccggggccgcagccctcgctttctgggcctttctgtgtaagttctcgccccctccaagctccagaacagccccctccggcgtctgccccactcccgccccggcccaggtaccctccacgcggtccagcccctcccgccgcccgcccccagcccccttcctcctcccggcccccgtacccagtgcagcagcctctcaggtccgggcgactccaagcggccccgggctaccctcgcagttgcaggcggcggcgagaaggggacctctgggtgtgccccaggaactggcggcgccggccgaaagagagaagccgaagggagagaagagggtctagggaaggaaggttggggcggggcgcccgggccgtcgcgaaacggctccggccagaaacacacaccgagaggaaagtacccaagcgaggaagatccggtctccaccccccagcacccaacgtgcacgcacacgcaaggaagagcctgaaaatggagtgcggaatgtttattgagcaaagggtcgggggcgtgggcggaaggggggtagatacagaaatgaaccagaccgtgcccgtgctctttatcatctcttccccgcagacaaccaccggttcaccgctccagagagcagaaaaccaaggtttagagaggtcatgtcacttgcacaggctcacacagcacagctggactggaacccagttccgactggttcccaggcccagggaggggcaacgactttggtctacatcacacagctagaaagggggtaaggaaggaatgatgctcctccctttggaaggtggggaaactgaggcccagggtaaggcagtaacctcagcagagccagggggtgtgtgtgggagtgagtgacgctgtgtgggtcag

SEQ ID NO: 38079 - DNA, 1506 bp, Artificial sequence
  DNA replication origin
ttctgtatctaccccccttccgcccacgcccccgaccctttgctcaataaacattccgcactccattttcaggctcttccttgcgtgtgcgtgcacgttgggtgctggggggtggagaccggatcttcctcgcttgggtactttcctctcggtgtgtgtttctggccggagccgtttcgcgacggcccgggcgccccgccccaaccttccttccctagaccctcttctctcccttcggcttctctctttcggccggcgccgccagttcctggggcacacccagaggtccccttctcgccgccgcctgcaactgcgagggtagcccggggccgcttggagtcgcccggacctgagaggctgctgcactgggtacgggggccgggaggaggaagggggctgggggcgggcggcgggaggggctggaccgcgtggagggtacctgggccggggcgggagtggggcagacgccggagggggctgttctggagcttggagggggcgagaacttacacagaaaggcccagaaagcgagggctgcggccccgggggtggaaccccggagagcgctgggacctagaacgagcctggtggaggccgggcgaggactagagagaacctgaggtgggtggacgggtgggagcacggagttgttcagacacgtggctggagagagggccggaacctgggggtcctaacgtcggagcccctgtgaataggcttggcttgtatggagggggtcaggaaaggcttgagtatgtagcataggccaacacgcagaccctggaaagggctagaaggaggggagggagaggcctggaggcctgcggggtggggcacccagtgacctgggagggcacaaagaggaaggttagagcgaggtccaggttgtgcagaggaggtcaagagatcctgtgagtacagtgtatggtggagcaccgaggctaggagaggttttccaaggaggaagaccctggggaccttttagggggccacagactccagctgtgagcgggactggaaaagagggactgaggggcagcaggatgcagaggtcctgggccgggtatagggagggaaaaggatggagcctgtggtgctgagctgccctcttctatataaccttcttatcccatctcccatccaccaggcctcagccagccctccggatgctggtgctgccatccccctgccctcagcctctggcattttcctccgttgagaccatggagggccctccccgtcggacttgccgctccccagaacctggaccttcctcctccatcggatctccccaggcttcatctcctccaaggcccaaccactacctgcttattgacactcagggtgtcccctacacagtgctggtggacgaggagtcacagagggagccaggggccagtggggctccaggccagaaaaagtgctacagctgccccgtgtgctcaagggtcttcgagtacatgtcctaccttcagcgacacagcatcacccactcggaggtaaagc

SEQ ID NO: 38080 - DNA, 1731 bp, Artificial sequence
  DNA replication origin
ctgaccagggacacctagcctgaaggggaaggaccctctctcatcgcgggccactgccaggcctaaggaagaggcaggtgcagggggaaactgccccaacttcccagggtaggaggaggtccagcccgtgcgcgctgcctcctctaccttcggggcccccacacccctcccccgcactcgcgtgggcgggcggaccgtcccccggtggtgggggctgggcgcgtgcgcagtacggggaaaggtcacgcgtgggggtgcgccccccccgcccccgccctttgtcccgcgggtgggagggggagcggtcgtggaacgattccagcgggaacatgcactagggcgggggtgcaaacgcggccaccatcccccgcccgcgggtgcccggggtccgaggggccgaggccccccgcgctcacccacccgctcgcggaatccggctcggggaccgacggcggcggcgcccatgcccggcgccggggagcgtctgcaaagtgtcacggggagccgagggaagcgcccacccacccgcgaacaggcggggcggcaggggagcgtgtcgtggaactgagcgacggaacgggcagggacgcggggactcgcccagtcgggccaggctagcgcccctcgttgaagagtccccgggtccaggtgaggcccgccgtttgcggcagaagcagagggtctgcacttgcgcgatagccccttacagcactcccccgccctccccgaagctcaggcagggaacatcacgaaattcccatcctggagagctggcgagtctccgggggtccccggattgggtggcggtgtgcccaatgggcccagaaggcaggagagtgtttgagacaccgagaaagttggagcgaaaggagaatctacttttaacgctctctcaggaactagccagcgcggacccctcagagctcccctacctcctacagccagaccccaaggttctcagggatgtgggggccaaaatcgggggagttacccctctcccggaaaatgagggccaggaacacgccacccccatccccatgttggtaattaagagctggctttggagcaaagctagattccagtcctgactgttcctgctcctccccagcctgttaactcacctgcaaaatggggaaattacaagcccttctaaatttattgtgaggatgcagtgatgcgacacacagaagctcagcccagcacctggccatcgtcagggctgaagagaggagcgctgctggtattatttgaggtcagatggtggggtatgatggcagcctctgggaggctctttcccactctggggagtatgaacggaagatttgttcttcctcccaaaaaaacaggtcggaagagcaaatgaggcctagcacagtgcctggcacaaaataggcaagaaaaatgaatgaataagcagatgtttattaagcttcaggctcagctccacctgcctctcctgttcaccagaagcatccaagctctggactgtggccagcccttataagagcaaggtcttaacccgatggagggagaatctaaatgtctgcaccgcctgcaaagctgtgaccatgatcctcccctccccactttacagattaactgcagcctggtccaaaaattccagggggagccatctgccctagattggtcttttccaaactacaggttcatgggtggagaattcaatagaataggatgaaatcagcagtttaaaaaaatatttagccgggc

SEQ ID NO: 38081 - DNA, 3212 bp, Artificial sequence
  DNA replication origin
gaggcaggagaatggcgtggacccgggaggcggagattccagtgaggtgagaatgcgccactgcaccactccagcctgggcgacggggcaagacgtcccccccgccaaaaaaaaaaaagaaagtaaacccaggaccacacgtggaggagggagagacagaacccggtgggtctttctccagcaaggctggaggggcttggagagaaagggggacctctgggaaggacacacagcaattcagcagcccgggcccctcagcgcccgccccatgcaccccactcacctcgctgcctctcccgggccttgggcttcccaaagcgcctccgactagcacctcccttctgcttctgccgcctcctctcactggcgctgccttcttcggacgctccgctgagggaggaggctgctgactcagggtccgaggcctcgcccccagccccaccacggctgtccccctccatccgcctgggcccaggcttcatccggcagtggtcctctggggagatggagacacacacatgaaccaagggaccagacatcccatcacaggtcccgggactgagagaggctgcagtccccgaactggatcccccaacctgggctggtcccctaaagagacagagagacaaggagtacggtagagacgctggtggctgagtagagccagttggggtctgtgggaggtggtaatgggtggagcattttctcagaggcctgggttggcaagaggtcttacggaggcagccgaccaggggcctcaggacccctgtgactatgcgcggttcccataggggagggagaaatttctggggactgggcgggacctctggagagtagcctctggaaacccaggaggcaggcaaggccttggctggagtcggggggtcagaccgagagaaatcaggggccctgggtccagcaggctgggtcccacctccatctagacagagggagccggcaggcggaggcccagacacagattcctctagaaggcgggttaggggagggctctggtgccagggtccccactgggaaagtgccgaagccgcagggccaaactgtctgtgcaaaggagtcagtcacccaggatggaaccatcagtgagaggagacagtggcaggcccaagggcagccagaggtggtttgttcccgagcagagggaaagccagatccccagatgctgggcttccagtaacagagacaccacaagaccatagcccccttgcctaggatttttggggaaagggttgaattcacaaagagagatgtgggagcttttgaggggtcttcccagccaaggagctagcaaggctgagatgagggtaggtggggtagagtgtgggttctccaggccatgggctgtcgggcaaacggcctgaccatccggggaagaggatggggctggggtccaaaatgtattaaacagggcacagggtcccaccagtcaagagaagacgctagctgtgaactggctggggctgggtgctgctgtgggagctatctgggctgcttctggccatgaattatagcagagcaaggtatgtgggtggggactgcccaggaatcaggcagggtttgagggacagcacctgctggggtcaccacccaaaaaggcccacaaaggaagggacttaatgtctttgatggggaaggagtgctcattaaccaaggatgggacagggtgggtgggaagatggcccctggtgtcacagaggggagggggggacaggaggaggccggatggctggactcttggatcttggagaagacagggacgggaggaggagcaggggccccctgaggaaacccaaagaactagggtgggcctcttggccaaagagatgaaggaaggtccccctaggagtcagaagagaggggctctcaggtgccagggtccctgaagtcaccatgggccaaggaagcagatggcagggcactggaggctgatgggatttggggagctgacggagaaggcaggaggacgggccccagtagacagttcatggggatgaggccctggaatcaagtgaggaggcagctgggcctgggggcccaaaacaggcaggggactagcagatagggccaacatggcaggtcccacccagccagccaaacagtggagccttgagtctgggtgagcgggtacccagtagcgggacagggaggcatgtggatcagagcaccccacacacacctgcctccatccgagcagaagagatgaatttgtccagctggcaccgcaggaagtccctctcttcctccaggtcctcgatgcgcttctgcagccaggagttcctctccagagccatgtgcagctgggtcttgacgctgttcatcagagccagggcggaggacgcagcctccggaggctctagggacacagcgagggtggggggaccaggtcacaccctgggactcagggcttggcttcccagctgactccagtccctccacaccccctcagctcaccctcgaagtttctccgagaggggctcagactgtaaaagatctgtgggtctaggtggggtgcctcatcgaagggaatggagatctcgaaggtctcatcgtccttcactggagaggagaggccccgggttaccccagagaattccccgggcctctcaggccaccccccaaccacggcagcctggagccgaccgcactgggacccagggtagggaaggggacccagcttcctcacttgtccgcctccgactgctccggtcattcatggcgcggcttcctacggaccccagcagccgagggcctcaggggcactggacagaaacggcagccacaaatggagagacgcagatggactggagggtccatcctgggggaggtgaagtgagacaggagggaccttctggcctggacccctggtctgagggaggagggagcctggaccccaggactgaggcaaaacgcgcctgggcttcaaactcctgggctcctggagtcaggggcagggggcccagccgcctaggtcctgggggagaagtgagctggggacgtgggctcctgggtatcgaaggaaaaggaagctgaagccctaaattgctgggtgccccaaggggtcgcctgaccagggacacctagcctgaaggggaaggaccctctctcatcgcgggccactgccaggcctaaggaagaggcaggtgcagggggaaactgccccaacttcccagggtaggaggaggtccagcccgtgc

SEQ ID NO: 38082 - DNA, 925 bp, Artificial sequence
  DNA replication origin
gacccagcctgctggacccagggcccctgatttctctcggtctgaccccccgactccagccaaggccttgcctgcctcctgggtttccagaggctactctccagaggtcccgcccagtccccagaaatttctccctcccctatgggaaccgcgcatagtcacaggggtcctgaggcccctggtcggctgcctccgtaagacctcttgccaacccaggcctctgagaaaatgctccacccattaccacctcccacagaccccaactggctctactcagccaccagcgtctctaccgtactccttgtctctctgtctctttaggggaccagcccaggttgggggatccagttcggggactgcagcctctctcagtcccgggacctgtgatgggatgtctggtcccttggttcatgtgtgtgtctccatctccccagaggaccactgccggatgaagcctgggcccaggcggatggagggggacagccgtggtggggctgggggcgaggcctcggaccctgagtcagcagcctcctccctcagcggagcgtccgaagaaggcagcgccagtgagaggaggcggcagaagcagaagggaggtgctagtcggaggcgctttgggaagcccaaggcccgggagaggcagcgaggtgagtggggtgcatggggcgggcgctgaggggcccgggctgctgaattgctgtgtgtccttcccagaggtccccctttctctccaagcccctccagccttgctggagaaagacccaccgggttctgtctctccctcctccacgtgtggtcctgggtttactttcttttttttttttggcgggggggacgtcttgccccgtcgcccaggctggagtggtgcagtggcgcattctcacctcactggaatctccgcctcccgggtccacgccattctcct

SEQ ID NO: 38083 - DNA, 1262 bp, Artificial sequence
  DNA replication origin
acaccgtatcctacccgtcctcccgcctgaccacccacccccttggaagcccccgcaaccccgtcaccgtcttcggggcgacggccgccccctcccaggcacgtccccctcctaggaagaggctgaggccaagtttattccaaattttcacgtcgttttttaatttaaattatctgaataattctctgtctcacgcggagttggggaggtctgtccgggaatcaggtgggcagctcctccgcggggccagggcggagacggggtctgtacagtcccccactcgaggggggggcacccgcctgcctggttttccaggaggaaggggcccggcgaggacagggctgggcagcccaagcggaagggggtgccggcgttcgggaaggggccgcggccggtccggggccgtcgcgcttgggggcccggctaagggagcccccaacccagggagcgaggaggaggggcaggggcgcggcggggagaggggcaggtcatccaccggggtccacgggggaggaaggcccgggtggaggcgcggaggcgtggtgcgatcaccgcttgaagcggtaggtgatgggcagcagcagcttgctcttcttgagcgcctgcaccttcttgagcgtctcgtcgtccagggccagaaagcagcggcgggagtactcgagcaggcgctccttggaggggtcgaactcgcccacctcggccagcttctcgggggccacaatgagcagctcggcgatgggcgtggtcagcgccacggtgttcctgtccacgcggtggtgctcgaaggcccgcgacatgctcttgagcttctggaaggtgcccaggatcttcttgtaccggcagaggaccccgtcggcgtccttcactgaggggtggaggcggggacacgaaagtgaggggcagggcacaagactgagggggcggacacgggaagggaaacggccatgggaagaaaggatctcggcgagcagaggcacgggccggtgcaggtggagacggagaacaacaggcaaggaaggggcagagaggaggggaagaatcgcagccagatcttggaccagtgggaaatgggaagaggcaggcccaggaaggagagtgaggagacaaaatgagccaagaggccgggttcaacccacgcggtcccagcaccccccgacaccccgagccatcaccctcgtctccctgcctcaggtgaattcacttattcaagtctcaccctccccgtgaggtaggtcctactgcgcacctcctccttactgatg

SEQ ID NO: 38084 - DNA, 1575 bp, Artificial sequence
  DNA replication origin
gggtaggatacggtgtaattagccccccggaggcagagatggagagtgaagcagctgcgccccagaaaactcggaggcagagctcgggaaaagaagcgcggacacagccgggcgcggtggctcacgcctgtaatcccagcactttgggaggccgaggcaggcggatcacgagttcaggagatcgagaccatcctggctaacacggtgaaaccccgtctctactaaaaatacaaaaaattagccaggtgtggtggcgggcgcctgtagtcccagctacttggaaggctgaggcaggagaatcgcttgaacccggcaggcgaaggttccagtgagccgagatcgcgccactgcactccagcctgggcgacagagactccgtctcaaaaaaaaaaaaaaaaaagtaaaaagaagcgtggacactacccgctgggctacccagaccggagcgcggcgcgagaggcgtgagtcgatgacctctagcgagggaggccacctagcggccaggccaagtctggaggatacttccgttgggccgccagggggcagtaacgccagatcatctgtctcccggaagtaatgccagatgatccgtctgccgcgcctgcgcggcgggaagagccggagcgcgttgatgtggttgccgagacaaccaagagggtggccggatttaacggctggggattaagcactttcaccgttgtaagggaaatctcgcgcacgcgcaatggggactgaaacctggtccccgcaacccccttcacgggagcagtgggagagcgcgccacagaacgacttttacgcaggcgcagaagcctgtttcccctcacccgcggcttccaccctgcgcaggcgcaaaaagccgcgctggcaacctccgcagcggtcgcgcgcacccttcatccctcttgctgcttttgtctggcacaaccttctcaggccctccgcgaggccggccctttttttctttcactttccccacccggagagccaggtgccgagaactaggacctcgtccccttctctatcccttcccctgatccatctcgtctctgttctccttcccttttccgttcccgaagccggaaggagccgaggtacccacggaaaaagtcgaagctgtccccggagagtgaggccttcacgaagcggtggcggaaggagccgaagttctctgatcggaggcgtgagcaagtggcatctccggaaagagccgaaacacggactcgagcttaatcccaggaggggcccgagggcgagatccggaaatctccggaaagagccgaaggccgggacggttaggattgtcggaagtggccgattgcttggacagggccggcggagaagatcggagcaagtccgtggaagaagccaaagactgggacggattgaattgttggaagaacccgaactcgcagaggggactgggcgcagtggcacacgaggacacacggaaacctccgaacgttgaggagataatctcggaaaagttacggaaacctgggaagtcggcgaaaccctacgttcgggtgttttcggaagcagccgaagcggccgcctgcttcgccttcgtccagt

SEQ ID NO: 38085 - DNA, 825 bp, Artificial sequence
  DNA replication origin
tctggctccccagctcctcctgagcatcctcaggtatcttacaccccgggggcatttccaggccccgtccccctggtcccctcatggtccctggactcgcttgtggacccaggaggcctgttaattcccttcctccattgaatcccttccctttgggggtggcctccctggggcttgggacatagccaccagcgcgcagggtgggctgggcccgcatccttactccgcttatcccgtgcccctcctctcacccttgcccagagcgggacaaggagaaccggcatcggaagcgcagccacagccgctctcggagccgggaccgcaaacgccggagccggagccgcgaccggcgcaaccgggaccagcggagcgcctcccgggacaggcgacgacgcaggtactagggctcagggatcccctgggccagcctgggagtcggggggtcggtgttggccggcctgtgggtggcctgtgtgtgtctgtgtctgggtccgggccctgtgtggctcgttcgttctttgtgtggatctgggggagggatctactgcttggtctgtcttggattccgattttttcccccgtttctggggtttctttcattttctgtcttggtggttgctggtgggttgctgggggcaataggctctttatctggagcctgggaattgattctgtgttttccttcacaaggggttgttctctgtctctgactctgagggcctgttccttcttttcgactctctgtggctctctgtgggactctcttcgagggggttggtctctgcctccagtttctttcttccctgcctcccaggagaagggagc

SEQ ID NO: 38086 - DNA, 770 bp, Artificial sequence
  DNA replication origin
aactgctgctcctcagaagcctcacttcctaatggcgtccagatggaggcctcattcccctgtcaaccacgggtgtctctggtcatttcctcctctagggaggcttcaaaagcgcagagaccagaacccccaggggtgtgcaaccctctacctgtgtctttgaccccctccaagcacacacgcaggggaatgactgacggagaatcccaacccctgtaccctcccgctctgggagcagcctggccaggggcctaccttgcatggccttgtactgcattggggtgatgtgctcaaagcctgggggtggcacgtcccagtatttacggaccttcttcttcttctcgtggcggggggaacgactgggggaggtgggaggggagagcggggcagggcaacctcagtctgaccaacagtgggcctgcgagccccctcccaggcaccctttcaccctccccgcaaccatgtaagctccactctctccagggaaggagagggtctggggcagggcctgggaaaggggtgctggtttcaaggtaagtggactcttcccagtgcttgggccagggctggaaatgggcgggacagggtgcacgggcgtgaggaaggtgaagggagtggacatcagggaggaaggggcaggaagagaagctcacatcagtccaccgtgctcctctttagcgcctctggtcaaaggtttgctggggggtgggagggaaaggtatggggaggggtgactggggaccctcgtcttccccacatgccacaccccc

SEQ ID NO: 38087 - DNA, 2209 bp, Artificial sequence
  DNA replication origin
gactgggccggaatggtctggaaaaggccaaagaggtctacagaggccaaacaggcctctcaggtcacacagaaagcaaatggaaggcagaaagtaggatcagatctgtaatgctataacagggctcacttcagcgaccgggtggagaagaggctgcagagggcctggtggaaacagcacaaggcagctccacacaacatcagcctaagggctgggccctcacatcacacacgtttcctggacctcactcactcccccagctcacctccaaaaaggcaaaattcttgtcctggttaatctgcacagccaacactgggttgccaggggcctgggtcagcccccccaggcgcatctgggcgttgaagaaatccatcatggcctcctgcagagggaataggagacaagggggggggcgggggaagggaggtggagagaggaggggaagggtgagagagggagacacagaggggtttgggggtaaggggagagggatgaggggagggaggagggggggaaggaacagtggaatatgggtgggggtgtagaagtcaatagtaagaacagaagcaagagagaaaatggggaggaagcagtagcaagagacggccaagggcaggcgatggacaggcgttgggggacagccacaggggccccaaaaaatcaggggaaaggagaagattgttcaagaaaaggcagagggcatgatgacaacacaaaatgaagaaaaacacgaaacacaagagatgaagagacagagcacacaggaagggccacccagtggagacagacagaaaagtggcaggaaagtagaaaggaagtggcaggcaggggcagagacgagcaaaggacagaaagggagagcaggacagagacgagcgaggaggaggaagtcaagagtgcaggggcaggagaggaggagtgtagggaggaggggcagggacgggaggggaggagaaaagagtgatgtggaggaatctggccctggagtccgggggctggtttatcaaatgtagcaaagtgcaggttgagaaagtcagaatggaccttacttgccttcgacgatggtagcaaactttttgttgctacgagggatctcagccccacaatatttcactttaaagagaaatggaaacaactctttgatctcgggattctcagggggtgccacaggaaggggttggggagaggggagagggaaaaggagtggtggggaagggggaggtcaggggcgatcaaaaataaaagaacagcgaccatgggagggacgtgggggagaggataggggacaggcggcagagaacgagaggcgtgtcagaaaaaaactgaggggcagcgtgcgtctgtgtgtgtgtgtgtgtgtgtgtgtgtgtgtgtgtgtgtgtgtccaagtctccctctctgtctctctccgacacgtaggtacaacacgtgggtacattatgtgtgtgcttgatccctgggttgctggaggaggttggggggaggggagacgggagaggggaagaggagggagggagggccacccccagcccggcccctggctggctcaactccatcggtccgtctgggagggggccggggggtcttgcaggagcagagtctgacccgtgcaggttggggaaagggaatggagggaaggggaggaacggggtagagggacaagggagagggtagggggcaggggagggcagtacctcagtgatgccaaaggggatgttgcccacgtagaggcgccgggcttgtctggtcatctggctcccgaccacgggcaccggcgttggggtcacagccagaccgtcaggggtcatggtggggagaagagcagtggctggaatctgacccgcagcttcaaagggaataaaagccggataaaaccccatcaggggaatgctcagtgaccacccctcaccacacactgggagttcccctcctcagcagaaagctcctacaggctctcggtcttagcaccttccagaaccctctttccaccctcggggcccccacccagtaactgctgctcctcagaagcctcacttcctaatggcgtccagatggaggcctcattcccctgtcaaccacgggtgtctctggtcatttcctcctctagggaggcttcaaaagcgcagagaccagaacccccaggggtgtgcaaccctctacctgtgtctttgaccccctccaagcacacacgcaggggaatgactgacgg

SEQ ID NO: 38088 - DNA, 1272 bp, Artificial sequence
  DNA replication origin
gtattgagtcggggcaggggccgcattcctgggtgtactgttcgttcagggtggtcaaggtcaagaggtggcagtgagcaggtgagtgagcgaggtggtggggccagggctgagtggcaggccttggagggctgcctgggtcttggaacgaccgcttattttgagccagatgggagggaagcaatactgagaggcctccagggtggtcacgcctggcagatggaaatgaccccacatagtgaggttgggggtgggtgcggaggcacagcaggtacttcccctggccctggcttccctgctgagccctgcagggcaggatgtggatcagcaggagggcagagagggtgctgtggacaggagggcttgccgggagctggcagggttggtcttgccaaagcgatgccacagccaggtttgtcaggaccaaggctggctctgcagggccagatcgggcgtgggggccttcttatgtcatggaagcagctcggctttcccctggagttggtggccttttgaaggagaaaacaggactgtggtggtggcatttttgaggtgattgtggctgcagttgggaaaatgaatgaggtctcccgcaataatctggtgaaagatggtgatctgatttaaagtagtagcaggggatggagagaagttgatggatttgagggagacttgtgcctgggaagtgtccagactttggtgatgggtgtgggtttgtggggaggggaggagaaggcctatgagctgcttagtggcagctctgatggtggggatggcaggtgagatgcaggggtgatgagcaccttgtcgggggtgagcggggggtggggggcagctagctggctttgcggtttctgagacacccagtagagatgtcaaggaaaaattagctggacaggtctgtgttcccagcatgagggctgatggacactcaggtgtctgtcgaggccctgcttgggatgtcggagtggtttgcccagggagagcagggttggggagggcggctggagaggtggaaggagcatcttagaaaaggggcatggggaaggccaacggcatctcctctcactgcagctcctgcccactgccctccagagtccccttcccttgagctggtatgtcagggctgctcagggctgccctctggtgctgggatggagcttggctcaagcaggggctgaggaaacatttgtgggaagaaggaatggagagaccctggcctttgggatcagctgacctgttttgcatattaaatttattgcatcggcggcc

SEQ ID NO: 38089 - DNA, 794 bp, Artificial sequence
  DNA replication origin
caaaatagtttggccataaaatataaacacgctatgttcctaccgtggggaaggggagaagaaaggggtctatgggagaaggagaggctgttttgggaggggctggggtcctaccccgccctgctgtgcaccctgtccccatcccaaccccttccctctgtgtctgtgtgggtgcgtgttgtctgtgtgggctgtgtgcgcacttccccagtcccctccctgccctaaccccccaaccccccaacccccgccccccacccttaattgctgccattccagttgctgccggctgtcgtgtgtctgcggctgtcactcctctgcccatcgtcttcagagggggataaggggggggcgggagtggggagaagcccccagccagccctgcccccaccctcccccagccgcctctaccagaagtcccggcggtgataagagtcggggtcacagtattttgtgacaaccactctgttggcgaacttgcggcccgtcaggccctgcatggctttctggcagtcaaacacagaggtgaactccacaaagatctgtggggaaaggagaggcaggtttgtgaacaaggctcacgcccaacagccagtcagcgtccacccaaccccagcactgaaggcaggaagggacagggaggagggggcttcgccacaggtgtcagaaagggacccttagtaagcaggtttggtggagttcacccaaatattctccaggatcaaaaaacaagagcataaacacaccataggcatggagagggagaaagaatagagacatgccagaaactcagc

SEQ ID NO: 38090 - DNA, 1029 bp, Artificial sequence
  DNA replication origin
ttgatcctggagaatatttgggtgaactccaccaaacctgcttactaagggtccctttctgacacctgtggcgaagccccctcctccctgtcccttcctgccttcagtgctggggttgggtggacgctgactggctgttgggcgtgagccttgttcacaaacctgcctctcctttccccacagatctttgtggagttcacctctgtgtttgactgccagaaagccatgcagggcctgacgggccgcaagttcgccaacagagtggttgtcacaaaatactgtgaccccgactcttatcaccgccgggacttctggtagaggcggctgggggagggtgggggcagggctggctgggggcttctccccactcccgccccccccttatccccctctgaagacgatgggcagaggagtgacagccgcagacacacgacagccggcagcaactggaatggcagcaattaagggtggggggcgggggttggggggttggggggttagggcagggaggggactggggaagtgcgcacacagcccacacagacaacacgcacccacacagacacagagggaaggggttgggatggggacagggtgcacagcagggcggggtaggaccccagcccctcccaaaacagcctctccttctcccatagacccctttcttctccccttccccacggtaggaacatagcgtgtttatattttatggccaaactattttgaattttgttgtccggccctcagtgccctgccctctcccttaccaggaccacagctctgttccttcggcctctggtcctctctggtcccctcctgggtttcttacgtagttgatttttcctctttagtctcccccgacctgcgcccagccccgtggcccctgcccctctcctactctctgtggcagtttcatatttgctaagacgaatttgctcattaaacattttgttgtattttactttatggagcggctgtgtgtccagtatgtccgaccctcttcctcggttctgggctcgggtgggggtt

SEQ ID NO: 38091 - DNA, 825 bp, Artificial sequence
  DNA replication origin
accgcgcggatcccccgctgcagcgggcggaagtgacgtagaggcgcctagcaacggggcccagcgcgccggaagtgatgccttccaggttggcttggctgcggaagcgactcctgccagggcggggtgcggcacgggagggcggggagcgcggcaatttccgcttccggtccgtcgcctccttctgttgcttcccgtctcctcggcggctcccctcccccgcccggctctccgcgccccttctgggcggcggggcggcggagccgtcggcgtgcggccctccttgcgttcgtgcgtgcgcccgtggcccggcgcacgtcccgcgacaccgaggccgagcggggcagggggctgaccgccatgaccccccagagcccggcgtgagggggccgaggtgagcgcggggcggagcgcgggggacgctggcccgcctgctccgggtgttcgggcctgggccgcggcgcgcgcgggctcgcgtctggccagttctgggtgtctctggcggcctttgtgtctctgctcctgtgtcggccttgactgcccccgtgtcggttgtctgtgtctgtctctctcgtgtctgtgtgtctgtcagcgtctgtttcctgtgggcctctgcctgtgcctgtttcagtgaacttagaaaagggtttggagataggagtgtgtttgtgtgtctgtcccgggtctctctctcctctgtctgtcgtgtctgtgtctgtcaggatttgttcgtgtctcgttgagtttccgagtcttcttttccctaggtgtctctagcccttccctgcgggcttttctgcctatggtgcaaatcttacccccgcc

SEQ ID NO: 38092 - DNA, 1462 bp, Artificial sequence
  DNA replication origin
tgagaaagctaagcagctggtggccctgctgcgcgacgaggaccggctgcgggaagagcgggcgcacgcgctcaagaccaaggaaaagctggcacagaccgccacgggtgagtccctccctgcggcccctgacggcctagagtctgtcctccgcctactgcggctcccggcacccggccgcccactgctttctctcccagccaggagggaccgcggcatccccctttgcttctcctcacctgggccccttgctctggtctcacttgggccctttttttcccttagcacctcccatgcagcagctctgggacccttcctgcctcttgcctcgtgccccagggcaggcctagaattgggaacttttattccgctcccccataggctcagggcctgagggtgatcagtgctggggacagggctctgaggggacacgcacagtgacccccgagggtgctgtccttctctctgcgctgagatgaggggaacatcggagaggcagaggggggcctggaagaggcacagaaggaaggccagagccagggcctgcaggttgcaccaggcatctgggcctgtgttaggagccttgacagtgccttctggaggtggaggactcagtctggtgggtggtgaccagcaccgaaaacaaaacttgaaatagtgcatcccacatcgtcaagccaagatctgtcccacgaaacatttccagttatgtgatgggtgtgtgggtctcggactgttccaggaagtgtggtctgtgttggtcgggggctcacagccgtgaagaggctagtccggctgctcaggactgggagggaggctggagaatgtctgccaggctcttctgctctccaggaagagtggaggtgcctcagttagtggggatacgtgggatggggaggggctgctagagcactgccctggaggtggaggtgggtcagccaggccggtgcagacaggaggaagggcctgtggccctcgtggggtccggctcgagggactggacttgtttggggaagtctaggccttctgtttggacgggtctcatttgggatcacctttcagcacccacggggagacatgggtgtgacggggtgtgtgcgaccctgcctgggactccagagtagggacccacgagccagtagatgggcgtgaacgcagagagagagtgaagtggagggaaggaagccggtgtggcgtgggagtgctcagagccagggacaacaggagggagtgtaggcggcagagaggggctggtcagctcgaggcaggcaggcaggcaggtgggtggcggggttggggtggacggaggagggacattggcagtagctcggaggagagtgggagcctcaggtaagaggcctgagggtgggacatcctggctcgggggtcgtcagactttgtgcaaggccagagctaatgtcctctgcgttgctggccacgccttcccatcctagctgcctgg

SEQ ID NO: 38093 - DNA, 906 bp, Artificial sequence
  DNA replication origin
ctgcagcatcctctcagcaaccccgcctaccctcaaactctgtcctgacactgttctctccacccccaaggcctgtggacccttgcccccctccacagtgcagaggacaggctccaaccaggccctaggcccgccgagcacagggccattgccccagcctccaaagccccagggcggaccctgcctctcctgccccgccctcccaaccactgtgcactggtcagcaagttctgtctgctccagctccaagacgccgccttgcacctgtgtcctgtacttgtgtccccacccaacccactccccaggcccaggcctctccctgacgagcaggccctggctccccttgcccggagccgcagcaggcagctgtctggcggccccacctgcaccgggtccaggggcccccaggctggcccccgtgtggtgtgcccagcagggctgggtgcatgggatgctccagggagcatgtgggtggcagagcggggccgaagggtgaccatctggggttatgagtgaggaaaggacgagagaaccagcagggattgacggacttgggtgggtaagcggccttctgaggggatgggcagatggaagggcagcgtggggcacaggtgaggccagcgcacagggaggaccacacccctgtggcccctcctgctcttccctgcccctgtgacttcctcctaagctctagggactctcagaggtgagtgctgggaatctacaccccattgcccaacctctaccttgcacatgcccctaaccccccagcctggtggtggctaaatccaatgcccagcagccctgagggccccacctcccacatcacaggtaatactggcacccagccagcaacacccgggccttcccatcaccagagcacccagcctcggtgctgcccgggga

SEQ ID NO: 38094 - DNA, 860 bp, Artificial sequence
  DNA replication origin
ccacaggggtgtggtcctccctgtgcgctggcctcacctgtgccccacgctgcccttccatctgcccatcccctcagaaggccgcttacccacccaagtccgtcaatccctgctggttctctcgtcctttcctcactcataaccccagatggtcacccttcggccccgctctgccacccacatgctccctggagcatcccatgcacccagccctgctgggcacaccacacgggggccagcctgggggcccctggacccggtgcaggtggggccgccagacagctgcctgctgcggctccgggcaaggggagccagggcctgctcgtcagggagaggcctgggcctggggagtgggttgggtggggacacaagtacaggacacaggtgcaaggcggcgtcttggagctggagcagacagaacttgctgaccagtgcacagtggttgggagggcggggcaggagaggcagggtccgccctggggctttggaggctggggcaatggccctgtgctcggcgggcctagggcctggttggagcctgtcctctgcactgtggaggggggcaagggtccacaggccttgggggtggagagaacagtgtcaggacagagtttgagggtaggcggggttgctgagaggatgctgcagtggaggccggggatatctcagcagcctcctggagggtccggccctgccttcctgtgtcctctctctcccttcccctcctgctcttggaaccaagggctcctcgctagcccactccctaaccccgactaggccttggatcccgctgtctcaatggatgctgttctcccctctgaattccagttgttccctgccagagctaccattctcaacaa

SEQ ID NO: 38095 - DNA, 1532 bp, Artificial sequence
  DNA replication origin
tcagccatgacacgaaacaaccagccagcgggcccgtcacagggaagtactgaagcgtgacctggaagcacaaggttgtgggagggtttgctactcagctgcagagcatggggacgccacagaaacagtgttcgcgagggcgggaccatgcctcctcgctcaccaacaggccctgggtgtgcagcacacggcctggcaccaaggaggtgcccgacaaagtgtgacagatggggcgagccctgcaccctcctccctgtggccatgccaggctgttggcctattctgggcctccccattcagctgtggcggccggtggtggccctcacggtgctcagcccgaagggggatggccagcgctgaccacaggaggtggccgcagggcagcctggtcagtcaccggcctcagcccagcagggagggagaggcacagagaggccgaccaagcctggaaacccggtgcccagctccaggaccttgtgtttcagtctctgctccagggacctggccacgcaggaatgagcgatgggacggacggacacctgcaggggccagggagggcagaacaagccccgctcacctcctccttgcccccagtctccctcttgctctcctcgattgccatctgcagccgcaggtcatccccgcgacggatccgctcctcctgttggggcacgggcacgaccagggagacatgagaacgtgagccacgggcagatgccacctcagcctggaagccccagcaacccctcccaccccaacgaaagcggctgaaggattcgatgggatgcggacaatgtatgaaatggggatggggcacctgggtcaaaggtcaggcgggacaggggataaggggagtggggtgctgtgctggcgcacccggggaggacgggcacccgcctcggtggtatctcctgcgttggggggaggaagggaccctggtcacccgagcaaccttggcacagctgtgctggccaccacccaggctctgtctgacttgtggtcctacatcctacggctgaaggtactgaggtttcaacacgcgtgagcctgtgggcttcgggcccagcaggatggtggggggtgacttaggaaggggcgacggggctggtctgaggggagcccctggcaggggcagggacagggaggctgctctgaccttatcatgctcttctcggctcaaactaagggccagctggagctgggcgtcgtcctcggggccgcaggacgggggctgggggagagagagtgtgaggggcatgacgggaggggccagaggcagagtcagaggcagagccagggtcagatagagccgaagaaagagagggctgggggtccctgaaccagtgagggacaggcagagagtgacacgcagagggacggcggggtgaggatgaggcaggactggggaggagacgagtgacagcatgtggagcagcgacagtgagggccaggcccacgcctggctgggagggagcctgaagtgaggcgtggaggcgggtggcggacagacagccccagctgcacgcccagta

SEQ ID NO: 38096 - DNA, 658 bp, Artificial sequence
  DNA replication origin
caccacttcttcatgctccttctcttctctctcccccacagtcgtccctcatggaccttgctgacgtcttcacggccccagctcctgccccgaccacagacccctgggggggcccagcacccatggctgctgccgtccccacggctgcccccacctcggacccctggggcggcccccctgtccctccagctgctgatccctggggaggtccagcccccacgccggcctctggggacccctggaggcctgctgcccctgcaggaccctcagttgacccttggggtgggaccccagcccctgcagctggggaggggcccacgcctgatccatggggaagttccgatggtgagtgcgtggcccacttgcatgcagcccctacgcctgtgtgcacctgtctttggttgactgtgcccttggacagggacagatcgagccagtggcgccgggcagtggtggggcgtcctgggtgcaggggagggggcaagggcgggggtcagatgagagcccagcacagggtgtgtgagattgtgccttggaggacatggggggtgtgctgtggggaggggatggcagctcagccgaggggcagagaggctctggccaaggcagagcgtgtgtgacgtaggcatctggggagggcggtgggtggagctgggag

SEQ ID NO: 38097 - DNA, 881 bp, Artificial sequence
  DNA replication origin
cataactgtctgacaccagtgtctcctatttcattatgcccaagtttcagggtcttcagtttcccattgcaaataagaacagcagcaatgtccttacaggaatcggaagtaaggaaacagcccatcaacctggggaggtggaagacacacaaatacgtacacttatgaggtcaatcataacagcccaccttattttcatttattcatatgacgcaagaaatacccaagtaaatctgagatgatgaggagggtggggaggggaaggaggagagaagaatgagggaggagagaagagcagaggacgggagggtgggagaatgagggaggagggaagaaggggagaaagaggagggagaggagtgggaggggaagaagaggggaggaagaggagtgggaggggaaggagggggaggaggaggaggggggaggaggaggaggggggaggagatggaggaggggggaggagaagggggaggcggaaagggagggggaaggggaggaagagaggaggagggaagacaaagaaggtggaagcagcaatgacttcccagttcctccaccttccctactctgctccaacactttggggtccctgcacttcttctctcctgcctggctctcttttctctgtggcctctcctcattattctccctggttgaaatgctcctgccccaattatcagcatagctacctcctccccaccttcaaatccctgtgcaaatgtcacctttttggtgagccctcccctgactattttgtatatcatgtgtccaatccctctccaggccccaagctggtgattccttacagtacttattactccctaatacagatagacagaaaaatggtagatagaggacagaggataggggacagatga

SEQ ID NO: 38098 - DNA, 2254 bp, Artificial sequence
  DNA replication origin
tccagcaccatttatggaagagacgatctgcctccattgtgcctttgtcaaaatgagttggctacatttgtggggcatgccttctctattgtttactgagaaaaatgtaatttctatatttacagtgtaatttctatatttaaaagtaaaaatgtaatttctgtagctgcggtgtaatttccaaagctgcggtgtaatttccaaagctgcggtgtaatttccgaagctgcggtgtaatttccgagactgcggtgtaatttccgtggccgcggtgtaatttccgtggccggcggtgtaatttccgtagccgcggtgtaatttccgtagccgcggtgtaatttccgagactgcggtgtaatttccgtagctgcggtgtaatttccgagactgcggtgtgatttccgagactgcggtgtgatttccgagactgcggtgtgatttccgtagctgcggtggaatttccgagactgcggtgtaatttccgtggctgcggtgtaattaccgtagctgcggtgtaatttccgtggctgcggtgtaatttccgaggctgcggtgtaatttccgtggctgcggtgtaatttccgtggctgcggtgtaatttccgtggctgcggtgtaatttccgtggctgcggtgtaatttccgaggctgcggtgtaatttccgaggctgcggtgtaatgtccgtggctgcggtgtaatgtccgtggctgcggtgtaatttccgaggctgcggtgtaatttccgaggctgcggtgtaatttccgaggctgcggtgtaatgtccgtggctgcggtgtaatgtccgtggctgcggtgtaatgtccgtggctgcggtgtaatttccgtggctgcggtgtaatttccgaggctgcggtgtaatttccgaggctgcggtgtaatgtccgtggctgcggtgtaatgtccgtggctgcggtgtaatgtccgtggctgcggtgtaatgtccgtggctgcggtgtaatttccgtggctgcggtgtaatttacgaggctgcggtgtaatgtccgaggctgcggtgtaatgtccgaggctgcggtgtaatgtccgtggctgcggtgtaatgtccgtggctgcggtgtacttcccgaggctgcggtgtactttccgaggctgcggtgtacttcccgaggctgcggtgtaatttccgaggctgcggtgtaattcccgaggctgcggtgtaatttccgaggctgcggtgtaatgtccgaggctgcggtgtaatttacgaggctgcggtgtaatttacgaggctgcggtgtaatgtccgtggctgcggtgtaatgtccgaggctgcggtgtaatgtccgtggctgcggtgtaatgtccgaggctgcggtgtaatgtccgtggctgcggtgtaatttacgaggctgcggtgtaatgtccgtggctgcggtgtaatgtccgaggctgcggtgtaatgtccgaggctgcggtgtaatgtccgaggctgcggtgtaatgtccgtggctgcggtgtaatgtccgtggctgcggtgtaatgtccgaggctgcggtgtaatttacgaggctgcggtgtaatgtccgtggctgcggtgtaatgtccgaggctgcggtgtaatgtccgtggctgcggtgtaatgtccgaggctgcggtgtaatttacgaggctgcggtgtaatttacgaggctgcggtgtaatgtccgtggctgcggtgtaatgtccgaggctgcggtgtaatgtccgtggctgcggtgtaatgtccgtggctgcggtgtaatgtccgaggctgcggtgtaatgtccgaggctgcggtgtaatttacgaggctgcggtgtaatttacgaggctgcggtgtaatgtccgtggctgcggtgtaatgtccgaggctgcggtgtaatgtccgtggctgcggtgtaatgtccgtggctgcggtgtaatttaccgaggctgcggtgtaatgtccgtggctgcggtgtaatgtccgaggctgcggtgtaatgtccgaggctgcggtgtaatgtccgtggctgcggtgtaatgtccgaggctgcggtgtaatgtccgaggctgcggtgtaatgtccgaggctgcggtgtaatgtccgaggctgcggtgtaatgtccgaggctgcggtgtaatttccgaagctgcggtgtaatttccaaaaatgtaaagtctatatttgcctggatattgaggctatgtcaggtgactataggattcttgtatcttctggattattgtatctctgattcccccatccattattgaga

SEQ ID NO: 38099 - DNA, 1281 bp, Artificial sequence
  DNA replication origin
ggatatcctcactatggtgcgggcactcacagggcctgggagctgcttgtagatggggcagggcggactggtcagggccaggcctgcccgctgcaggggaaggagcccccacggcttctaccaccctctcacaggggcggctggcttcctccactcctatcgtgtggcccccgcccctaaccccaaaagcaccctcctcctgcctccagcttctgggggagactctgactgcaaagggcgcacgtccccctacctgggtcgttcacggggctggtcccgtggttgcggctccctgcgaaggaggctgggagatgaggtcccggcggctgccgctccggggacaggaccccccgccccctacgggaggaggatggtgcgctcagctgtctctgctgcaggggccaggcagacgagccagccaggggctgggggagagggcgggtatgccacagtccagccgagcgcttagggcatttcaggcagtgcgcgtgcccgaggggcttggtccggtagagccgctgcagccgccctgccaggtgagcgctgttgttcatgatcagaagggggctcgaccatggcgactggtttcctggacccacagcccaggtcctgaggacccatgttcctggggccttgggaggccgcagtgagggtcccaaaggggtattttcaacctggctgaaggctgcgattactcaggagcgattggaggcggcaagctgcaggcgtctttgacttgggggtttcatagtagagggggacttgaaggagaaattcggatttccagttagagcccttaatctgccctttcacaccctgatgtgcttgaggagggtcctggggcctcatctggaggcagggggtttagaaaccagggccactgatggtctacagatcctggaggatttgttagaggactagggagtgattgtggatcaaaaaagcgtgttctcaagtggccagagccttgcttagataattggtattgcatgtcagtttttgaaatttcaggtcactcgaaaggagggggtgaaccttggcagttcagagtgggctgggttagcaaagactgaggaagcattgctcacttctcctagggtccttctgtggagctctggccttgggcacttctggaggcctgggaggatgggaggtgccctgtctggtagaattggcagctcggtgccccataagtcgggcacactgagtctcgggtcagcctcttctacctgctccagtatatggtggcaggagctgacacctatagcaagaaagattcag

SEQ ID NO: 38100 - DNA, 1202 bp, Artificial sequence
  DNA replication origin
cgagatcgccatccccgtgggcgatggcgagggcatcatcgtggtgggcgcgccgggcgagggggccgcggccgcggcagccatggcgggcgcgggggcaaaggccgcggggccccggtcgcggcgcgccccggcccccaagccgtacgtgtgtctggagtgcgggaagggcttcgggcacggggccgggctcctggcgcaccagcgggcccagcacggggacgggctcggggcggcggggggcgaggagccggcccacatctgcgtggagtgcggggagggcttcgtgcagggcgccgcgctccggagacacaagaagatccacgcggtgggcgcgccctcggtctgcagcagctgcggacagagctactaccgcgcgggcggggaggaggaggacgacgacgacgaggccgcgggcgggcggtgccccgagtgccgcggtggggagggccggtaggggaggggcccgggggggggggcgggcagggcccctcgggcttggcgggagcgacgacgtgcaagaccaagagacccagggagaagcggacggggtgcgatggaccccgcggcatccccggctccccgccctcctctgtccctgcgccgtccgtgggggggcactggggcgtattagggcccgttcacttctccgcctcgagactctgccccctcagcctggcccgcccttcctaagttatcggcctgcgagccggagagacaatggagagaactgcagaggccgagtggcgaccaggccccaagcggaaggccattttccctgctcttcctcagttgtccggggcgggggtggggggtgctgcgaggaatggagaaaccaggccctttagaggatcccagagagggaagagaaccaggggcccttttctcttttagaattttcttttaatcagcccaccttttgactccccgcccgccccaatccattatttttttctgccttccgggtcccatccttagagctcgagtcgttccttcccctcctggattccgggtagcagaggcagcgccgcaggaggcgggtgcccgtttgtcccaggcctgggcgtggtggaggaaggggtgctggaacaataaacggcactatccaaatgtccccctctgcgtggttcttgagtccgggagggagaagggcaagaggggtaaacggaggctctcgccggggcatcagcagagcgtcagcc

SEQ ID NO: 38101 - DNA, 2051 bp, Artificial sequence
  DNA replication origin
ttggcccgccggacgctagccgccagcaccttggccgccacgccaggccccgacagctccgggtgcagccgcaggtgacgcgcgaggctcttgggctggctgaagccgcggccgcagcgcgggcacacgaagggcttgaggccgctgtgcgagcgccggtgcttggccaggctcttgctctgagtgaagctgcggccgcagtcggggcaggtgtagggcttctcgcccgtgtggatgcgctggtgctgcatgaggttggagctccagctgaagcgcttgccgcactccaagcaggcgtagggcttctcgcccgtgtggatgcgccggtgctgcaccaggtgcgagctctgcgagaaggtcttgccgcagtcggcgcaggcgttgggccgctcgccggtgtgcgtgcgctggtgccgcgtcagcttggaccagtggctaaagctcttgccacactcgttgcagatgtagggggcgggcggccgcggccggggaggcgggccggctgggggcgcagactggggcggggacagcttggtgggaggccagctggggacgtcgtcatcatccatgatgaggatgtccactggaaagcaagagggtagggggaggtgagtcaagagaggcaagggctccacgcctgccttggctgctacgctggcctcgggtgcctcgctccccctggcgcaggacctgccctggtgtcctcagagtgtgcatcactccctgcattttactaagtatttattacccctctccccagctaagacctcagctctgtgtgagttaagaccctcagtttacccccaacctctagaacaatgccccagacacagaaggcctggtctgtaaacaaccaggcaacataagaggcatgggcgaggggcgggatccacggaaggctcccagaaaaggaccccgaaacccaaaacaccagcctggacgccgggggcagaggatgaggaaggctcacgggcaaaggttccactaggcagaggggccgcagggcttgaatgcagccctggacacctggtcctgagccagggagtgggtttggcaccctgaagacgtgcccgccagggagcgatggtgtcacattcgggctccaggaagacaatcctggctgcagacaggtaatgggattggagatgagcatgaaagccccacctccgaacctgggagtaaaacctggctcaacgccacctccattacagaggctatggtcagcccctggtgtgggggctcctgtctgctcagtgaggacaattcgggcacacagggctttgcctgcacatctttacactgaggacgcccttccagcagtcaacgaggcctttcacacttctgcaccaggcctgcccctgggggctctcccgggagggatgggcttgcctcctccccagctcattcactcctgagaagggtccgtgtgcagcttctacatttgctctcccttggggcctggtccagagcaacagaatcaggtgggagggcctcagcaagtgcatctctgacccccgtggacaccccaggtgcaccccacagggttttttcaaagccatgaatcacaattacaacgttctcactcctgaccttactagactgtaagctcctaagtctctatcccaacacctggcacggtggtgcccagcacacagagcccaaacaccctcccagatgccacgctggcaaacacgcaaggaagggccatgacgcccccctgcgctacacacttcagcgtcaggtcctcataagctgggagcacaaaactgagcctttacaagggagaaactgaggcactagggagtcgagtcacagcccacagctacacgactacaaagtggcaatgcccagaagcgcattagtagactgggtccaagaaacagccatctaccactaactgcggccgcccaccgctaaatcccccacccacaggcagcacaccctacacgctaagggagtgctccacaaagtgggatcctgcgaccagtagcatcggcgccacagagaacatattaaaaacatttatgcactgcccggagcggtggctcacg

SEQ ID NO: 38102 - DNA, 1531 bp, Artificial sequence
  DNA replication origin
cggcggcgtgcgtagggaccctcccggtgcgtggcacgggtcggcggcgtgcgtagggaccctcccggtgcgtggcacgggtcggcggtgtcgtgcgtagggaccctcccggtgcgtggcacgggtcggcggtgtcgtgcgtagggaccctcccggtgcgtggcacgggtcggcggcgtgcgtagggaccctcccggtgcgtggcacgggtcggcggtgtcgtgcgtagggaccctcccggtgcgtggcacgggtcggcggtgtcgtgcgtagggaccctcccggtgcgtggcacgggtcggcggtgtcgtgcgtagggaccctcccggtgcgtggcacgggtcggcggtgtcgtgcgtagggaccctcccggtgcgtggcacgggtcggcggcgtgcgtagggaccctcccggtgcgtggcacgggtcggcggcgtgcgtagggaccctcccggtgcgtggcacgggtcggcggtgtcgtgcgtagagaccctcccggtgcgtggcacgggtcggtggtgtcgtgcgtagagaccctcctggtgcgtggcacgggtcggtggtgtcgtgcgcagagaccctcacggtgtgtggcacgggttgggagtgtcgtgtgcagagacccttaggcgcctgttgccctgtttctgctgtgatgggtaagtatctgccaggggtgtgggaactccagtccctgtttggcatgagcaccacatgtacactgtcttgtgtacgcttgacagtaacatgttctccatcttgccagtgaggaagctgaggcgcgaggaggcgcgaggtggggttgcttgccccaggtccagctggggagtggtggggctgggatgggaactggcggtggttgtagcccttgagggtccttgagtccttcctgcggctgtgtgaggccttggctggcccctgcagtggggagcggccaggctagctccaggccagttctcggtgtcctggggtaggtgctgtgtgccttgtctgccgggcgctgtgcctgtcacgccggggtctgcaggctgcctccctgcagggccctcggtgcagcctggcaccccataaactctgtccttctgtctcatccccttctaacagggacccagacatggagctgcgggaagaagcctggtctccggggccgctggattctgaggaccagcagatggccagtcacgagaacccaggtgagcagccagaggccttcccagccgaccccgctgcctcccacctgaccctggcttcctttgcctctgggtgggaggaaaccccccttccctgttttcccctcttggggccctgggaccacccgaccctggcctcccctcccgccctgggccttgcactcctggctgtagagggagggctagtgttgtggctccaagtttcctttctgctggatgatcttggggacccctgggggccaccttctctgcctgacttcctctgtccttgcccctccagcctgggcagcacccccgtctgttgagggtgcccccttcctctccccacagccccgcctcca

SEQ ID NO: 38103 - DNA, 873 bp, Artificial sequence
  DNA replication origin
cccgtggagtttcgctgaggcgctcctggtttatgaaaccccagcatgtggaaagctgggagggcacgtttgccacagctccacctggcggccctgcccttccctgatctgtgcgagggttcaggttccagccgcgcctgcaggagggtgggagaagggctgggagggctgcctcagagcctgtttcattttatttttttattatttatttattttattttattttaaatttaatttttgagacagagtcttgctctgtcgcccaggctggagtgtgatctctcctcactgcaacctctgcctcctgggtttcagcaattctcctgccttagcctcctgagtagctgggattacaggcccctgccaccaggcctggctaatttttgtgttttggtagagatggggtttcgccatgctggccaggctggtctcgaactccagacctccactgatccacctgctttggcctctcaaagtgctgggattacaggtgggagccaccgcatccagccagggagcctgttttaaaagagagatctgggtatgaacccttcaacaactcgggcgcgtggcaaaggctctgctctccactttagctgtgtgtgtgcgtggcaccgcttggtggtgtgcgtagagaaccctcacagtgcatggcacaggttggtgttggtgtgcgtagagactttcacagtcacgggttggtggtgtgtgtagagatcctcttggtgcatggcacggtttggtggtgtcatgtgtagagaccctcatggtacgtggcacgggtgggtggtgtgcgtagagaccttcctggtgcgtggcacggatcagtggcgtgtgtagagaccctcactgtgcgtggcacgggtcggcgtg

SEQ ID NO: 38104 - DNA, 1621 bp, Artificial sequence
  DNA replication origin
cctggtgagacacagcggcgccaccccacctcgttccccaacaacctcaacaccggaagagaaaacccaggcgaggcccccttgggctgaatgcactcggctctgaggaaacctccggcatccagcacctcattccaggccggggtctgcagaccagcacgtgggaacggcggcatccagcacctcattccaggcggaagtctgcagaccagcacgcggaacagtggggcttccacctgagcaccacacacctccttggcacaacccctctgaaccgattttcccgagtccctccagtgacaagaagctcaccactatccaggtacagaacggagccagccccactgcagggtgctgtcaacctgccctcacgaagggcctgagagtctgaggagaactcgggacgtgcctgtttaaataaattcatgtgcacagatatgccatgtgggtcactgggcagcccctggccaccccaccccacggttccaggcactgctctaaacggctgacgaactgtgagtagattggggtccatgatagccctctgggtaggtctgactgctgtccccattatgcagatgaggaaacagaggcccaaggtctctccgtggggaaggggagaagggaaaggctggaggagtacagaaacagttcacacacagaccatcaggccccaagtctatgcccagtaccacccaccactacgctcgcctcagaaactgtgttcaaatcccacgtgggaacatgaaggccgcgctctccagggtcctcatttactgagcacctgcgaggaccagcagacatggggtcaccagaagacataagggtcactgggagaaacgagggtcaccgggagacacggggtcaccgggagacacggggtcactgtgagacaatggggtcactgggagaaacgagtcaccaggagacacggggtcacagggagggacaagggtcaccaggagaaagagggtcaccaggagggccgaggtcctgcccccaaggctcacagacagcaggaaggaagcacacggggaggggggcctaggggcagaaaagggaggggggtctagggggagaaagtgacgggcagctctgttggggaggctggggtgggccctcagaaagaaggcaccacaggagcattccctggatgggcagcgtggaggggaggggacaggcagcagcttgaaggccgggcatgctgggggctgcgggagaggccgctcgaaggccgggcatgctgggggctgcggaagagagagcttgaaggccgggcatgctgggggctgcgggaggggctgcaggtgtgtggggcagtacctgccgggaggactgcgagtcacctgaagcgcaggggacccttagaggtgggcactgttctgacgcttgtcttatggatgtggaacatgaggccggcagggcgagaccctcgggtcccctgcaacacgtgaagggcagcactggcggcagcagccaggagcagtgtctgtgccaggcacagagccacagagactcccaggagactctctcagctccagaagcgggaggcactgaaggcagccctgccaggaggcgccgctccccgctctctccacccagcccctgcccagtgctccct

SEQ ID NO: 38105 - DNA, 1098 bp, Artificial sequence
  DNA replication origin
tgagcacgtcctcttcctctacgaggagggcgtgtttcacgtggggtttcatctgcttgcaggaagaaaggggaggctagagcacccttctcgcatctgctgctgcccccgtgcctttggggctgcactggggtggcctgttctgtgccgtcgccttcactgctggcccccagcacccagccatctaccagttccgatacgtagccccagccgctgtccaagacacccctttaggctttttcccttaatacagacgtaattacctgttattaaaatattaggaaaatgaacataagaaaaacgttgagatcactctcactcttgatgttgggcgtgggaggggtgccagccgtcattccttggccggctcccttgctcccgtggaggaggggtgactccacccacctccccggcgtgggtctcttgagttcctcccggtttccccattcggaacctcactgtgatggaggctgtctctgcaagaagcatttcctgagatttgggctttcctgtcggtagcctctggagaggtagagctagcctggtcgggctgcaagcatgttcatggcagtttagcctgaactcttccatccgaggcacccagagcccacgggggtctgtccgaggggaggtctgcctgtccttccgcgtgggtctcacctcttcctgagacaggtccggcgaggggctgagtgttgggatttgctgtgtctggtcttaagcctgtgctttgtccagacctacctgtttgtgtgctcacccagctgtgcctggcgctgccctgggtgctagggaccacatgggtgtcagagcgggccctgacatgacagggtgccgggaggacaggccagctaagcagagacacggagagtggcagagtagcaggcgttaggaagagaaaggcaggcaggtggagcaagtggggaccctgaggaggtggccctcacctggagtccagaggaggcagctgggaggactggaggagagctctgggcaggggcagggtggagggagctggggagctctgggcaggggttgggtggagggagccagggagtgctgggcaggggcggggtggagggagccggggagctctgg

SEQ ID NO: 38106 - DNA, 1138 bp, Artificial sequence
  DNA replication origin
atgggagttctgggcttaaccttttgaggaactaactgccaggtgtttcctatggcgcccgcaccagcaatgggggtctccccacttctcctggtcctcaccagcacttgttttctgaggctggcagtgggtgtgaggtgctgcctccctgtgggtttggtctgcctctcccagacggctcatgaggacatccttgcatgtgcctatcagatatttgtctttctttggaggaatgctttctcggatcctttgcccgggttctaattgggttgtttgaactgagtgacttcaggaagatgagttggtgtgtggtgtgaggagggcacttccaagaggcagggtgggagccaggatcgtggtgggagggagcgaaagccccaagggaaggggaatggggagaagagagtgagggtgggagggaggaaagggccagagccctccgtgctggagggggtggggtggggggaacggctggtctgggcaccccagagctcctcccccgccccacaaaggcagggccacatggggtgcatggtggctccaaagaggttgtggagtcaggctgagaaggagccacaggatttggtgaaaagtcagagagggtgttagcccagtggttggaggatgacttggggggaaggaagggaggtggctgctccaggctgcaagtagaggggaaggaataagagactggggggaggaagaaagcaggtgggtgccagagaagtttctgggcagggagggccacggagggccaggaggagttgcttccgagagtgcggggggaggaggaggtgagattggcagcagaagaaaggggataattggcaggcaggcctccagaggggtgggcgggacttaataacaacaataataacaatcatttgtgctaattggatctctcaagggctggggcgaggggaacgcacccctgcccgtgctccaggtgcttcctctctgcagcggaggtcagagccaggtgagtaagcacctgcagaggctgggagagcctgagaccccgactgagaaacggaggctggtaagggaggccgggaccctcgtttcagaagatgtgcaattcccagctttctggtagattccttgaatagcccagggttttcttgagagcaagtggggg

SEQ ID NO: 38107 - DNA, 1367 bp, Artificial sequence
  DNA replication origin
gggcggcgggcgcgcgtgcgcgctgctgggggggcgtgagtgggcgcgcggccggggtgacgcgggcggggggagtgcgcgtgcgcgccgaagagctgtgggaggggacgcgcgcccgggcggcccgcgggcggcgagcggggctggagggggggtgcgcgtgcgcgggtccgggtccagggcgcgcgcgtgcgcgtggcgggggcaggagcgggggcctcggtgggggtccctctgctgcgggccgtcgggggtggggccgctgtccgtccccccgaagttccaactccgccggtcgtggccggaagtggtggcgacttcggggggaagttgaggcccaggtgggggaaggggccgcgcggttgggctggcctggccggataccgcggccccgagggcacggtctcagccctcggcccccccagcccttccttccccttttcgagtcagcccgggtcccgttgctgccccgggcgggctgcgcgtggcctttgatcaggcgggtaattacggggattctggccggcaggaggcccattcattcgtccttgctcggcaggcggggaggaagcgcgtccccagcgggggaagtgactgggccaaggtcagccaccgcgtggcccacggggcagggcgaaggcggggactggatcgggtggcgactcctgaggcctccctcccctgtgccgagtggatcagagtggagccccgccctcctgacaccccaccccgacccccagtccagggagctgaccccaattcatgtggatgagtgctctgggacctgcagagtcgcacagaaaagtgacccacagacacagaaggcaggagtgagtggaggcagaagtttttccagtgccaggccctgtgccgggcactagagacagggagcagggagatgaacaagggcttggagtctgggtggaaggcagagactgagacccgggcgacagagtcgccatccaaggtgaccagacccctgatggagaggtctgggggctgtgggagccagggaaggcattttgacccagcccagtccgggggatggtcagggctttagggaaggaatggcttggtctgctctttgcggtgtcctgctcccaggtcccatgttgcgcagtgcttagaacccatctggggatccgattgaccccagcgccgggaagcacagttgcgttgatcctggcttagctcctctgaagaccgtaagcctctttggctaaacgctgctgacattcacctgcctgcctctgcgcagtccctgtggtcctccggccacgcacggcctcagagaacatccagatcagattcctgcttgcttatctcatgtcttatccatccatccgggcacccggcctggcccctcc

SEQ ID NO: 38108 - DNA, 1006 bp, Artificial sequence
  DNA replication origin
ccgcactcctcctcctctctcctgcctcgcggatggtggcagcggcggcagcggcgactcagaccctggggtcagggggacgggcgcccaggccggaagtgaccttcccggccgcttccgcccgcgccgctcccccccttctccctactccctgccccccgggccgccaccctgtcctcgccgctctaggaaggcgagcccgctatcccggccaccgcccccagctctgtggtgcccggcgggcgcctgagggagccacttccggaagtgtctaggacgcaggtcctccgtccatgctctatggcgccccgcgccgaggggcttcggccccgcccccttcccggacaggaggtgcgggctgggcccgttaggcggagacttccgggtgtctagggcggtgcccccccgacaacccgggctcctcgcgcctgcgcggccgggtccccgggcccgccgtgaggagagtgaagtggtggagagggacgctcgtgccaccccgggtcctcctaccgtctctatcatggtaaccccttctctgccgctgcacctcccagtggcccgagtccaggtgccttagttactggacagagaccccgggttccttagttactggacagagagtgctgcgcttcaggtgccatggcctcagtttcctcctttctgaagtgatgaaaatacattgtgcgcctccaagtgcttcacacgcactaggtcctagtcctaactagggcctcatggtaggtcctatccctatgttgcaggtgaggagtcaaatcacctaccaaaagtcacacacccggaatgccagagcctcggcccgaacccatggagtttggctctaaattcgtgtatttaacccttgactgtacacactgcctcgtgtcatagccctgagaatccactacttcccccgcgttaggtaggcacctagtaaggacgcactgggtgttagctgttactgttggtattcttgcaaaaaacacatattttaaaataattgtccaaa

SEQ ID NO: 38109 - DNA, 969 bp, Artificial sequence
  DNA replication origin
ggggggaaggagggagggattgggtgggggcggttggacgagggagggaccagaggttggatgggaagaggggcgccgggggcctcaggagggaaagatgggagacttgcggggaggggaggagaagggggctgagtgatggggaaggggctgggagagggaactagagggggagggacttggagagggggaggggtggatagtgggagggggtcgtggatcctcgaggtcctgaacgcgggagagaaatgctgagggagaggacgggggaggggcgcctgggggagggggaggggcgggacgggggagggacaggtgggggaggggaaggggaccctagcagagggtgggctgtgagatgaaagctgagtgggaagctggaccctacaaaggagtctgggggcgccgggaccggaccccttcggaaaggtttgcgggaaggggcttccggggacgatggttattgttgtaacgtagatacggcgcaggtggctcgttttgcgcgctgcttctacaagtgcaacttttacagagttgtgagattcctgaagataagaatcgttgctctgttttgctgctttctcagtgcggagcatctgcctttttagcttgttgcaaggcattattaccttcggtaatatgtgtaaagtgcttagaaactctgtttattgtcaaatgaagttgacccccgccacctctaccccagtcaggatggagtcaccctcctctatatccgattttaacgcctattccaatgtatacttagtattttaatctgcgtgcgtgttcatagcagtgtcccctgggcacctcgcagggaaacttcgacaaagtaaccctaagtctgactggacacttactagccaggtgtggttctcagcatttttgttctccttctatcactttacagtcaacgaaatggagatacagggtattacaaaaggtgccttgtacctcgtccaaggacac

SEQ ID NO: 38110 - DNA, 1737 bp, Artificial sequence
  DNA replication origin
tgtcttcaaggcatccagggtgcctggctctggactggactgtgctttgcggacacagacagctagacagcagggttacagctgttgaatgcacatagcacagggcgctcattggatggtagggtggattgacatggtggaaggcccttacttaacagcatgtgctttcttgggagcaggccttgtgctggatggccccaccgacccagtgaagagctggacttggtcactgccccagagagctcactttctggacagcccagggtgtagtgacctgtgatcacctctgagattgcaaacagggtcagcttgatggcctgtggcattgctctctggcggaaattcctccttagtcccagagggatcttttttatagcagagcaggcatctgtgtggcttttgagacttggatctggcctgggtcttccgataagtctttctgcctgctcccaggttcatcagcccttaaactgatggatgggtggggtgggaggtgatgctgtggcctggctgtggatgtgcaagtccaggctctgccacgtgttagctgagtgactttaggtaagacatctccccttgctcctgctgcaacttgggggtagtaacaccaacctcatgggattgatcagcctgtaaagtttatttgagtgctagccagaatgctggggttggaatatggagtctctcgcccacatgaattgtagtgaagaaagtcagcacacagatatcgtaacactagatcttgttaaatgctgaaagaaaactaataagggtgacgtcttagcaactgggggaagggcacgtgggtgcagcatcggagggggtgatctggggaggctctccaagggggtaataattgcatggaggcctcagtcatgagaaggagtcaggtaagcaaagattggggggaaagagtgatccagcgggaggcagcacaggtgcagaggccctgtggtgggcactggccttcggtccaagaagatagaaagtgagccagaccgggcacagtggctcactcctgtaatcccagcactttgagaggctgaggtgggaggatcacttgagtccagcagtttgagaccagcctgggcaatatagtgagaccctgtctctacaaaaaatataaaaattagctgggtgtgttggtgcctgcctgtggtcccagctgctcaggaggctgagccaggaggatggtttgagcccaggaggtcggggctgcaatgagccgagaggtcatgccaccgctccagcctgggcgacagagagagaccctgtcttaaaaaaaagaaaaaagaaaaaaagggatccattgtggctggagtatagagaatctgggagcaggcagagatgagaaagtagggctgggctgcatggtctcatggccatagtaagcaatttgggttttgagcatcacaggaagcagttggagggcactgagcaaggaagtgacagggatttacagtgaaaaagtttttgtgatcactgtggagtgatttggctctaggtggcgagagtaggcatacacgggtcttgtggcagccgtcccagcaatgagatgacgtttgtggttagtgacatggcggtcaggagcccaggctttggttgtatcaggaggaaaattgtctgaacacagacttcctctcagacctcaccggctagaagcagattatgtgcccaccctctgccttgtggtcaaggggactttgctatatagttccttatgatacagtccaagct

SEQ ID NO: 38111 - DNA, 904 bp, Artificial sequence
  DNA replication origin
cagagcgagactccatctcaaaacaaaaattaaaaaaaaaaatagagacaggagagctcgctgcctctctctattctacgccatgggaggacacaaaaggaggccgtcggcagcctggaagaggtgctcaccagaacccgacagtgctggcacccagatcgcaaattcccagcggaagggactgggacaggccgtcatagctgtcatagcggagcaccgtggactgaactgctatgagcttatttctcagttctgggagcgggaagctcagaatgccatcatggtcagttcctggtgagggcctctgccaggctgcaggtggcctccttgctgtgtgctcctgctggcagagatggacagagtcccggtgtccctttctcttataaggccacagccctattaggcccagcccttgtgacctcagttaactttcattaccagttaaaagcttcgtctccaaatacggtcacactggggtgagagcttccacatgtgaattttgggagacaaattcaggccacagcagttagttggggtggcttctgagtaggctgcaaagtgtctgctcccagggtgtggggtgcacggccccacaagtccagtgagggtggtgctgatggtgacctgctgctgccaggcctgctgcaagctctttctgtgttttctggttgaatcctcaggacaggctgcgggaggagctgcaggactgaggtacagaggccaggggcccagggcaggacccagcctggacttgactccctgggatcccaggaagggcacaccctttcctcaccacccgagtgagcgctgccccctcacagagacctctttgccccctgggccaggcagagcaggtgagtgctttatcttacaggggaaaccgaggcacagaggccgggcctat

SEQ ID NO: 38112 - DNA, 2831 bp, Artificial sequence
  DNA replication origin
agatgtacacggtctgatccccagaacctgtcatctgctgtctcagggcaacaaggactctgtggatgggagggagttaagcactgacatggggaaactctcctgaactatcctgacgggccgaatgtcatcacaggtgacctaagacgtgaccacagtacaccatggaatactatgcaccaatgaaaaagaatgagttcatgtcctttgcagggacatggatgaactggacgccatcatccttggcaaactaacacaggaacagaaaaccaaacaccatgtgttctcactcagaagtgggagttgaacaatgagaacacatggacacagggaggagaacatcacacaccagggcctgtcggggggtgggggaaggggagggagagcattaggacaaacacctaaggcatgtggggcttaaaacctagatgacaggttggtatgtgcagcaaaccttcatggcacatgtaacaaacctgcacgttcagcacatgtatcccagaacttaaagtaaaataaataaataaataaataagtgaccacaggacctaagtgggtcaaggtcagaggagtgatgggggatggaagcagaggtcaaggtcagaggagtgatgggggatggaagcagaggtcaaggtcagaggagtgatgggggatggaagcagaggtcaaggtcagaggagtgatgggggatggaagcagaggtcaaggtcggaggagtgatggggatgaaagcagaggtcaaggtcggaggagtgatgggggatggaagcagaggtcaaggtcagaggagtgatgggggatggaagcagaggtcaaggtcggaggagtgatggggatgaaagcagaggtcaaggtcggaggagtgatggggatggaagcagaggtcaaggtcagaggagtgatgggggatggaagcagaggtcaaggtcggaggagtgatggggatggaagcagaggtcaaggtcggaggagtgatgggggatggaagcagaggtcggagtgcagcactctgaggacggaggaagggccatgagccgaggaatgcgggcagcctctaggagctggaaaaggccggaaacggattctctcctagagccttgagaagggacgtggctctgcagatgacaccttgattttggagacttgagaagggacgtggccctgcagacacctcgattttgggccatgagaccaaaccattttggacttctgacctccagaactgtaacagacttgtgtgatttctaagccgctgcgtttgtgatttgtaagccgctgcgtttgtgatttgttacaacccacttttgggaacaatgacccggaaggagggcgaggatagagaagccagagccagcacagaggtgccaggaggcaggagcagaggaggggcgagctgtatcccagacaataagaggggggagtgtctgggggctggtcgggccgcatgagaagggagacggatgaggccactggcagccttgacgggagctgctccctctggaaggaaggaaggccgcccggctgccatggactgaaggctttgctcgctttgcctcaccgagatgccccctctctgctgctacatctcagcacccagcaggcactcggtacgcacttatgaggaacacgcgactgctctgactcttcaccctcctgccactggggactcaggcctggccgcaaacaccccctcactcagggcccctgtgccgctcgaggtggctcagggcctttgcactggctgctctcgtggcctggaccactcttctcagaggtctctgcgtggctgcccaccgctcatcacccaggccccacacagcagccaccagccatgggagagtgccactactgaaaggatggtattttgaacacattggggtccatgaagtaaatttgcctttttttaacgtgctgactagaacacttaagatggcatgtgcagctcacataacacatcccccgacaggactctaagccaggctggcaacttccctgacggggccaggcagtcaacacttccagctcctcgggccctctgtggtcatcacggtggcaagtgtcagccccaggtgacatgagtgggtgggtgtggctgtgcaccaagacttcacccagaacgtgagtcggcccttgcctgctgtgtggtcaagaaaccaaacctgcccagagaggcctggctttgccctctgcccctgggaagtcatctctgagcccttggagcctcacgcatgataaggagggtctgcctgccccgggggactcaggccagcccaaaagcaagatgaatttggggtagagtttggaccagggggtatccttgactttcagggggcgggaggctgaggtcagccacacagaacggggaggagtccccagtaagaacccaggacaccacggtctgaggagaattcctggccggcaagaccccctgcgtgcgggcggggtgcggggagaggacagctggtaactgcgctccctggagccttcgtggccttcttcccagctgcttccagcacgtccttctctgataagccgtgaccgtgaacacggctgtgagtcctagagaactcgcaagtatgccagggtcttggggccctcctgacttgcagctggtgtggggatggagggtgccgcacgtggactgtccctccacgctgtaccgcagcctgtaccgcagcctccccaccgcgagtcacactggttttcaggggttcagtggtgctcctccctgggcttcctggtggcttccctggcaccttcccctctcccttccccgcttgcagtcccgccaggctcacccagagctcctccagcagggccaccgcctc

SEQ ID NO: 38113 - DNA, 1818 bp, Artificial sequence
  DNA replication origin
gttaccactctgagctcatgccatctgttttgttggcattaaaatgttcttttaggaaaagatggtaaaagtaggtggtggttattgttgcttttaatgtatatatcttgcaaaataaaaaaaaatcttccattcggggatgcagtgagagttctgttggttcagtgaatctaaaagtcgggaaatcaccaggctccaggccgtcgggactctcctgcgttctctgcttgctccgaggcgaacctctcactgtggctctgggatgtctttagcatctctcttgtatctgttactctctctttttaataagggcagatctcaggttcagagccttctcctatcagtgtccacacagacgggaataacactgccgtgagtgatggaatttcccatgacctctctctctggcacatgatactggctttccatttccagcaatgatacaacatggtcttaagtcagtgttattttagttttaggtaaaagtaaagaagagtaataagagcctgggcgatagccattgtagctgacggtggtgtatagacagctgacatctgggggcgctgctgtggattggggtttcttggcatctggtctgtgggagctgacggtgacgcatagacagctgacatctgggggcgctgctgtggattggggtttcttggcatctggtctgtgggagctgacggtggcgcatagacagctgacatctgggggcgctgctgtggattggggtttcttggcatctggtctgtgggagctgacggtggcgtatagacagctgacatctgggggcgctgctgtggattggggtttcttggcatctggtctgtgggagctgacggtggcacatagacagctgacatctgggggcgctgctgtggattggggtttcttggcatctggtctgtgggagctgacggtggcgcatagacagctgacatctgggggcgctgctgtggattggggtttcttggcatctggtctgtgggagctgacggtgacgcatagacagctgacatctgggggcgctgctgtggattggggtttcttggcatctggtctgtgggagctgacggtggcgcatagacagctgacatctggaggcgctgctgtggattggggtttcttggcatctggtctgtgggagctgacggtggcgcatagacagctgacatctgggggcgctgctgtggattggggtttcttggcatctggtctgtgggagctgacggtggcgcatagacagctgacatctgggggcgctgctgtggattggggtttcttggcatctggtctgtgggagctgacggtggcgtatagacagctgacatctgggggcgctgctgtggattggggtttcttggcatctggtctgtgggagctgacggtggcgtatagacagctgacatctgggggcgctgctgtggattggggtttcttggcatctggtctgtgggagctgacggtggtgtatagacagctgacatctgggggcgctgctgtgcattggggtttcttggcatctggtctgtgggagctgacggtggtgtatagacagctgacatctgggggcatctagtgggagctgaccgtggtgtatagacagctgacatctgggggcgctgctgtggattggggtttcttggcatctggtgtgtggaaactgacggtggtgtatagacagctgacatctgggggcgctactgtggattggggtttcttggcatctggtgtgtgggtcctcgcctgtcctcagagttttcaccgagacattgccggatgagaaggagaggacagccgaggagaggctcctgt

SEQ ID NO: 38114 - DNA, 1360 bp, Artificial sequence
  DNA replication origin
gcgctggtggcgcagcacgtgctcgcggcgcccgaagcccttgccacactcccagcaggcaaagggccgcgctcccgagtgcgtcttgcggtggcgcaccaggtgctcgcgccagtagaaggtcttgccacactcgcagcacgcgtggggcttctcacgggcgggcagagggcgcagcgcgggcccggggctgccggggctgccggggtgcgtgtcgcggtggcgccgcaggtgctccttgcgccgaaaggccttcccgcactcagggcaggcgtgcggcttctcgcccgagtggctctgccggtggcgcagcaggtgagctggtttcagggacgttttgccgcactcggggcaggacgtggtgcccggggccgctaggaaggcgggcaggccaggcgccagcggggggctgctgggctcctgcttgtaggggcgcacagcctgggagtccccaggcgccggcccctcagccccaggggcggtgcctgctgggaaaagaaagagagtcagcatctgggtcggcacgagggcggggcaaggacagcacaggctggggtggaggcagggagggaacgcttaaaggcagaaaccattggggtgggaagagggctgggctgtgggcttcttattcatacctgtgtcccggtacctagtagtgcctggcatacagtcaatgcccaatacataatagatgatggctggctggatgatggatgggtagatgaatgcgtgggtagatgaagaatgcgtgggtggatgatgggtgatgaatggaccgatgatggatggatgaatgtacagatgatggatgggtagatgaagaatgcgtgggtggatgaggggtggatgaatgtctagatgatggatgggtgggtggataactagatggacggatgggtgatggatgggtagatgatgaatgcatgggtggatgatgggtggatgaatgtacagatgatggatgggtgggtggatgactagatggacggatgggtgatggatgggtagatgatgaatgcatgggtggatgatgggtggatggatggacggatgatgggtggatgaatgtacagatgatggatgggtgggtgcatgggtggatgagtagatggatggatgggtgggtcatggatagatgggtgatgatgatggatgacagagggatggtgggattggtgtgagggggaacatgtgaaggatggatggatgcctgggagaatgatagagggatggatgggtgaatgggtgggtatatgatagaggaatggataggtggagggtggatgatggctagatgggtgcatggatggatagatggatggatgaacctccaaccccgaggcccacccatacccccaat

SEQ ID NO: 38115 - DNA, 2569 bp, Artificial sequence
  DNA replication origin
aagagaagagatggagcctgaatgggcaaaagcagcagctgtgctgttaggagctggagtgaatactgtgagcccagacacctgggatgagatccacagatgtggcccggtcccttactcttttggtgcctcagtttccccatctgtaccatggggataacaacagtgcatgcctcatcggttggttatgatgataaacaaactggattttaaaaaggtctggcccagcagactcactctgtgtttgctgttatcagaaccctgtcctcagaccctggcctgacaccacctcatactccctctcatgcctcttagtcacttcctgaaagtctgcagcagacgacacggcttctcccagcccgtcttcttccccacacggtgggcatggtaacgtccttaacatgcacctgtcagtgtgaaagcagcaggctgagatcacacaccaagttcccgtaagtattctgcattcattaccttatttttcttttgagacgaagtctcgctctgttgcccaggctggagtagggcagtggtgcgatctcagctcactgcaacctctgcctcctgggttcaagtgatcctcccacctcagcctccggagtagctgggattacaggtgtccaccatcatgcctggctaatttttgtgttttcagtagagtcggggtttcagcatgttagccgagctggtcttgaactcctgagctcaagtgatccacccacccgagcctcctaaagtgttgcgattacaggtatgagccactgcacccagccttatttaattttcaaaaacagtcccttttcaggaggggcattactaccagtcctgtcttaggaggtgggtgctgaggcctgtggtcacttgcccttcctggatagcctggcacctaaacccttccctgcactgttgagtcttgaaggcagacctagactccagtgatgtgcactggaccgtccaggtggctgtttccagatgccctcgcagcccggcacaggctgtacctgccccagcccttgacactgagccagaagctgaagcagagagcaaggcagtgaccgtgggggggcttggacgcaaggtggtaccgtggcgggctcagccacaaggcggcaaccatggagggtttgacatagaacccctcccaggctcaggcgctgggcacacaggaaccaaaaggaccagggtgaagccagccccaagactgggcggcaggggagtggtcagaccagcgctctcatcctacgctttccaaagcccggcaactgcccttcatccacccggcagaggctacagatttcctctctggagagaaggaaccggggttgctcgctgagctgacaagaggtggcatcctggaaagatgcagctggccaaagcctgccctccatacggagtccccccctcggccaatggctccagctaaaggtgagagaattccttgcgtggcagaatgggccacccaagacctaccaacactgacactcaggaccccagtcaaacagagtggccttagcaagggaggtgggtgccattatcatcacttgcggatgtggaactcatgcccagagggtatgaccaacctgtaggttcccagccaggaagctgaagggctcagatgcgaacctgactcagtgtggcactcggcaggtcccttccaggagcctcatccctgcctccgtaggatggaggtggggacagccctcctgaggacacatttcctgcactgcctcccacagctgtgcccagactcccagagcctctctcatgccaagagagtctgtggtgggagccaagacagctgaccccagaagccccgggcaccccagacgctcggccctgggagggtggctgtgccggacagactccagacagagctcagactccgggtctacacacagtgactttattactctatggatgctggtgaactgccctccccaaccagcttcacgggggcaggcatctctgtccatcccatgcctttgggtcacagggggcagcaagaccaagaagaccacagccaggccctgggttcagcttcagagccatcacccgctgcctcccccaacccccaatctcctgagggaggagaattcctagggacaagacccagacccctttccttcagcctctgcttcaccaagggggcctggcctgcgcccgagctcctcctggcctgcccctcaggggtcccaggtcctcacctctgctcttcaggcaggaaaagggcagggagagaggaatggaggagggagagggaggctgggccgcaggagagagaagaggggggaaggaggagacattagggagaggccccttcacacagagagagaggccgagaaatcagggagaaggggggggctgaggtgagacctgagaaggaaagtgaaatttgggggaaaaggagttggaaaggaataggaaggcgttgggaagttcagacaagggaggcgcaggtggaggaggacgatgggagggaaggaggagaggaagaggccaagtggcgctgggagagagcaggtaccgcccgggggcagcaccaagggcgggagatggcgctggccgggag

SEQ ID NO: 38116 - DNA, 1045 bp, Artificial sequence
  DNA replication origin
agcctaggccaggagggcacagggtcggctgccagctgcagcggggtgagagcctaggccaggagggcagaggggcggatgccagctgcagcggggtgagagcctaggccaggagggcacaggggcggatgccagctgcagcggggtgagagcctaggccaggagggcagaggggcggatcccagctgcaccggggtgagagcctaggccaggagggcagaggggcggatcccagctgcaccggggtgagagcctaggccaggagggcagaggggcggatcccagctgcaccggggtgagagcctaggccaggagggcagaggggcggatgccagctgcagcggggtgagagcctaggccaggagggcagaggggcggatcccagctgcacgggggtgagagcctaggccaggagggcagaggggcggatgccagctgcagcggggtgagagcctaggccaggagggcagaggggtggatgccagctgcaccggggtgagagcctaggccaggagggcagaggggtggatccaagctgcactggggtgagagcctaggccaggagggcagaggggtggagggagtgaggggctcctgggagagtgatggggggcttgaagggatggggataacaggagaaaccccagcattggtggcagggaaaaggtgaggggcaggtaaggggacggaaaggtttgaagatggagtggtggaggcagtggggcagaaggcatgggcgctgggggaccaggtcggcctgatccgatgatgggggaaggagaggcttaattgcttgcacacgtccaaactcctcaagatgtgtacattaaatgtgcgccatttttgtatctcgatgatgcctccataaagctaaaaaataaattcctctgtccttatcggaaatgcacctggcccccgcttcggaaaatgactggccgctctctccttgcagcgtgttccgcagctgtaggcacctgtcgtcctgccttcgatggctcctccctccgtccccctggtcctcctcctcgtcctcttgctgagcctg

SEQ ID NO: 38117 - DNA, 1168 bp, Artificial sequence
  DNA replication origin
gggaggttagaggcggaggccggggatggggtgcgcgcgcgcagggaccttcccctcggtggctcccctctggtctgcagccgcagggccgtaggcagccacggcgcccagccggaacggcacgatctcgaagccccgcttccccaaggactgcagcggcgcgtggccaagcggttcaaccagccggcccagaagatccgcaggcgccaggccgggcaagccaaggcgcgccgcctcgcccctgccccgcgtcggggcccatccggcccatcgtgcgctgccccacggttcggtaccacacgaaggtgcgcacggccgcggcctccgcctggaggagctcagggtggccggcacgcgaagaagggggcccggacgccggcatttctgcggatccgaggaggcgcagtccctgcaggccaacgtgcggcggctgaaggagccccgctccaaacgcatccgcttccccgggaagccctcggcctccgagaagggagacagttctgctgaagaactgaaactggccgctcggctgacaggaccggtcatgcccaaccggaatgcctagaaggagaaagctggagtcatcatcgaggagaagaatttcaaagccttcgctagtctccgcatggcccgtcccaatgcccggctcttcggcatacgggcaaaaagagccaaggaacctgcagaacaggatgttgaaaagcaaaaataaagccctcctggggacttgcaatcagtcagcagtcatgctgggtctccacgcggtgtgtttcctggcagcaactgggcctgggatgggacttagtggctgtgacttcctggcagcgggtttggggttttcttgaaagacagtccaagccctggattatgccttactttctgtgttaaaaaactgttggttgtttgacggggggaggggggttgggagaaaagaaagaaaagaaagaaagaaagaaaaaagaaaagtagacggatttgctgggcacggtggctcacgcccgtaatcctatcactttgggaggccgaggcgggcgcattgcctgagctcaggagttcaagaccagcctggacaatacagtgaaaccctccctgtctctactaaaatacacaaattagccgggcatggtggcgggtgcctgtaatcccggctactccggaggctgaggca

SEQ ID NO: 38118 - DNA, 1152 bp, Artificial sequence
  DNA replication origin
tgctcatgaagtgctaccactcggtgatctggttctctctgtggatgtctgcctcccttacagaattaggaccttcttgaaggtagctcaaccatcagagtccccagcaaccagcaacaggcttggtccttatgaacgtcccttagaaagaacaagagacagcggcagagagagaggcagaatgagtgacagtatttcaaaggagcccctggggctgtgttagtgcagaagggagaagttttatcccagtctagaggtgggagggagggaagaaggaaagagaaggaaggagagagaaggagggaaggaggaaggaaagaacagggagggggggaagaaaaggaagggaggaggagggagggaggaagagggagaggaagaagagggagaggaagaaaagggggaggaagaaaaggaaggggggagggagggaggaacggggaggaagaagagggagggagggaggaaggaaagaagggcagagagggaagaaggatgggaaggaagaagggagggaggaagcagacggagagaggaagaaaggaaggaagggagaaagggagggatgaagggaggaggaaagaatagggagggaggagagagaaggaggaagtaagggagggaagaaaaaaggaagaggaaagggaaggaggaaggggagggagggagggagaaaagagggaagaaggagagaggaaggaagaatgaaatgagagatggaggcgggtgggagagtgggaagaagagagtgttttacagaagggctctcccaccacttcctgcttggcacctctgaggcaccctccttcgcttcctctgtgcccccacttccctcctctttccttcctctcctcacactcctcccctccgtgctgccttcttcttacccagtcccctttgttgtaggatacgaagaggtaggtcatcaccatgtaggcgcatttcaggaagttccacgtgttcttcctcttggggagtggtttcctggatggggtggtgcctgagaagggtttaactggagagaaccgtggagatgattgatgctgatggccttcccttcctgccttagagcttcctgtcactgctgtctctccattctgatctccaaactcacatctctgcctgcctcctgaattgaaattttggtccaca

SEQ ID NO: 38119 - DNA, 1027 bp, Artificial sequence
  DNA replication origin
aaacatgggagccctggggactcaaggaccttatgggttccgttcttctctgagtccccagcatctaggatgggtcctctacacacgtgaatatttgaagactgactgaatcaatgaatgaaggatgacttgtccttccttccatccctccttcccttccgtcttgcctccctccctccctccctcctttccttcctttccttctttttttttctatttactttaattttttgagacagagtctcactctgtcacccaggctggtgtgatcttggctcactgcaacctctgcttcccaggttcaagtgattctcctgcctcagcctcccgagcagctgggattacaggcatgcgccaccatgcccggctattttttgtatttttagtagagacggggtttcaccatgttgaccaggctggtcttgaactcctgacctcgtgatccagccgcctcagcctcccacagtgctgcgatgacaagcgtgagccaccgtgcccggcctggcttgtagtttcttgcaccctgccttattttcacctctctgagtctcgcacatggtgtttctctggaatgcttcccctgcttcccctcctcaattggctaattccattctgtccttaacccacagcagaggtgtcacctcctgcagaaaggcttccatgagcccacacttcccctaggctgagataagcgccactgcctcctgcactagcacctgctcatgaagtgctaccactcggtgatctggttctctctgtggatgtctgcctcccttacagaattaggaccttcttgaaggtagctcaaccatcagagtccccagcaaccagcaacaggcttggtccttatgaacgtcccttagaaagaacaagagacagcggcagagagagaggcagaatgagtgacagtatttcaaaggagcccctggggctgtgttagtgcagaagggagaagttttatcccagtctagaggtgggagggagggaagaaggaaagagaaggaaggagagagaaggagggaaggag

SEQ ID NO: 38120 - DNA, 1034 bp, Artificial sequence
  DNA replication origin
cccggcctggcagcctttggggacctgaaccagctgcgcctgcgcaggtggaacgggtggaacgggtgggggagcggacagtcgaacggcctgagagggctcagctggtccgggtgggattctgaaggccagcggaggtgggcttactagggaaaggggcgcagcagtaactacccgcaactgagcggcgggatctgcggccgcccggggccctcggccaacatcccagcatcctctgcgccgcgccggccccggactccatttcccagcggcccctgcggcctgccctagggctgcggcgcctttgtgagcgcggccgccggccaggatcgagccctggcccgggccctggcccagccccggcctccaaggaccgcgccgaaggaggtgcccactggagggaggaggcggtgaggagcgcgggatggagctgacgccgggagcggccatgccaccatgtgtgggaccgtgtgtgacagtgtgtgagaatgtgtgagacattaaggaaccgtgtgtgacaatgtgtttgacagtgtggaatcgtgtgtgagaccatgtgtgactgtgtgagaatttgagaccgtgtgtgacagtgtgagaatgtgaggccgtgtgtgaatatgtgtgtcagtgtgagaccatgtgggacaaatgtgggactatgtgtgacagtatgagactgggtgtgagaatgtgtgcgacagtatgagaccgttgccccggtgtatgcgggagcctttgacagtatatgggaccgtgtgggactgtgtgacactgtatgtgcttaagaccacgtcaccatgtgtgagactgggaatgtgtgacagtgttaaactgtcattatgtgtagaccacgtgtgaacagtgtgtaagaccatgtcactgtgtgtgtgacctgtgtgtgtgggataatgtaagactgtgtgacagtgtgtgtgactttgtgaacagagcttgaccgtgtgtgtaggattagatgagactgtgacagtatgtgagaccatgtcaccgtgtgtgaggctatgtgtggttgt

SEQ ID NO: 38121 - DNA, 855 bp, Artificial sequence
  DNA replication origin
gagaatgtgtgcgacagtatgagaccgttgccccggtgtatgcgggagcctttgacagtatatgggaccgtgtgggactgtgtgacactgtatgtgcttaagaccacgtcaccatgtgtgagactgggaatgtgtgacagtgttaaactgtcattatgtgtagaccacgtgtgaacagtgtgtaagaccatgtcactgtgtgtgtgacctgtgtgtgtgggataatgtaagactgtgtgacagtgtgtgtgactttgtgaacagagcttgaccgtgtgtgtaggattagatgagactgtgacagtatgtgagaccatgtcaccgtgtgtgaggctatgtgtggttgtgtacggtgtgtggctgttgatatgggaccacatgaaactgcgacagaatttgtgtgacagtgtgtgagactgtgtcactgtatgtgaaactgtatgtgaacagagtttttgttgttggactaagattgtatgtgacagtgtttgagattgtgcatgacagtgtgtgtgattatgtgagactgagggagatggtgtgacttagcactgtatgtcatcccgacagtgagtgtgacagtgtgactgagaatggccttatatgacccattgtgagagcagggcgggctacaatgtgggggcatgtccataggttgccaggggaggtgccagaatgagaaactatgtggtttgttgtctgtgatttgtgtgggcaggaagctgtgtgggtgcttggagatgctggtgtgctctggggtttgggagactgctgttgtggtggagagacagaaagattgagataaaggggaaaagatggagaaagggagggacgagagctgaaaagggagagaca

SEQ ID NO: 38122 - DNA, 1069 bp, Artificial sequence
  DNA replication origin
tccacactgagagatgggcagagagctggtaaggcagggctgtggggagaagacaggtcatgaggcagtgccagagtccacaggcccctacctaacctggagacacacacacacacagacacacatgcacacatatgcacgtgcacacacacacacagatgtcagaacacctggcgcattcctgtcccccctcacctgctcacggtcagggaagggcacggccaaccctttttgtgcctaagatcatagcaggttcttggtcatgaggcaaataaggactgcacagacctctggccatccatctgacaagtatttactgagcacctactgggtgtccagctgtcccaggtactggggggagagcagtgagttaaagtggaagagtgccggctcccaagcaccttacattccagtagggaaagaaagtccatataaagcacaatgatggacatggtcattgctatgaagaataaacaggccagggcaggggttagagtcgtggaatggtcagggaaggtgtctctgaggaggtcacattgagctgaggtctaaatatgagagcatgagccatgtgggtgctaggggaagagcattccaggtagaggcacagcaggtgtcagcgtcatgggtgggcgcaggctaggtgtgaggagagcaaggtctgtgtactgaggcagagtgagtgcagcggggagggtgggctaaggcaggcagggccggatcatgaaaggggtgctgagcagctgggatttgatctcaagtgtgacatcactgggggaggagggggagctgagaaggggagtgacaccatcagacaacatttaacaaaaatttgtggcatgtctatatggtgggttaactgtgtgtcagaagagggagcaggagtgaggacaggactcactaggtagctttgcagaaatccggggaagatgttggtggcatgactagggtgggtggagtggaggaaggaagatgtggtcagatcgcctcctcaagagggcccctctatccacccatctcaaagaatctctgccctgtatcagtctatacctatgctgtccaatgtgaa

SEQ ID NO: 38123 - DNA, 902 bp, Artificial sequence
  DNA replication origin
gcaccaatcgtgcgaacgcgcttgtgcgtgtggcgctgaggggtcggggcctcaggccggggctggtggtactgtccccgagaggcgggtgagcgcacgccgcgtggccttgtttgggggcggggccacgcgcccgcatgcgtggtgcgtgtgtgaaggggggtgcagcgcgcggtcccggggtcccggaggggagtgcgcaggcgctgagtccctgctcggctgtctcggtggtcgccgccggggtctgagcccgggaagaccgaggtaagggggctggcgagagtgtgggtgtgtctgagggcgtgggcggcgcgcccgccactgcgtggacgttcctgccaaggcgcgcgtgggtttgcgcatccacgatggcgtgggcgtctgcgcgggtgcttgcgtgggcggtgggctcgcgcctgcgtgggttctcggcccgccacggcgtggggtttgcgcccttcgctgctgtggttctcggggcttgtgcgcccaagtgtgaagttggcgccgcgtgtgaggcgagccgtgtgtgcctgtgtgtgagggagctatgtcgggaccgcggatgtgtatcgctgcgtgacccacgcgaaggaaacaatggagccattgggaagccgggagtgggtgtgtgacgctgactgtgaagatttgtgtttctggagtgtgtgcgtgtgtcagtgtcaggctgatgtgggcgtttattgtagccttgggttactgtgtgacttgcctgggcgtctgtctgccacttagcgtcagtggctttgcggttatgagtgtgtgactgtgcctttctggtgtatatctcactgtaaccatggaaatggaggcccacaggggaagaattcttagcagctctaagatgtgatgggctgccctggaaatctgtggaactg

SEQ ID NO: 38124 - DNA, 1463 bp, Artificial sequence
  DNA replication origin
gcgcctgcgcacactcctgctcttacccgccggaaccctgggccacgcccggctcgcgtaatcacgcactgcgcaggcaccgcccgctctgctctaaggtccctctcactccttcagcagcccgaggacaatcccctcaacactaggccacgccttgtctccgcccctctcgtccgacccctggagagaggctggcgcctgcgcgatggggggttccagcgtcgactcacggagtccttcggatgagagcgtctgggtgccagacgaggccgggggtttgttttgggtggtttgggagtccgagctcgagggctgggccaggaagggcaggcgaggcgggcggctccgacgcgggtcgcgaaggcccagccgcgtcctctgtccccaggacgactacatttcccagaggccagcggggcgcgcgtactcgagtctgcggggcggaggccgcggctcggggctgctgggcgttcggggcggcttggggcggcgggaccactggagtgagctgtgggagagatgggggtgtgcctgtgtgtaaaagatctgtcagagtgtgaggctccgtgagagggtgtggtttctgtgtgtgtgtgtgtgtgtgtgtgacagaccgagagtccagtgtgagaccagggtatgttcgtgtgtgacagagcgagacgggccagtgtgagagaccagtgagtgtgagagagatagggatgtgcctgcatttgaaagagagcgtgtgaagctcagtgagaggttgcgaggtgtgtgggtgtgtaagtgtgtaacagaccaggtgtccagagcgtgagaccaggatgtattcgtgtgagagagtgagacgggctggatggagtgtgagagaccagtgagtgtgagagatgggcgtgtgcctgtgtgtgaaaggccggtcggtcggtgggtgaggctcaatgagaggccggtgtgtgttcgagagagagaagaatcaccatgtatgcgagactagactgtgcaagaacagagtgtgagactgtggtatgttaatgtgtgaaagggagaccagtgagtgtgagaaatgggtgttttgggtgaaagacccgtcagtgtgtgaggccgtgttatgtgtgtctgacagactgagagagaccagagtgtgagaccagggtgtgttcgtgtgtgagagacaacatagcgtgagaccagtgagtgtgagagagatgagcacgtggctgtgtgtgaaagaccagtcattatgtgaggctccttgagaggctggtgtgtgtgtatgagagagagaaagagactaaactgtgagagtccaaagagtgagactaggttatgttgttatgagtttgtgagagagagggaggcgatcaaagtataggacaaagttatgtttcctggcttacgacttctaagatccttggaatctccaaagtattaagtgtctttttgcatgctaatgattggtgggctggcagcctgtaggt

SEQ ID NO: 38125 - DNA, 893 bp, Artificial sequence
  DNA replication origin
cggcatccactgggccgcgccgcggagccgccccgcccccggccgcgccccgcccctccccacccctccccgctgccccgccccgccccgccccgccccgccccgccccgccccgccccgccccgccccgccccgcccctcagcctagagaagcccggcgcttcccacttccagtgcgcaggcagcgccgccggaaccgggcgtggcctcggcgcaatgcccgctgggaagcgtagtcccaagcagggacggatgcggcggccctcggagctcaggttgcaagatacggtttggccccgggcctatgcaacgcccgtccgtcctgccctctgcgggtcgctctcacttgtccctggaccgcagccgccgcataagtggtggccaacgctgggcctgggtgtggccggaagcagaggccgctctgactacacacccaccccccaaaggcttctgggagtcgcgcaggcgcagcggcagaccgggtgaggcggggcttgcggcgaggggtgggaccgcagggccggagtaaaagggtgcttggctgtgacaggtgctaagggcctgggcgtcagctccttgcgggagcgtcactgccgaccgggaagggaaaggcaatcttgggggcctccggagtccggaggatcactctgatgggtgatgtgtgtgggctaggaagggggatgtagagagcttgtgggattgttttgggtgccccctcaccttctcccattatctctggctacacgggcctcccatcctccaaaataccattttccattttgtaacctatgtatttgcacgtcctgggtcgaaatagtctaaccccaaattttcgtctgggctggctcctttatgccattcacttgtcatcgcctcagagagggctgcctaac

SEQ ID NO: 38126 - DNA, 1833 bp, Artificial sequence
  DNA replication origin
ttgggactacgcttcccagcgggcattgcgccgaggccacgcccggttccggcggcgctgcctgcgcactggaagtgggaagcgccgggcttctctaggctgaggggcggggcggggcggggcggggcggggcggggcggggcggggcggggcggggcggggcggggcagcggggaggggtggggaggggcggggcgcggccgggggcggggcggctccgcggcgcggcccagtggatgccgggccatgggggagcgcgcgcggggctgttcgctgggcgtggcgggcgggtgtggccaggggtgtgggtctgtgagggaccggtcggaagggcgtcgcgcggcctcgggtgacatgcggggggcggcgagcgcgagtgtccgcgagccgacgccgctcccgggtagaggcgccccccgcacaaagccccgggcgggccgaggcccgactgtagggactccagccaccttggccctccctgcccggggaaggccgcgctcaaggaatggcctcgcatccaaaggccagcgaggagcggcccctacggggcctgggcacagaggtgagagtgacaggtgtttggggccgagcggacagggacgaattcatctcgggatgagatctgggagggggttgggctctcggggaccagttgctggagaactgtgcccctggtctttgaagctggtggagtgggagaatctgaagatttggaagctcaactgattcagagcagcaagccgcggtaaaagggtgttgactttcccagggtgactctaactagacgcttttcctgttttcgtgctcccagggaggaaaaaaacctatctccacgttgtggcagtccctaggcagggtaatgatctgatcccaccttttcatgcaggaagggacgtttctaggctggtgatttgggactgtggtgtagacctggtctctagctactcctttctctttcagctctgccttccagggacactgctcttccccaggagagaaacaagaagctggaggctgtggggacaggaattgaacctaaagccatgtcccaggtgagttggcatttcatctcttgtctctgaaatgcagtcttgcttttcgggacttaatgttgcttattttcttgaaagttttcagtttaagagacctgtttgggcgcgggtttctatttcttcacgttctagtgaagtgatgggctacggggaaaagtttaaactgcccggggcctcgatgcctgcttcttcttcatcccaatcagccttcattcttgattgatgaaatgattcagcctctcccttgtaccgcttttctcagagggactctgatggaggaattgtgccccttgaggaacacggcagactcttctgctatacatggtttgtttggtgaccactttgtgccagccactgagcaaaccaatagctaagccctagtccctgctctggagctcacagcctgttgacccaatgtcaaggaaacaagcaagattctagaatgtgatcatccttgggccaagtattatgagcgaggactacaaggcgctcctggcttccagcctcctgtagcggaagggtaggcctatttaccaaggaggtgatttttgagccttgccttgaagggagagaagatgtttgggaggcacagtaaagaaagacaacattttagggagaggaggcgcaatatgaaaggcttttccacttgattttgtggctttaaaacatgccagtaaatagttgtgtttgtttcggttggcttctcctataaatatcatagctagctcattaatagatgaaccatttcacttccactgaggcctcaaaaaatatatgtaca

SEQ ID NO: 38127 - DNA, 1617 bp, Artificial sequence
  DNA replication origin
cctctccctccctggccccggcctctcctcagcccctcagcctccagtcagcctctccttagcccctcagcttcccctcagcctctcctcggccgctcagcctctccaggcgcacctcggtcccggcctgcacgccctctcctgcgcccgcacgccctggaccagcacccagccctgcactccccgtacctgggcctgcacgccgtctccccgaggccgcgccctccccggggccaggttccggcccccggcacaggtagagggtgggcgcgaccccgcagccacactcaccggctcgccgctctgccaggacaatgaccgcgcccgctaggcccgcccgacggcagtgcgcctgcgcggactgcgccggactacgcttcccagaaacccgcgcgcgccacctccccccggcttttttcagccgagcccagccgagtggagccgagcggagccaactgagctcctccatctcacagaggactccgcggccaaggaggctggggcgagagggaggattgagggggaggaggcagggaaagggaaggagagagaagagacggagggaggaagggtggaaagaaagacggagggaaaggaggggcgaggaggagggacaggagggaaggggggaggagggagaaaagaagtaggagaggtgggaagaaggatggaaggggaggagggatggggaggagcggggagaagagagaggatggagagggacttggggaggagagctggggaggaagaagaagagatggagaaggaggaggggttggaagaaggatggaggggaaggaggaagggctggggagagactaagggaaaagaacaggtcagagaggagaggaaccaacagaaagaagagggagcgggtgggaggagggaggggcagggaggcaggaaaggaagagaatggagacggcaaggaggagaaggaagaaagggtggaaagggggatgagaaggtggaaaggactataaggaagaagaaaagggtgggaaaaggaggaaagaaagaggaagtcgagttggggagggcaggacaggctgaagagaggaaagaatgggtaaggagagggaggagggaggaaggaaaacagaaaaggacaagggatgggtggaggcagagaaatgagggggataaaagaggcgtgtcacatctgctgcagacatttctgcagtccagccaatggactggcctgagggaccatcccaggcaactttaaacctgataatcatgcttatctttaaagaacactttttaagcatacagatgtgcaaagaagaaaatgagcataggtgtagaataaaatgtataggagactatcggtttggactgagttcctgcactaggcccaacagatcaaatcgaaatggagctactcatgctgaagttccaggccaccaactccaactaagttgttacctgacctcctctcaggagagaaagagagagataatagccaagtcccaaacaggccagtttagcaggcatgataaaagaaatcccctttgctttaaccatgatagggaaagtaactttgaaatgacccatccactcttgttctctgtttctgctttcctcagcccgtttctgtgtatgaagccatattcc

SEQ ID NO: 38128 - DNA, 1569 bp, Artificial sequence
  DNA replication origin
ctcgcccctcctttccctccgtctttctttccacccttcctccctccgtctcttctctctccttccctttccctgcctcctccccctcaatcctccctctcgccccagcctccttggccgcggagtcctctgtgagatggaggagctcagttggctccgctcggctccactcggctgggctcggctgaaaaaagccggggggaggtggcgcgcgcgggtttctgggaagcgtagtccggcgcagtccgcgcaggcgcactgccgtcgggcgggcctagcgggcgcggtcattgtcctggcagagcggcgagccggtgagtgtggctgcggggtcgcgcccaccctctacctgtgccgggggccggaacctggccccggggagggcgcggcctcggggagacggcgtgcaggcccaggtacggggagtgcagggctgggtgctggtccagggcgtgcgggcgcaggagagggcgtgcaggccgggaccgaggtgcgcctggagaggctgagcggccgaggagaggctgaggggaagctgaggggctaaggagaggctgactggaggctgaggggctgaggagaggccggggccagggagggagaggcgtgagtgggttggaggtaggaaagttgcatgaacacgagggccatcctggggggaaggtggcctgtgtgagagacaggcagtgcatatcatcctgaggatgaggctgtgtctttgtggatattgtgaatgtgtctgtgtgtgtgtctgtgtgggtctgtatgtgtgtgtgagacagattgtgtcgtcctgagggtatggctgtgtctctggatattgtgattgtgtgtgtgtgtttgtgtgtgtgtgtgtgtgtgtgtgtgtgtgtgtgtatgagacagagagagaaactgcgtgtcgtccagaggctgggtctgtgaatgaatgtgaatgtgtccatgtatgtccgtgtgggtcatgtgtggtagcgtgtgtgtgtgtgtgtcccacttcttcagagtcttggtctctctgtggagctgtgtctctccaggtctctgcctatgcatgtgtggtgatatctctgagtgactgcctgtgtccttgtctttggtgttgtgggtgtgtcagccttgatctctgtccatgagtgtctctgtgggagggtgccctctgggtgtccactatgtctgctctttccatgcatgtctcttggcatgagtgtagggctgtgtctttccaggggccagtcctgtctggatctttcctatctctgtgtgtccacctgtgtctagagtatttcttgatgtttgcgtgtgactctgcaggggtgggtgcgtctgggtgtgcctcttccaaagactatatgcctggacaagggagcctagcagagccactaccttctcaccctacgcttctcctagtctgcctgcccacagttccctggctttttcctgcccatagaaggctctggaggcgtaggggcctgggagtgacaggggccgggtggaggaggggaaaaggaaggctgtttcttctgcctcccacaggatcttcttaaagtgggatcagactcccaaagggtc

SEQ ID NO: 38129 - DNA, 1050 bp, Artificial sequence
  DNA replication origin
tattcttggatatcccagagaggaggacacaccacacctggagttttcgggatagtaagaattccacaggcatagcagggaagggaacaacatgtgcacaggcaagttggtataacaaggtacgtttcagggacactgaagttaagggcagagcagtgggaggtttgggtgaaaatatggctgggatgacatcattcactcattgcacgtctatttcttgagcacctgctcagtgccaagcagtgttcaatgcacagagtgtacaatagtgagacagaagtggtccctgccttcatggagctcacagtcaccgaggtagacagacgacaattgaaataagcagctaaaatatgaattgggttgagtggtgataactgctatggagaaaaatgaagcaggaagggggtttgggagtaggagctggggctgggggttgctattttaagaagcttgtctaggaaagtccccactgagagggagctattgagtgaggacctgaaggaggtggggagtgagactggcagatgtctagggagagcgggctctatgcagaggacacagcaagtgcaaaggccctgaggtacagatgtgcctggtacatttggggaacaccaaggggcatggtggtcagtgtggctggagggtgggagggaggactaggaggtgaggtcatgggggcgatggggtggatgatgtagtgtctcatgggccatggtgaaatgtgagttttactctgagtgggtgggagccataggcgagttctggacagaggagggacatgttctgatttggcctttagcaggactcctctcactgctaagtcccacaccgaggaggttggatgtgttttgcaggcagtgggagccatcgaaggtgttcggggacttacagaatcactctgggagcccatgtggaaggaaggtgggttggatgtggctggggttagagtttagaggggcaaaggagcaagtcagaaatgtatagttagggaaaaaaggtagaaatgaaacagagaagagttgccactttccttgtgcatgttacaagctt

SEQ ID NO: 38130 - DNA, 1352 bp, Artificial sequence
  DNA replication origin
cgcgcgtcacgcacctgacccagcaccggcgcgtgcacacgggcgagcggccctacgcgtgcgcccagtgcgccaaggcgttccgcaaccgctcgtccctgatagagcaccagcgcatccacaccggtgagaagccctacgagtgctccgcgtgcgccaaggccttccgcttctcctcagcgctcatccgccaccagcgcatccacacggaggagaagccctaccgctgcggccagtgcgccaaggccttcgcgcagatcgcgcacctgacccagcaccggcgcgtgcacacgggcgagaagccctacacgtgccaggactgcggcgcgctcttcagccagagcgcctctctggccgagcaccggcgcatccacacaggcgagaagccctacgcgtgcggccagtgcgccaaggccttcacccaggtgtcgcacctgacgcagcaccagcgcacgcacaccggagagcggccttacccctgccacgactgcggcaagcgcttcagcaaccgctcccacctcctccagcaccgcctcgtgcacaccggtgagcggccctacaggtgcctgcaatgcggggccgccttcagccacgtgtcctcgcttatagagcaccagaagatccacaccggagagcggccctacaagtgcggcgagtgcggcaaagctttcagccagggctcctcgctcgccctgcaccagcgcacgcacacgggcgagcggccctacacctgccccgagtgcggcaaggccttcagcaaccgctcctacctgatccagcaccacatcgtgcacaccggggagaagccctacgagtgcagcggctgcgggaaggccttcagcttctcctccgcgctcatccgacaccagaggacgcatgcagacagttcgggacgcctttgcccagctcccacgcctgactcaacacctgggctctcacagggaggagaaacctgtcaacaggggtgccctggcagaaacccgcgtggaccagcagaagattaagagctgagggcctcctttccaacctcacaatgctatgggggagatactgtgttatccccgacgcttcctgtgaggaaaccgaggctcagagaagcttgttaacttgcctgagggcacacagtggggaagacacagggctaagactgtacctcacatctgccagactcccctgcggtcttcctggtgcaaaattataaatggggcacgggcaagtagacctgcagaaacacctatggctggcctttaatttctttctttttttctttgagacagtgtctctctctgtcacccaggctagagtgcagtggagcgatctcggctcactgaaacttctgcctcccgggtaca

SEQ ID NO: 38131 - DNA, 1469 bp, Artificial sequence
  DNA replication origin
tgctgcgtcaggtgcgacacctgggtgaaggccttggcgcactggccgcacgcgtagggcttctcgcctgtgtggatgcgccggtgctcggccagagaggcgctctggctgaagagcgcgccgcagtcctggcacgtgtagggcttctcgcccgtgtgcacgcgccggtgctgggtcaggtgcgcgatctgcgcgaaggccttggcgcactggccgcagcggtagggcttctcctccgtgtggatgcgctggtggcggatgagcgctgaggagaagcggaaggccttggcgcacgcggagcactcgtagggcttctcaccggtgtggatgcgctggtgctctatcagggacgagcggttgcggaacgccttggcgcactgggcgcacgcgtagggccgctcgcccgtgtgcacgcgccggtgctgggtcaggtgcgtgacgcgcgtgaaggccttgccgcagtcggcgcagcggtgcggcttctcgcccgtgtgcgtgcgccagtgggacgccaggtacgagccctggctgaaggccttgccgcactcgtggcaggcgtagggcttctcgcccgtgtgcgtgcgctggtgcagggtcaggtgcacgctctggctgaaggccttgccgcactcggggcacgcaaatggcttctccccggtgtggattctctggtgtaagatgaacgctgaacagtagctgaaggccttcccgcagtccccgcatttccacggcttcttggggcctccacctctctcccgctggcggctgtcaggatgcctctccttcgggctctccccaggcgcgctgcacctccgggaactgctgtcgtcggggacactggcttgggtagcagcagggctcgatatggttcttgggattcggctgaattcatcgcgttcctgcatgctgtccccagcagggtctcccttgcaggccacggcctctggctctggacagctttcctggttttcctgcaggtcctcaacctggccctcgtgtttccagtttccttccaactctgcgccctggagggcgacgctcaagagtccctccatcctcgatccctgggctgctgtcttgatctcacatcttttctctgggtctgaaaagaaaaagatagaaaaaaaaattaaatgttgccacttgtcctgagctggaaaaatggctaacagctgaactggtaagaacttagcatggggtccctggacctctgtgccaatgacattttgggtccaataatttggtgtggtgggacccatcctgtgtgttgtgagatgttgagcagcgtccctggtctctccacactggctgccagggacactacccctcaacccctgagttgtaacaatgaaaaatgtctccaggccggacgtggtggctcatgcctgcaatcccagcactttgggaggccaaggcaggtggttgcttgagcccaggagtttgagaccagcaaactgtctgctgcctgg

SEQ ID NO: 38132 - DNA, 1178 bp, Artificial sequence
  DNA replication origin
gggctgtgtgtgctggtcgccaggctgttttgccagtgggactggctcagtccccgcatctgggggagccgggagacgtgcctaaagagtttgccttagcggccgcggagccatttatgcttaaggacagggtgacgggttatcaccgcgctcgctgtgtttttggctaacggtggcagaggctcaccccttcccctgttgttgcctgaccaagactttgttcaccacaggatgcgtgtggttccatcttgtgtatgggggcggcttagtgggggagctgcgaggcgggttgtgcaggcgccctgctggcggggctaagggctggggcccgggaccgttcctcgggactgatagggctgagagcaccctcacctccactgcccctcaccgcctctacggtactgtctgtgctagccacagggtggcgcccgaggttgattgcgcaggcgccatcttgagtgacacctgggtcggccccaggggcgggcatgagggagggctttctcagtgactaggggctgccgagcctggtccactgtggtgcaatctttggctgtaatggggcacgtgagggcagttacacaggcactggtttgaatgactgctgggttggctgtagggccgggtgcagaggactgagtgactgacggggtctgcatggccccgcccactctgtggcatcatctttgctggccattaggtggcagccacggtgtactgtgcaggtgccatcctgaatgacagctgggctggctgcaggtgcggttctgagggagggtctgctttgtcttgagtgactgaggggggccatagcatgtgtgtcttgtctgatagagcagccggcattcaatgtggcgggtgcagtgcggaggcaccattactgaatgacagctgcgctgtaggagtgagcgtgagccccgtccatcctagtaccacgtgtgttggccggtggcgggggcagcagaggtgtactgcgcaggcgccatcttgagtgacagcagggctgttggagggggctgaggggatttcaaggtaggcagggccgtagagccgtgttcattcattctgtgccatctttgccggttcatgggtggggcctgcactggagccttcctgagtgaccgcgggctgcactggcgtgccagctgagccctacccccgctatcttgggcagcgtg

SEQ ID NO: 38133 - DNA, 1437 bp, Artificial sequence
  DNA replication origin
ggccagagtggccgtcttgccgcaagcccaagaccccgcggcaagccagcgacccttgtggcagggcgggctggcggacatggtacttggccgcccgctgcccagtccgagagtgggcacagtggcggccaggctgtggatggttggtgcctttttggggcaggggtgggcgcagcccgggctgctgcgttggtgccgccatcttgcagtccggggtctgaggggctgctgcagggtctccgcgcctttctgactggccgggggccaccgcagcaaaccgggggcattagggcagacagccgggggctctgccacggcaagtccagcaaggtcgacaccaatgctatccctgttgccacggcggaatgcggctctcgggagccctgggcctcctgggctgggtctgggggctgcgaaaatgccccttcctgcggggtgccatcggcctcgcggcgccggcgtgcccggctaccctctgggggcggggcttgtttgccgcagtggtggtgggaggggcgaagggctgtcctgcctgtaggggttttctttccccgccctctcgggcggtatcttaaataagggcggctgaggcttgctgcgcaggagctgccttggttggttggcggcagatggggcggggcaaggctcaagtgactgggtggcattggacgtaatcgtctgctcaagccccacccactgggtgccatcttttatgagggtggctgaggtttgccgcgcaggcgctgttctggttgattggtggcagatggggcgaggcaaagctgaatgactgtgggttgcattggatgtaatggtctgttccagccccacccattgggtgccatcttttatgagggtggctgaggtttgccgagtaggcgctgttctagttgattggcggcaagtggggcggggcaaggctgaagtgattgggtaactatccactcaggccccgcccgctttgacgccatgtttgatgggggctgctgaggtttgctgcgcaggtgctcccctggttggttggtggcatatggggcggggcaaggctgaagtgactgggtagcattagatgtgacgatctgttcaggccctgcccgcttggacgccatgtttgatgggggctgctgaggtttgctgtgcaggtgctgccctggttggttggtagcagagggggcggggcaaggctgaagtgactgtgtagcattggatatgacgatctgctcaggccccgcccacctagatgccatgtttgatgggggctgctggagtttgctgcgcaggtgctgtcctggttggttggtggcagatggggcggggcaaggctgaagtgacagggtggcattggacctagtggtttgttcaagccccacccacctgggcgccatctttaatgaaagtgcttgagatttgctgcgcaggcgctgtcctagttggttg
